United States Patent Application Publication US 2007/0054278 A1 - sequence listing, part 99

SEQ ID NO: 97461 - DNA, 432287 bp, Homo sapiens
ccttcttttcttcctttttattaagatcctgattgcctttactttgtaactttttaatacaagatatttattttcatcctattctttatagtgtacagattcttacctactttagctttcttttagaaataattccactgttctttttttaagtgtctaagattttcaagttttattttattttgttcattctttttaagcttttaatttttaattttgtgggtacatagtaggtgtatagacttatggggtacatgtgattttatgataaaggcttgcaatgtgtgataatcacatcaagataaatggggtatccatcatctcaagcattcattcttgttgttacaaacaatctaattatacttttgtagctattttaaaatgtacaattaaattattacttacagtcaccctgttgtattatcaaatactagaccttgttcatactttctatttttgttgtactcattaacctctccacttcctccaacccctactacccttctcagcctccggaagctatcattctgctctctgtctccatgagttcaattgtttttatgtttagctccacaagtaagtgagaacatgtgaagtttgtctttctgtgcctggcttatttcacttaacataatgacctctagttctgtccatgctctggcaaatgacaggatacaaatgacaggatcttattctttttatggttaaatagtactccattgtgtatatgtgccacattttctttatcctttcatctgttaatggacagaggttgcttccaaatcttggctattgtgaatagtgctgcaataaacgtgggagtacagatatcactttgatatactgatttcctttcttttgggtataaacctataagtgagattgctggatcatatggtagctctatttttagttttttgaatttattttatttagtttattttaacaaaaataacaaaattggaggaatcacattacctgacttcaaattatattacagagctatagtaactgaaacagcgtggcactggcataaaaacagacacatagattaatggaacagcataaagaacccagaaataaattcaaaccgttctccatagtggttgtaatgatttatgtttccaccaacagtgtacagggtttcccttttctctacacccttgccagcatttgctattgcctgttttttggatataagccattttaactgaggtgagatcatatcttattgtagttttggtttgcatttctctgatgatcagtaatgttgaccacctttttatatacccgttggccatttatatgtcttctttcaagaagtaactcaaaaaccatatgatcatttcaattaatgctgaaaaggcatttgataaaattcaacatcccttcaggataaaaacctttaaaaaaaaaactgggtgtagaaggaattacctcaacaaataaaagccatatacaatggaccaacagctagtatcatactgaatagggagaaactgaaagtgtttcctctaaaacctggaactcaacaagcatgcccactttcattactgttattcagcatagtaccagaagtactaactagagcaatcagataagagaaggaaataaaaggcatcaaattgggaaggaagaagtcaaattagccttgtttgcagatgatatgattttatatttgggaaaacctaaagactccaccaaaaatataagaactgacaaacaaatttagtaaagttgcaggatacaaaatcaacatacaaaaatcagtagcatttctgtatgccaacagcaaacaatctaaaaaagaaacccagaaagtaatcccatttataatagctacaaataaaattaaatgcctaggaattaaccaaaaatgtgaaagatctcagcaataaaaactataaaacattgatgaaagaaattttaagaggacaccaaaaaatggaaagatattccatgtttatggattgaaagaatcaatattgttaaaatgtctacactacccaaggcaatccacagatctgaggtgctctctaccaaaataccaatgacatgcttcacagaaatagaaaaaacaatcttaaaatttatatgtagtcacaaaacacccagaatatccaaagctatccttaacaaaaataacaaaattggaggaatcacattacctgacttcaaattgtactacagagctatagtaactgaaacagcatggcactggcataaaaacagacacatagattaatggaacagcatagagaatccagaaataaacttatatatctaaagtgaacgaattttttgacaaagatgctaaaaccataaattggggaaaggacaatcttttcaataaatgggtctgggaaaactgagtatccatatgcagaagaatgaaactggactcatatctcttgccatatacaaacattaaatcaaaatagatttaaggcctaaatctaagacctcaaactataaaactactagaagacaacactagggaaactctccaggtcattggactgggcggatttctttaggaatatcccacaagcacaggcaaccaaaccaaaaattgacaaatgggatcacatcgagttaaaaagcttctgcacagcatagggaacaatcaacaaagtggagggacaactctcagaatgggagaaaaaaattgcaaactacccatctgacaaagggttaataaatcagaatatataaggaactcaaacatctctattaaaaaatctaataatctgatcagaaaatgagcaaaagatgcatttttctttaggtctgctgatttcaccttctctggagcatcttactgcctttagattttctttatttctctactttttttaaaactcaagttctgtaaaggtctcattcattctcttcgcttgggcatctctgcagagatcctctttcagtcctctacccttctgccctcatctggaccgaatgctttctatttatgctacattacaatttagtgacttccttccactgcttttctgaatcgcaaccactgttttctaggtgccatattcagtggtgtgcaggtaaaaatttaacataggttctcgaaacatgcatataaacaaattctaattttcagcattttctgatttccattttgcaaatattcccatcatggcagacatcaagttcccaacttaagttcactgaccatagaatggggaagggatgcctcctgccccctcaaccaaggctagcatctccccaacaccacagattagagccattttaacagagatatttctaaagaacattcatccattttctgacttaacaaagcaacttggatataatttcatcttatttggggtctctgggtcattattataaatattacagtcaagggcaaaaagtggtgtctctagagattatgacatttagagagaaaatattagccagtaaacaaaatggctaaataactaaaatggaagttagatagaataattaggtaaaaaatacaatggtgctttgtttatttttgaagccttgttgtttttagttaccttttcaaatttataatactcaaatctagttttcacagtttgtttagttgttacagctgcccttctctgtattctcgatatgctcccttctctgtttttcatgactttttatttgtgctcttatttcttcccacctcaattcatttttttaagttctcagggaataaatattaataaatagagagagtgccttgaatataaaatgcatattttctcataagtggcattaatttggcttccctttcattacctgtgttttctttaatatcataaaagagaatgttatccatgcatctactgacagaaaagaaaatgagtttttctctttgaaagttcaccttaaagctttttgtcatgcacaactgctttaaaatagcgtgggtgtttttttgttgtttttttttttggtttttttttttgtttgtttttctgaatgaatggcctgcagctgctcttcagggtttcctttttttttttttttttagtattttagttatgtttggacatttaaaaaatacatatttgtatcactgatggccctataaataaaatgctgcatagaaaagttcccaggaactaatttttagagaaaggttcctggggactaattagagtcacaagcagagacaagcaggaggttgaaaacactgtgttgcttcttatcttgctctgatattttgcgttttagccatgtctgaacatttatggattcaagagatgaatcctgaatgtatcctgaatcatatcactccatgatcaggaaatacccgtgaaatgaatgtggatctgttgtggttttctttaggcttcgctctcttctcttttccgccaccgcttgctgaaggcaaatcttaaccaaggtaaattcagcttactggatagaggacatttctttatgtccaaggaaattaaagctattcaagcatacacctgccacataactagaaaaatacccagggagccattttcatttcaaagctgcagtttccagtgccatcagtatggctaatcactggatcattttattagaattactattttatcaatacaaaactagaaaaatgcctgaaaagtataatgatttgtgtccaaatacagcaggtgatattgtaaaatttttcaatgtagaatacaagaaatactgttagaacataataatggcatttttggtattcactggaccatatgaaatgcatctgtttcatcataaattgttgtgtatatattgacacactttataattgttttaaaatgtagatgtatgtaatacaaatataataaactctggcatgtctaaaattgtaatgacctcataatttctgtctggtattctaaaaggatgctatctaatccaagataaattttcttgtaggtatatgatctcaataaaatgtgattcaagggggttaactctagttttagatcagagtcttgagcccagagtaagtaaatgagtaagcttcgttttgaacaggtggttagtcattatcaccactggcaatcttaggaaaggaaaagaaagagacaagatttggctaacgtatatttcacacaagaaagcagggataggtagaaggttttttttgttttttgttttttttccaaaatggtactagttctagtgtcacaagcctggagttctttgtttttgatccaattatgttatactaagccaatcgttttattaaaaataatgatatgaaataagccaatcacagaaagacaaagttcacatgttctcccacttatttgtgggagcaaaaatttaaaacaattgaactcatggagatagagagtagaatgatggttaccagaggctgggaaggggagcgaggaaaagataaaatgaggatggttaataaatgcaaaaatagaggtagatagaatgaataagatccggtatttgatagcacaatggggtgactatagtcaacaataatttatcacatattttaaaacaattaaaatagtggaattggaatgttcctaacaaaaagaaaagaggaatgtttaaggtgatggatactctacttaccctgctgtgattattacatatgtatgcctatattaagacatcacatgtaccccataaatatatatacctatgatgtacccctcataattaaacataatttttaatataaaaataacaatgataaacttaaaacataaaaaatctgtctggattttctactgtagaaaatgatttaagaggtgtacctctcactctccagatagatttaaaatctaattatacttgaagttataatgcttaaaactatcttagtatattttgagagaaggtgcataaaacagcacatgaaataagaatgaaaattctaataataacggtgacaaaaagtgtgattgaagttgaatatgcagactcctccagccatgagataaagattaaaatagtatgatgatgcttggattcaatgctaatgaactttctttttttgttgtaggtctcagcattagagaggcagatctttgacttccttggtttccagtgggcgcctattcttggaaattttctacacataatagttgtcatattgggtttgtttgggaccattcagtacagacctcgatacataatggtggtaagtcttatttttatcatttygcttcatataaacaattcaaaatttctataagaatataaataaaatatttctaagtggccccttctgatataatgtggcattgcttttctagccctcaaatgttaaattttgttaagaagtgattatctgtggaaaatacaaaataatgaatgttgtacagtcagatcaaaacaacatgctcaaaagtgtatgatgacatggtgtcactcacaacgtaactgaattcaagttttacaaggaaattcaaaatagtggttggatagagtaggaggtctgcttgtagtcttggtaataggatagttagatgcaatgtacattaaccattaatttatcataactttcagtgacatttgtcactaactccaaaaaacaaatctttctagcataattgtttagtcactgaaaacaataatgtattttaattttaattgatttaggacattacaagtgcatgtatggatggatatttggtacacatccctaacatttcatactgattgatattgaatatttctctgtttgtcaagatgaatttgaaacatatatccaaaacttggtcagcacacactccattataggacagtttaatgaggtgtatgctgtgacccacaatctaatggaagttattcacagtaattagttgtcttttctataacataaaagagttcattactataggctaccatgtgagaaggttgtgagaaataataagcatatatacgtattgtaagttggagtaacatactttaaaatgttcattaagcctgaataaatatacagtgttcagtagaattactagatattttcttgggatacactgatattgcctcactagaagaaaatcatagacttaaaaacatgccatctttccattttgacataatctaattccacctgtggaaaataataaagttataatttttctctgttaatccattctctattttgatttttaaacttggcttttttatttctttcaccatttcacagagatatagataactgaatagactgcattccaatggccttgggagcatttgatagctctcaatttgctgccagggttaaacaatttctgctttactttccttctcttagaaatagcctcaaccaggtacggtggctcacatctgtagtcccagcactttgggaggctgaggcaggaggattgcttgarctcaggagttcaagagcagctagggtttatatatatatatatatatatatagaaatccagtgtctacaaaaaaatacaaaaagtagccagacattggggggcctgtggtcccagctacttggggggccgaggcaggaggatcgcttgaacccaggagatcaaagctgcagtaagccatgatcatgccactccactccagcctaggcaacagagagaaaccttgtctcaaaaaaatataaaataaaataaaataaaataaaataaaataaaataaaataaaataaaataaaataaaaatacattagcctctgctaagtaactacacaatctcctagaagggggtttcatggagttggacttgaggcctaagatgctttcataacatgcataatcaagctattatcaaattctaaatgtgttctagtttgttactatgaatatagagcagttttactcattacagactttttgttttatgatattggtattctgctgcgaaacaaaatacctggtggctttgaaaccatagatggcttccagagaatgaagctataggtaaacaccagtgacatttagtcctggtgattttaccctctaaatgttaaccgtatgcactattcacataactgctgcctttgttgaggcttaygccttctctcttctatagatagactttgcctcttattttctacctttctcccttccaatttgctctttgtacttttcttaaattactggcttaaaaccaccactgggtccttagctggataagatctaagaatattcttgcctgatgtacttgaccaaactcatatctaaccattcttccttttttccttcctttgtcccccacctycctccctccctccgtccatcccttctttccttccttcctccctccctccctccctttctcccacctatcctccctcccttccttctatccttyctccctcccttccttcttgccttttttccctctttccttttttcctcccttcctcccacccawcctcactcccttctttcctccctcctttcctccctccctctctccctccctccttctgtctttccttccttctttcctttttccttccttcctttcttccttccttccttcttctttcccttcctctccccatcctctttcctttactcacttctttcttttctaactttcyttctcccttttttcttctacttattaattcaagagatatttattgagcttctaccctgtgtttggccttgtgttaggtgtggactatactggtgagcaaaaacagacagacacattctctgtcttcctgggtgcttaccttacagtgcaatgaagagaggtgtgcctttatcaaacaattgtccacataaatgttaaattgcaactgcgataagtgatacgaaggagcacactagccatgagatgtctaatggggtatctgcctgtagcygggcaatggggttaggcaccctgcagggagctgagagctgaggtctgctctcagtatgagagtgagtcacgagtatgagacaagtgygagagtgagtccacaagggaacaagggagtgaaggggggtctgggccggaggcaccacaaggtccatagaagggggactatcagagcagttctgatttactcattaagcatctrttgaggacctgtactgtgctaagtttggaaaaataggaaagaattcaaatgtcagaggccctgctctgcaggcactaaccatgtaaggagtgaggaggcgcaggttctggggctctctagaggtgagtaaatggcagtgaagaggaatgagatcatcagtggggcaaggcctaggggaaggcctgagccaggtgtggagacccaggagggctgagagtctgcacacctcagtgtcatgggcctcctgctgcacctgcctcaccagcctcatgctctggtagccttgcctggtgtttgtgtcccggtctagcaatatttcctcagtctctcatggataccttcttccatacaygttaatggtgaatcactctctgctccttcacctctagagtgtcttgagtatgttttataatttgttcatgtttatgtcttctaggcaaagtgttctttgagagcatagaatgtaattagcgctcagtacatacttattgattatttttcctatctagtgtcctactagttcacagagtccacccatgatgaaactgctgtcacttctctgctggtactttttcctttgcttccctctctccctcctccctcctatgcgtagaggaaggcagttttaggtctttcagaatcttcaaagaaaagcatcaacaagaccaacaatccatgtttttgctcatcttgatggtctctttttatggattatgccaaccaagtctctctcattttatttgctatcttattcaggatcctctctcaggaaggggagagaaagaaagcaacaaatttgtgtgaaagctgtccatgcatgtcattaggtttcattctcataaatatcctacagggcatgtattagcttctctgatttcccagatgagaaaagaggtcagaaagattgagcgactagcccaaggaacacaggtggtagtgggcagcagaactgggtgtgtactggcctgtgattgttaggttcaaggagctgctagagcatgatctgtgctttgctttcactggcagattccagatgataatgttaccattgtcagtataagttgtgatataggaaacagtcttggcctacctcccagtcagatattgttacctttatgaagctccagattacgtcttattctaatatgggtataaaytatctatttgataaaagtacctaaagaatcattaatctatgagtatgagaaatctgttcacaaaaattgccttttaaaaaagagcatgttgttatttgggaaggttttttttaattcattcttgagttgttgtcacaaatgctttggtttgaagctacaactggtggcctagaattaattctgatatttaaaaaaactgaaaatgaatgtggcatatgtcccattagaggcagcagcttttcaatggcagtgagaagagttctggagcagaaatccatactgacttttcactgtgaggggaaagagctttttcattgcaagrgattttctctcaaaattgcttcttctatttttagtattgtcttcctttattggccaaaccaccacacagataggtcaattaaatttaatccatttcaaaataacaaacactttggagcaccaggtatgtgctaagtgctcacgcagagattaataaaatatgtaygttcactgagacaatttaatagacctctagttttacaaaaacacagataatttactgccattttggacaagagacagggttcatcacagctgagtttaagtaattgatcacctttatgaaaatgttttgggtaaaggaccatgagactcaagctcaccagtgactagcttttccaaactcttagagtctaaatcaaagcttatgaaaattgtttctttatctacttctccagcacctcctgcattccccatttgcctaccttgtgccagccacactgaatgatttgtgttttcgaaagaccacatgctgcttttgcctcttcagtttgcacatactgctccttctgcctggaatgccttaatctctctatcctcttggaaaacctttaataatcctcaattaaatagtcaccttttacaggccttgcctgaccactgaatgcaagggaaagtatctcttcccttctgctactgtaaatcctggtaactttctaccccagcaccctacccggctgtcatcattgcttcgctacctgtcttgccccattcaacaatgtgtacttctggaaggcagaactgtgcccatctattgctgtattctaagcctattcctgtgttctaggccaattcctgtatgtacagaccattagatatgcttaatacttgattgggcaaacaataaataaatcaaagtttattggatgaaaggattttacaagatggaatggacagggacttttttaaaatctcagaacatgacagcaatgtactgccttgcttatctcagcctgaacttggttgagggaattaattatatgataaaatagtatgtgctgtgctgcctgcacctaccattagctgacttactcctcaagacttatttttttctaagatgtagtgttgcgagctcctgccactataattgaggaggcctctcggcaaagactattagaaaaaccaccccaaatcacagaatcaaagatcaataattcccttccaggtaccatcacactattaaggtacaatttactatttctgtatttatttttagaatatgaaaacaactttgccacatagtactcctttactcatgaaagtattttggctaaggtgcaaggtggaatgtgtaccttagggcagccattcccaaactttttgacaccaggaactcatttcatggaagacaatttttccagaggttgggcgagttggttttgggatgaaaatgttccacctcagatcatcaggcattagttagattgtcataagtagccgcagcctrgatccctcgcatgggtagttcacaatagggcttgtgytcctatgagaatctaatgccacgctgatctgacaggaggcagagcttaggcagtactggtctgtggcctggagattgggaacccctgctttaggggaatactgtgttctgtcttgcgttttgaatgggccttatgtgcttctttggctatagacagtatgaagcagtgaaatcatatttacccttcacaaagcattgttgtagaatcagttatttcctatctgtttactcctcggtcaaatatgttttattctacttctaaatttaaaaataagatttttgtcctataattacttaaatcttcattatttcatgggtgataatttaatcaagcaggttttaactcacatgcagatgaattagcaaatttgtttaacattttttgaaataagattaaccttgaaattaaaattagctcaaaactgcctttaaaaatttgtaaagggtcaagtgaatttgaaaagtccgcaatttagttatctggacttttatgcaaatgctcatgtgcaaaggacaattcattttaatctgaattgttatatagcaaaatttttctgctatgtcagcataaatcccattcttgagtcactgctcaacatgaaattgagtgttaggttttgattcaattggtaaatgtcaaacctaaattcctcttcaccagttattggctgtgaagccttgggatgtttgtttgctttccttttgccatagttacctcatttgaaaaacttgacccatgtatcattttaaataattatataacgtatatgacttgcttactatagcctaacacagagtaaatgtttgacaaatgtttgagatgttcatatgtctttttttcccctttactctactaaaaaatgttacaacaatgactgagcaagaaacttactctacatttttattataagtctagcatattgtatatgatattatagcaaattgatgtgtatatgaaagaatgaatgaatggtctttctcgtaattagaaaataagcaagctcagaaagtaaaaataattcatattataaactaattgcttgatggggaagaaatagactggaagatgtccaaagtttatttccattaaaaaatgctgaaatatccttgtaaaactaggatatatttaggaagccacatagaatgcataaacattcttttttcattattataggtcttgtctatgtggatctggatttaaaatatatatactaaacataagcaaagtagaagagagatggagagattatgcagagtgatttttttcttatattgaaaagctttctttactacaagtatatttaatatacctaaatacatgatgtaagcctgctttataataaccaaagggtatttgtttaaaaatggagagtcttattttttaaattattgcttcagttgaattataaatgaaataacccacttcaaaaagaagatagggaaggtaggcagtctctttggccattggttatcccaatgcttcctgcctagctaaatttctrtggccatatttgtatctctagctatctcttttcttttatactcatgatcagatttgtgtctcaagtgcacattaaggtatacttcataccttataacaattcaaaaatcaaaaatatatattttctttgttctcagcaaagaaacacaaatttattagaagaaacttgtaatgtaaatgtactagaagatattacacaatattgctaaaacaaacaacacaagaattccatattatacatgtcacactaattgtaaaatactaaagatactgtcattctaaaataaattgccaattatagaacatatatgaataaaaatttgaggtaaactggtaatttggggaattggtcatttgacaaattgcttaatttggtgactggttrtcttgccatgaatctataatccttttactaaaatcttttaaaacaaagcctaccctgtatgtttaagcatcccagctctgaaatcaaactatcaggtgtcaaatcctaactctgacactaaataggtgattaaatgattatccctctacctcggtttcagtgtgatgattgaatgacatgatatatgtaaagcacttaccacaataccaggaacacagaaagcaccaggataataacccttttattgtcaaaaacgtaggaactgacagttgaggtttacatagcctggtaattttgcctttgcaagttcagaagtagcatcaagattacaacttgtgagagatcctgaatatacttcaatcaccaagtttgtgctatgatctttaaatagatgtgttttattatgcatttgttataactatgaattgattcactaaaaaatacctgtgcrtttaggaattagtcccaataattaagtcctatcatatggttttgtaattaatttagtttattgccttactttaatattgctttattttatgttcttttcctaatctttttcaatggcttttttctcttgacttagaggttagcattgctctctcatttcaatatacttataattagatttatttagaatggaagatatcaaacactagatgccatcttgctagcaagagcttcaaaacttattgaaagtttaaaatttactaagtccactcttactagaagactttatgaacagaatatattacagcatcagcaatacctgcatataccaaaaatctcactatatatttttacttatcttaactttttaacatgttttccaactaaatttccagtgatttttgagcttttactcattattataattgtattatcttaaaaatgaaagcaaacctcctttcagaaaaacaaatatatgatggaacattaaatgtaacsagttataggactatactactatatgagattattttaaaaattcataaatgacagaatacaaaatataaattgaatttcataaatagttaaaagcttctgataaagtttctattagtaacatacctatattacacagagtctaaattttataattctattgtttggcacagcatagaataagctaaataaatgatttcagtatttattttaatttaaaaacagtatgcaatgattgtaatcactgatagaaaacaataattaaattaataagtctacttaagacattaagaattcattcatttttgtgataaaataaaacgaataggcaaactgttgtatttgatatgttatttgtgttctacagtaagtactatcctcagtcatcctagctggtctgtatgtcacttttctgggcctccattagtttgtctgcataaaaaagtgactggatgagaggagccatagtccaatcattgattctccattgatgagtctctcgatctagggctaccttaattaagaccgactaatactctgggagaaggtatttcctaatacataatatcttaataaaatcaattaatcagtaagaccagtaggtttaaaatttgttggctggatatgattggaagatatgaaaatctgttattcatttcctcattcttaatcctatttattaatttctctgctttaaaatattttatatggttatatttttattatatgatcatattagaggcacacattctactaataaaatagtccaacaaacgaaagtttgttaattttgtactccacgcatgttttcttcaaacatggtcttctttcagtcctaggtttccataaatattccttaaaatgtgacagttttatactgtaacttaaagatgatagagagctcacagaagatttgcatagttgtgttccctagaaaagataatactcagaaaacagaaatcaaatcaacactttggtttaacttgtacctggaagccagcaaagcactttaaaagtaaatctaactttgttggtgtctactgaaagcagtagaaattattgaatttttaatttctggaaagcttaggggaccacatagagagcactcttttctgagygctccgtcagtttcttcccagaagacagacttattgacatttttattattgatttatttgatatacatgcctttcatctccatatttttcttctctttctccctcccccatttctatctagtatacagtgtggactgccctctgggtcacctggaatgtgttcattatctgcttttatttggaagtaggtggactctcaaaggtgagtttatcatgcttttaaagtacactttaaaatgagtacacttctaagtattgtgactacatacatatataggtatattgtgtgtgtgtgtgtgtgtgtgtgtgtatagaatgataaaatactattcaaagaagactttaggtaccacttaggaaagaatgatcttaggagtgtgttaatatcatggaacttcaaaacaactgccttctggtttagtttgttatactgaagtgggactgaacttacagtgtatcctcatgtccattttaaaaagacataataccatagtgactgcaggcctaaatattaagtagaaaatggttttgaacatgcttgtgtttaaagtaggaaaagggattgatgaagatgttaacgtaacagacatgaatggcaagtttctatctttgctggaatattaattctggaaaaaattgaccaagaacaaaactcttatattaaatgtttactaagaagtaaatgcatcagcgtggtgattcctattttgaaattttaatcacacagaagacagttgtcttaatgcagcaatgatacacacgttatttctgcctgtctagaactgtcagcaaagcacatgattttattatgcctcctgcaaaaatgtctcaccacccaaatgtaagaacaacttaagtttctagttgtgtttcttaaacagtttttgtgtgaaccagcacaattttcactatagagaagaaacttaacagtattacaaaaagtataagaaagctgtcatattttaaaacttctcattatcaaatatatttatactaacttattctactgctttataacagtctcagattttctaagtaatgcacctgtggcttagattttagaaaatgtgtcttgagcagcaaggatactttaagaattcttaggttccattgaagtccttgtggtaacaaaacatgtttgattcagccaagcagcaaaaatccctgaaggatttttccagagcctccagaggtggttactcttttttctccactataataactgtaattagaacttgtcaccatttgctcacattggcaactgtattcaggaaccagaagcaacgtttccaatattgagttcagtatatttggactaacatctcacttaaataattgtgctagcgattgtagttcaccactaatttctaagatatraaaaagtaattaaattaatgtctagttatattctataaattcagattatgaagtaattttcaaatgcaaatcttatgaataaaataattgcaaataatatattaagcacaacattttcaactcactgcattttgtatcttgcgatttggatggtcattttaatcatattttttatttcactgggtagaaattattttttcttctatatacactaatttgggataaattagaccagagaaatttgtcctatggaattggcttcatagtattttgaaagaaggctgaattttgaatcataagtcttgagtccaaatctggtcttcagcacttattaactgtgaactctgaggcaaatcctttggctccatggagtctctatgaaaaataataagaccagattttccaataataatagtagtcagtgtttattatacacatgatatgtggtaactcaggtaagctttgaaacaaatctatgaagtaataaaacaaataaataagtatcagcagtcatttttttcatataactctgatttcccactgctattcaaggttatttttgtgaatttttgtaactgcttttctaatatccatgtgcatgtctaaaagtttttatctcatttctttggggacaaggttgaaaacatggacatagtagtcctggttactcattttattacctatttaaatgccattaagcagtcaaccaagtattctaggtcattaaaaagatagatgactccaaaaggagcatcctaaagattttctgttggtctcctatttactgcctcaaagactggtaacatctcccttgttagtcacagtttagcctcaattccagtctatgggaaatctattttggaaaataaagcaaagttaaggacccttgacaaacacaaataccagccacttttccaggttcgttccattgtgtaggaaactcctcgtccatatgagttggtttatatactaactttctagattctccatctcctgctagttcatgaagatacttcttggaattatccatttggatagattaatagaaacctccctatgctgtcaatttggtccaaaatatacattctgggatagtgaatctttctttaaaaatgggrtccagagtgatttccacaacctctctgtggattggggtgttattccaatgacagacatggcctatgaatagcacatttgtacgctaaggtgttcttttgctgacaatttgcattcatggagtgacagcaatcctgtcttacctgaaagatagtgagctgtctcatgggcaggaaagcctggaaactgagattcttacaatgctgggcaggctgacagtgctgcatactcttgtgttttaaaaagatcattttaatttctagtaaggtaaatactgatagatgtaatccacataagcaaaagctgtttaggatcctcattaacatttaagactatagaaagaaactgaggacaaaaagcttgagaaccactcccatagagtaaccaatataactaaataactaattaactaactaaataaaaataatgcaaacagtaagaaaccaaagcagatgttacaaataaaaaacaaataacgatatggtagattaaaacacaaccatgtcaatgactatatgaaatgtaaatagaccaagcactccagttaaagacagagattagaacaatggatttttaaaatgacratagttaatgttatttatatgaaatacacattaaacataaatacatacatatatttaaattaaaaagatggaaaatatatgctatgtaaacgataatcagaagaaaacctctgtggtcatattaatgtcagaaaaaaagtagacttcaaataaagagtatgaatagagataaacagatgttttacaatgataacagggtcaatgtattaaatagacaaaataattcaaaactacaccaaataactgaattttagaatacatgaggtaaaaactggcaatattaaagggggaaattgacaaatccattaacatagggggagagtttaatactcctttcttgcttatttagagaaaaagtagacacaattcagtacaaaataaaatatttgaacaacacaaagtcaaacaatgtgtctgtcatatagaggatattaccttaaaattacaatttatattttctattcatgtgcatatgaacaatgaccaagatggcattctgggccataagcaagtctcagtaaatgttgaatgactgaaataatacagataatattctcccaccacaaatacaagagtaatttataattgttaataattcacaaatcaaagaagaaatttagaggaaaattgaaaaataaaagtacaaaattaaagtacataattaaaaaaaaatcttctttgtggatgaattcctatcagtgtttagaggaagaaatgtagatttaagttgcttattagaaaaaaagaaaagttaaaaatcagtgatatacacttccatcttaagaagagcaatttgactaatatctcatagttggttctttgaaaagattaataaactaacaagcatgtagtaaggttgatccaaaaaaagaagaaacaatacaaattatcaattcattaaagaaagaagtgacataactacagattcaacagaaattaaaagattaatagaaaaaaattaaacaatcaaaaatattgatagccatgaatttataattaaaaatctttctacaaaaaaatcaaaacagaaacaaccggtatgcaattggttaaggaaacagaattttctgtttaaaaattttggggttagtagaaaaatgtcaccttgctagagggagtaactttctgcaagcctctcaggtaaaaacttagaacaaaaggcaatagttaaagtttagtcttcacttcccccaaatctgggctctgtgtactagcagatctgttaggtggggatcctcagtgggggtctgttcagatgttgtctttaatttctatagggaaagcaaacatccctggagctttaactcccttggctattgttaagactactattaccttcttgtttagcaagttacttaattacctctggggctagccagatgcctggaatttctctttaaaaaaactttggggtttttctttatttccctgcttggagttttgcaggacttcaaaaaaaaggtcagggtggaggtccttgctcaggatcaatctatcaaacataagaaatacataatgctaatcttactcaaactcctacagaaaatagaggaggagggaccatttcacaaataatttggtgagctaacataatcctgataccaccttatagacaagaattaaattgacatctatgttttagcagtccttggccatctctccaggaaattcctcattagccattctgccaagagggactccacacggtgaattgtttgtcaccacctgatcttcccttctcttcactcccaggctctttgctaagatcaaaattcttgctcctttatagatcaaatcaaatcagctctacctttttgtttccctcactaatccaagctatttccagacatcctcactttccttatctacaaaggcccaaccaaatgttttccttaaaaatgagctctctgtcctgcagatgagaaatgtcactctgtcacatggcagaagcatctatagtcagattgtatttaaagacttttttaattccccattacatttcactacattttgaagtggtagttgttatcaatcttaatagtttgttctactggaaatagacaatgactttagattttgttttctttctttcttttccttccttccttccttcctcccttcctttcttccctcccttccttccttcattcctttcctttcctttcctttcccttcttcttttttgtcaacagggtaagggttctttttggttagagttcttttctcataataaaaaatatatattacatatataagttgcagaaactagaaagacaagaagaaacaccatttttgcttcaaacatttgaagaccactgccgtgaatattttgattccagtttattctcattctgctgtgtttccatggtttttctctcctgtttttcttattattgttgagataatactatagagaaaattgacatactgactttttaaaaattggacttaatgaaaaacatttttatgttgttactaaagtcatggttaatatttttaaattttgtgtaatattacatcaatcatgaatagttattttttctgctctttctttaacaggagatgttaaasgcttctgatacattttgctgaatttcttctccaaaaagcataccattagctgtaaaatatgagtatctagagtgtcattagcacaagttaatctgtttcaccatttggggtttttttggggctattttctttttttttttttttttttgcagttgcaagatttaatagagtgaaatagagtgaaaacagagctcccatacaaagggaggggacccaaagggggttgccattgccagctccaatacctgggtttatatcccgatccttgtccctcccactgtgctctcaggcaatagatgattggctatttctttacctcctgtttttgcctaattagcattttagtgagctctctgattggtcgggtgtgagctaagttgcaagccccgtttttaaaggtggatgtggtcaccttcccagctaggcttagggattcttagttggcctaggaaattgttggggacgttggccgacaacaactctaactgcttcctgttgaattggggtgtagtaggggttgtgcagttgagatttcctcgggaggggtgccttcgatgtcattaacatcggagcatgggctagcaggcctgtccaggggtctatrgtagctcttagtcatggactgcatctggagctccatttgaagaacgatttgtagttttacagctttgactctgaaagagacaaacttaacaaggaggttaaagatacaaggattgaaatgtatggcctgcagtgcaggggattacttgtttggcacactttacaggccctgactatatgcttgatagttttgaaaaggcctgatccagtaaataataatttggccatctgatgggtactatcaatgcctaagtgaaaggtttggtgaagggttttaagtaatttccattggttagctgcaggcaaaagtattttttcttcttcggtggctagccatcctgaggggaggaaactatgtcttcgtgagtttcctcattctatttcttcttctgagtactggggctttgtttcctggaggtgattactccatactaggggtccttctataagcatttctaatggagggtcctgccttgcagctcttttggcttcaatatccactgggcagttcctttctatttccctttcctttcctttctggtgaccctggcagtgtaagactgccacctttttaggtttctgtacagccaatagtaatctcctaatggcttcctgatgtttgacaggtgttccctcggaagttaggaattccctttctctccatattgctgcatgggcatggaggackatgtaagcatacttagagtctgtatatatatttacccttttctctacccctaattctagtgcccaagtgagggctattagttctgccagctgagcactagttcctagagtgaggggattactttcaagtattccgttatcaccgaccactgcataccccacttttcaaagtcctttttctacaaaggaacttccatcagtatacaagttgaggtctggatcagtcaagggaacctctaaaaggtcccctcgaacagcataggtttgagcaattacttgttgacagttatgttctatcttttcttcattgtctgcaagaaatgtgactgggttaagagttgcacaagtgcacagttacagcactggcccttcaagtaatggagcctgatatttaagtaaatggttgtctgacagccacaagtcttctttagcagtgagtatgccgttcacatcatgagatgtccacacagtaagatctcttccctgtattattttaactgcttctgatactaagactgctactgctgccactacccataaacaatgagaacaaccctttgccactacatcagtttccttactcaggtatgccacrggttgcaagctggtccctcggacctgtgaaaggactcctagagctattcctgtttcttctgtgacatataaagaaaagtcttgccccgttggcaagcttaccactggggcttgggttagggccttctttagggcctggaaagccgcttctgcttcatgtgtccatcttactaaatgggtatcggctttctgagtttccttaattagtgtgtataatagcctggctatttcgcttttcatggtgaaaagaaaattcttatttctttgtttaaagaataatttttttatktcttcaaagttgaatatctcctaatgtgtttgatagtcggcttttattttcactttttgttaatagggtttgtctttttgtgttttagtgatgatgtttttaggctttagtctctatggaacataattttgttctatttttcaaggtgamaatctgaataggtattttttaccaataactgaccaatggcaaaaacaaaatttacttagtaggcttttcactggttttgcttttttatgatataatacatttctataagatctatttctagaatatcatcattttcrgcacatactactttatattagtttgtatatactttataataggaattatctctctgcaatccagtcttcccaagtctatgacttaacctcatacatttggtttacagatgattttagaataaatctgttcaaatatatataatgtatattatatatctcattttagttttgtttttgttcattatgtttaacttttaatttaggaaagattgagaaaaatttatgttagagaattcaggaggaaagttttgagtaacagaatcaatcacagaggatgtgaactaaaagttccaacgtcaaactccttatgaactagtcatcacggattgtgttaatattcttgggtatcacttgacaaaaattattttttcagtttccttactccttagtttagcaaggtacaagttcttgatccatgaccaagaagtataaggcatgcagacaccggagagtgagtaaggcagagtaggattcattaagcaacagaaaagctctcaacagcaagaggggaaccgaaagtggattgccasaaatggggctgagtttgggtcttttatgtggcagaaacaaggtagtcttctgtgtgttctgccttaatgagagaagtaaagctgccccctgtgggtgttgcatctgtgtatgcctaaggttggccagagtgactccatgttgattattactcatgagtgcctaagcgaaacccatagagggagggtggggacaaaactccaatgttaatgatattacaattggctctgggtcaagttaaggacatttagtggatttattttgccttcacctaagttgggacagtcccttctgagcagacatcctggtataagaggaagttcttaaccacgtttccaccctgctacataggggcagtgcagatgcattcccgcgggttctgtctctctccttagaccctccctctgtgtctgcctagccagcctctaactgtctcctctctctaattcatgtcccttctaattcacgtagaagggacactgtgttggagggacaacagaggtcagagaagtaggaggcaggaggactgggtttggaacagctaggagcttaggtagacactggaggctcagaggaatgactgtcttgtcagaaaggcacagctgagatgcaaacaggatccagctgttgtccacctgctcactatttaaattactagggtgtgatggagggtgtaatgatcccagctggatcaacatctgcctctttgccacaggaagacagggttcaagattagaggtctcactgattccataagctgggaaaaaactaatttcaatacaaaacaaaatggggtagtctcaagaaaagagagacaaccatggccaccacagagcatgtcttaatcattcttatcaactagtaatgtatattctcatgggcataaacaattatgcctcttgcatattatgggagtcttgatcacagcctccagatattccctttccttttgtctcatctgccagcctgccctgcagcaggcatttgttaccgcaggcttgagtgttttagttctccccatgcctttcagcacttgaaggtaatggatgccttgttttaaggaatgtgtatatgtatggtggggtggggaatgactgtgggtaggtaactaaaagtgtctgtctatacttgggtaatctcctgaagcctcaatttcctgttctgcaaaatgaagaaagccacaacaataatcgcactgggttgtggaaagaattaaataatacctatgcagggcttagaaatgatcttggcatattgtgaggtttcagtaaatggtggttctcattattaccttcaacatcatcatctttattattattggagaaattaacagacatcacaatcctcatcctgaaaacctttgggatgtatttattactatgcaagagctgtaaaagggaagaattgtaggactgagtgactcgtttaaaaatatgaaagagtcccttgtgataggacctcagatctgcattttaacttcacagctgtaacagtattaattaaatcatttccttcaacatgtaaatagctttttgayatacatctgcagccagattctcctggtgtccctaccacttcccctaggagtactttaagcatctttggaagtctccaaggctgtttttcttgccacactttaagatcatcaagggcacaattaataagttattgctgcttgtttggaagttacaagacttgaaataattttttcctcctgaggaatacatttggaattaaatatgaaaacccatcttatttgctacacttaaagataaagaacccaagttttaatacttttattccaaagaaattagtccaatctgtcttaatggcatcttttaattattttacatttaaaataatttaaaaatttctaggtacattttacctagaaaatttaggttaatatttctcctaattgacttatcttgaaaggtttggtacttacatattagtagtcttagagaattttcaatgtgtcacattttcatagaattctgaacctgtacaactgtgcataagcataactttgacataaaaatgaatgaaagacattctacaaggacttattttatattaatcatgagctttgatcaggggccttctaaaatcttataggcaggggacaggggaggaaaatggactaactcttactggtttcctacacagcacaggggcttcccatcagtttttttccattttaaccctacctcagaggtagacattagtatctttattttataaatgaggaacctcatccaggagaggctaacttgctcaaggcacatagcagtaaactgagatgtcaggtcttaatgcttccttccgaaggtcacttcatttcccattatagcaagttgcttcctacacagaaggaaaacccacctgcatttgtttctctatgacatgttttaacagctatgctttttctaacttgtgggcattttgattcttggagaaatttaagccatttcctcagaaggcaataatagcaccttattgtcctcttttgacttaaattttttgacttaaattgacaccatcattcatgagggtcctctttttaaatctttagttgaatagttcacctgagcagccaggcagcatcagtgaaatagttcttcctcttcaaggctcattcttattacttaccttgaattgttcctttgcacttactgggaaaattttttgtcttgatcaagattcattttccttcaaggttggattcttctatcaactttagcttttgggcaggcaatttccagtaaaatattttagaccrtcaattcagagttcagtacatgaacaattgcagaggaaacagaactctcagtttccctcagctgcttacaatctatccattgtcttttataaacattcaaatatttttgcatctcatagagttctttttctgatggtagtttgaaattaaatcaaggatatatagcatctttccttttttatttaaacaaatacaacctactgaatctagtaaagtttttaagtcatatttatattttctttttgatatcttcctacctggacatttttcaaaatgaatcctaaaatgtgatgtttaaagaggaatggaggtagggtacagaatatctatattcagaaatagtatatctggcaaattgtacagaaatagcatcctagaatcacagccaaactatgcccacttctggaactacaagaataatatcctatgcactattctgtatcctgaagtaaatggatctatctatatcaatggacactttgggaaagatacatattcatttcactagaataacaaaatatttcaggttctgaactaacatattagtaggtatgtatcctgctgagctaaaggaatatttttgtctataatattgactgatggtggtggtagtggctgtgagtatctgcccacttattaaggatctgtaaagggagaatcatcacaatctgcttccaggtactaaatctaaatgagaacaaaagcctgaaaatgtttattgttatgtttggttcctgcacaatctttatccaaagagacgcaattatattcttttaaaaaatagcaaggaaatgtaaatataggtgtgagtttcctattccaaaaatttaagctacgtcttttcctttggcatgagtctaagtgaacataacttctaaaaatacagtcctcagtttcttttttatagtgagataatttgattcytcctgtagcttttctacaataaagaaaatcacaagcaaggttaagctcagtcttatatttttcataaatttcatcaaatacaaatacctcaaaaatctttatcctaaaaagccaatttgaagctacattataagccaacgacatatataaaacacaatctaaactaccaagtaattgccacaacctgggtagtattaagagtttttaatcagaaatttgtattgtaatcttatgcctttccataagggttcaaatcgtttttaccaaggagyagatgaatatattattctatcaacagtagctgtatttcttattatatgattagaatcacttattgaacaaagcctatgcaaatataattgaaacactatccagaaatatgttgtctttgctctttgtattttatcttttcttcttctaatgaaaacacacctgagatcaatatttaaagataaacattttacctttgtatctagtttattgactcaactcatgggataataatcatgaaatggttttatttctttgaataaactgcttccccaatcttctgccccaaaccctctttctgtttcataaaacattgtatacagagtctatgacaacattggtcataaaaagcttgtttcatgtctgattcacatctattctttccccttaccaaagctgaccttgttttaggccttgacctctccctgatcccaactctactctgggacaagaaacaggaggtagtgggtcttcttacataaccagtcttaagattatgctggagggtttgaaggatcctgatctcataatgatgttggtctgttccagctactgctagtggcctctgctgatgaatctccaaacatggcaaattcttccactaacttcaataagtcaatatttatttttaatgagtctataattattctaatacatgaaaatttgttaacatttcagaacattacatarcattaagccattctgagtagactccaactgctgagctgaattttcacgtaagcatmattatcaagagaattttggtgctgtgaagaaaccacacttttatagcttatattcaaatgcttttctgtgtttttgaagacaatttraaactactgctgcagaatttttcatgcagtcgattgaagataagatcattgtagaagaacaataygtagaaccattattcttataagtgacattaagatttggattttcttgtgatgttratttgcttcgaatgcaaaatcttagtgttgtgacatgtcaattaagagtacagtcttgatgatgaagaatttctggtgacatttgcaacaattaacaaattataaaagagaccctgataaacacgttttgtgacatttatttagtttttaaaaccagaatagcagtgtgtactactggatagccttataaaataaaactgcaccacatggtgagattatgattgatgagtattaagctgaagtgccctgcaggagcagaggagcctcagataacaattactcaatgctactcccacgtatgttacagaggcaaaacttaagtcatttaaattcttcggataaaatttttccatgtagacagttgaaggaaaaaaaacacagataatattaatcatttctaaacagttatttttgcacagagaaagtttgtctctgagccccatgctataatggcatgaggaattataggctgaggcttcagattgaacttaattagtgtcttgcacacatatggccctggaagcatctgtgcatctgatttgtgcttcctctggttgtggttgtcactgcaactttgatattgtaccagctacctwagcataggagtcaggatccctgactcaggaaggataagtttgagaatgcaaggtagagagaattctgagaagattaaatcaaatatatgaagaaatatgtgaaaaatgattggtcagattagtgtcaaagctgagagaggtggaaagagagaaaggttttgttttatctgcaggaagccactaacagaatgacagtttctgcagaaacccttgtaacaagataccctttggtatgaagttcctaacaagccagtgtctgccrcacagcagggctgcctggaatgtctgctgcggcacagaactgcccaaggaagagagtcaggaaacaggagagattccatccttccatgtcccatctgaggactaatagaaaatagtgagaaagttactagagtgaagattgtccagaagatgaggcagaactggctggtcccagtagaggccactgaatggaggcaacaaggtgacagaattaaaaaagaggaagaatccragtgtctgataacaagaatgagctagaatcgcctttgccctttggaagccctcagcattgattcacttttgcctgctttctgattcaggaatarcagtaggacaggaaaaatacagtacacagctgtgtgtgtagtaattgtcrgtgtgcttgcatgttaaaatcagtatattgaaacatccagctgtctatgctcacttaaaggctagtttttgtctgaaactttcatcccactacagaaaccagatggaatatctcacaatcaaataacagatgaagctgaaaaacaataaaagcatgtaacacataattctactttattcttgtaggagccactttaactcaaggctctgagaacttatttatggaacccaaatattagtaactcgtaattttctaaaagaatagaaatttaaaagcatacmtttctaggattagaattggatggggaaggacaaaagttaattgaaatttagcaaacttcaaagaaaaagaaagaatatccatttgttaaattaatttacaaatgggaagtatagctttctgtaaaaatcatatcattttccaaattttctaagtgttcaactatattcatcaaatcattctttcattaaacaaatgatggcagaagtttctggttatcgtccataatctattcccgcttcttctggtcaagagtctaggaaaatcctgctctcgtcacaggtggcagggctaaaaagctctatttctttgtctctgtaggtgtaggtatggkcatctaagtaagttctggccattgtgatacatgcagaaggattgtgaggaacttctggaagggctgctgtagagctaatgaattagaagctgacccaaacttagtgacttaaagaatacaaatatgttcttgcatttcttctgtgggtcagaagtctcatgtaggtcttaatgacacctcaaaatcgaggtgtaagaaggggctgtattcctttttggaggttctaatgtgaccttgaggatgtcaaccatgcattagaatggtagagctgaaaacaaaatgagcctaataactcaacggagctttcagaccagccctgagctgcccatgaccggatttgttttacattagaaaatgtgttcaagccattgtctgagggtctgaaatatgcaactgaaaaccgtgcctatatcattctatagtctattttatctagtatttactcggttcaaagcactataccaggaactagggctacattcagttgttgcccccataaagtatttagtatacagtctgccctctgaatctacaggttccacatccatgcattcaaccaactgcagatcaaaactatttggaagaaagcaataaaaagtaacaatacagaaataaaaaataataccaaatttaaaatgtagcgtatctatttacatagtatttacactatattaagtattacaagtattctagagattacaaagtatatggagggtgtgcacaggtcatgtgcaaatactatattattttatttcagggatttgagcaccctcagattttggtgtctgcagggggcctggaatcaatgccccgtggatactgaggaacaattgtaatagaaacaaattttctattaaatgagtattcacaataaaatgtagtgagaattatgataatggaaggaaaacaaactttggtattttaaagcagggaacacagttttcctaaggaagagggaattaagagcaaagaacattatagcaaataacatgctgatcttcacagatatgctgtaattgacctaccttcagtgagaaaagtgcttttcgttgccactcttaaaaattccttataataaatgtgcgtcgatccaccatctccatcttaccctcttttctcagattgtcctttggcaagcacatattaaagagagaacctccaaggattacatggatcaggactaaggtcactacccttgagaggtgatcctgtagggtcatgctctaaacaagggaggtatcgagttacagattgtaacaatcagtggcctgaaaatatctgttcaggcacagttcgggaaaaaatgctagtctactagtgttccttttgaggttatctgtaattttcctaagcataaatagacaaatgtgctcctcaactctaagaccatttcagtgcacaactgcactatttagcttagagtcaatactgattcaaaaagtatttcaaggaagggtaaatacacttcctgcaaaatccccttaagaaagtatgctgctggaaaaaaaatggcataaagaagtcctttcagaacaagcactatatccccacacttattttagccacagaaattcaatttggttgagttgtctggggacttgatttgaccctgtttccagaacaatgtgcaatggcttgacagaatcatttttaaatgggccatctgatgtttcagtttgtagatataattcatcatttatttttgtcctgtaattatagaattaatgaagaaaacacttcctctgtgtatttgaaatattaagggcatcaagtcattttaagtattagtttgagaagatactctgtcctgcttcaaggcagcataggacatcagaagcagtgattgtgtagtgagctgtgctcatcattarctgagatactgagacagtgggtgtagttatttcctacatacaattaatgctgcatgccaagagcattatattaattttggttcagtataaaatgcaggcaggctactgatccctgaaatcaatgactgtcagaagagcctagacattgggcattgggtgatcacatgaataattgaagactgatttgttaaccatgtagaaatgaagttagccatacagggagacaccttatcaattgccagcaatttgctgtcttttttgaaaaccacaggcaacaatttacagaaaagattaggccagttattgtacacatgtgacatattcttgatttaaaatgtcaatctggaaagctgtaaactgacacctggattttggaatgaggttataaagtttatgaagaactgattttcccagagaccgtctatatttctgctgtggaagatccctgaatgcacaccccctgctggggccaactatgtgtgtacaaatgggcactgtcatggaaggctgatkcaccttctcttgggaccattcagcacctttgcatcactcagtgcttgaatgcacttggtgttcatgacagtatggtgatgagcttttatttcttggagaaaaaaatgttgtctatatatttcttcttcctgtgcaatcctgagggttataatcactttcatcctgcaccaggaatttacatttcagtacttcataagaaaatgattaaagggaaatccactttttattagtgtaatttctttccacttctttttcctattggtattaagtcagtaacaatcattttttttcacatttgaatttgtgaaaaggtgaaatgaaggtagccttggcccccagagaaatttgaaaccaatatagtatcctgaaggatgactgctattgaaagaatatttataaaatactgtgtctcatatttaaacaccatgaagtataacctatgagtgatcattttctgaatgttaccaaaaataggctttttgtatacgttgaaatgtattctcaatatttacattaatttattaacttttccaaggattcctagcaagcataatcttgcaaatctaattttgttattcctaatctgaaatcacatatgccaatgtaactatttaaaaaaattgtgttaaacttttaatatgagaaacaaatcaagactccttatgtgtgtcattgttagcaataaaataaatctaaaaactaagacatatactttctttcttcttcttttcaccctttctatatttgcccacctggctgagtctataagctcctttataaagtgatggcaattcttgtattttgctttaatcattctttcccacacttttctttttcctaaaaggagaaaaacattgataaattggttttggtttcctgtgtcacrtattaaaggtgaaacctgaagatgctaaaaattgatcataaaagccaaaatttgaactgtttaataatagagattagtattagaccatagctctggttttgcccaaatgtttgtggggctttctcaattaaagaaatcaataaaataaaaatgtacatgaatggactaattttaaaactttatgttgaaaactggcacagctctgaagtggctcagcaggcttccctcgcttggccgtctatggcaaacratactcttgccactcttggcaaacatgcattattttacatgagagtttgggaagcatagatttggaatggaaatggaaatcacattcaacttttccaagatactctcttttatgcaacaagcaagcatctgcaattatagcatgtaaactttaacttccttaaactttcttatagaagtcacaaatatttttataattattacagaaagaaagttttaaattatttatacagtcttggctttggggggatctaatcaatgaaatcatatagttttattgtccattcattgtctatagcatttttaatataaattaagatayactttcatagggggaaaaatgtccaatgatttagaaatagctatgctatggacaataaaatcatggttttctgtgtttgagtgtttgactaaatgttagactagaatataataattgtggcagcataacagaatgttttcaacttagtaagctttgacttttgttgcaaacatcaggaaattaatctctaagtctaaactgtgataggtttacacctgagcagcctcttgctgctcaggtcaggctataatgatttcgacttgatctatttctttacctttagaaactccctactttatttttcactaaatcatcaaaaaccttgtgccctttgttacaccaaacatagagttgttttattattagtttgcatttatattgtattttccctcaagtagcttgaggtgctttacagaacatgacagcagtcatcaaaacactttgtcaggtaagtaaagtgagaaataatgctgttataaatgtgctgaaggcattgtacttgctggaaaatgtttattttctacatattttgttagatacaatcttttcagtgattttgtttaaaatgagttccaactcattaacattttcttttcttggctttagaatcagacacatttgttcaacaagtttattgggcatctgctctttgccaagtattcttgtagggactgagaatataactgggggataaaaagaatttgctctcaaagagcttttattctggggaaagagacataatatataaataaataaatatacactataattgcttgttgtattaagtgctatcaagagaaaaaaacaacaaaataaaaggaaataaaaggatagagagtaacttcatgagaatggaaggagttgagaggccttggtggcagaagagagcacaaatatgggggaatgccaagtctcccagataggaacatgtttggcatgcacaaagaactgaaaggatgccgagtcatgttgctagcacgccatgagccagtagaggagagccgaagaaagagcaatggcaagatcctacaggaacgtcgtgtaggtcataacatgatttggatttggtctcagtataatggaaacccattggatgcgactgagcataggggactgacgggatcagaaattactgtgtaggggacaagagtgaaagtaagatgacccacagagatcatggtggtccaggtaagaaacaaaggtggtggccaggtgcagtggctcatgcctataatcccagcactttgggaggccgaggcaggtggatcacctgaggtcaggagttcgagaccagcctgaccaacacagcaaaaccccatctctactaaaaatataagattatccgggcatggtggcacatgcctgtaatcccagctacttgggaggctgaggcaggagaatcatttaaacctgggaggcagaagttgcagtgagccaagatcataccattgcaccccagcctgggcaataagagcaaaactccgtctcagaaaaaaaaaaaaaaagtgcttggatgagggggtgacagtggctgaagtgagaataatgagtttgaataatcagttcaaatatccaatttcaaagcagagtagatagtagatagtagtagaggtggkgcatgagacagaggtgtgtcacagacagaatctttaattctgtctctgacacatgtgctattgtctcagaaactcaaagttttcttaccagtaaaaatgcaaaaataattacatcagagaaaactgatgaacagctgagaaaactgagaccttgtgcagagtatacttttgatgctttaaaaatgcatcctgtctcccacttctcaactagcctttttctttcttactttctattccctataacgtcacactgcttatttctcttttccttgtgtttcctactttgttgcatcatatattgtccttgccctccaaatgtcttatttccagatgccaagattctgttcattgttctctttgaatacagaaggggttggttgaaatgagccctactacgttttttactatgttcttatgtacatatagtttcatagtagaatcttagtttcatagtagaatagtgattctactgtgctcttttttggtttccataaaactcttggcataatagttgatgtacttctaatagatacatctgaaatttcagtgggggaaaaaagctaaatatgaaatacttgcttccactatcagccagacagtctttagcactgagaattaaaaagaaaatatttttgaaatttagagtcaattctacccagttatatatgttcaccttgaaattcttctaatttcttttttaaaaaaatgttatgggtatatagtagctgtatatatttatggggcacattagattatttgatacaggcatgaaatatgaaataagcacaacatggaaaatgaggtatctatctccttaagcatttatgctttgagttaaaaaaatccaattacattctttatttaacagttaaattattgactagagtcaccctattgtgctatcaagtactaaggtcttagtcattcttttaaactattgtttgtactcattaaccatccccacttccccccatcagactcccgctctggaaatcatccttctactttctatgtccatatattcaattgttttgatttttagattccatacagtgataacatgcaatgtttgtctttctgtgcctggcttatttcccttaacatgatgacctccagttctacccatgttgttgcaaataactggatctcattcttttttatggctgaatagtactccattgtgtatacgtaccacgttttaaaatctgttcatctgttgatggacacttaggttgcttcaaatcttcccacttttaaacagtggggcaacaaacataggagtgcagatatctctttgatatactcattttctttcttttgggtaaatacctaaaagtgagactgctggatcatatggtagctcaatttttagttttttgaggaacctttaaattgttctccataatggttgtactaatttacattcccaccaacagcatatgaggtttcccttttcttcacatccttgccagcatttgttattgcgtgtcttttggaaataagacattttacctgtggtgagatgatatctcattttagttttgattttcatttctctgatgatcaatgatgctaaacacctttttcataagcctgtttgccatttgtatgtcttatttgagtaatgtctattcaaatattttgcctattttttgatcagattattagattattattataaatctgtttgaattccttatatattctggtgattaatcccatcagatggatagtttgcaaatgttttctccagctttttatactgggacctatctctctctttagctctaataatatttcctttctatatctgggtgctctcacattgggtgcgtatatatttaaaattgttatatcctcttactgaaatgatccctttgtcgttacatagataccctctttgtcactccctatagtttttgtcttgaaatatattttgtctgatataagtataatgactcctgttcttttttggtttccattggcatggaatatctattttcagtctttgtgtgtctttataggtgatgtgtgtttcttgtaggcaacagatcaatgggtcttgtttttttttttaatccagtaagtcagtccatgtcttttgattaaagagtttagcccatttacattcaatgttattattgataagtaaggacttactcttgccaatttgttatttgctttttggttgttttgcggtctcttcttccttctttcttttcttcttgtcttcctctagtgaaggtaattttctctggtgacatgatttaattattttcgttttagtttttgtgtatccattgtatgttttttggtttgaggttgccatgaggcttgcaaatattgtcttataatccattattttcacgtgataacaacttaatactatttgcataaacaagcaagcaaaaagaaagctaataaaagttctataccttaccttcctatccttgctttttaactttttattatttctatttatattttattgtaattgctatgtcttgaaaagttgttgtggttattatttttgattggttcactattttgtctttctacttagaataagagtagtttacacaccacagttacagtgttatagtattctgtgtttttctgtgtacttattattaccagtgagttttgttccttcaggtgattatttattgctcattaatgttcttttctttctgattgaagtactttctttagcctttcttgtaggacaggcctggtatttatgaaatcactcagtttttgtttgtctgagaaaatatttatttttccttcatgtttraaggatgtttgcactggatatactattctaggacaaaagttattttccttcagggctttaaatatgtcctgccactctctactagcctgtaaggttttcactgaaaagtctgctgccagacgtattggagctcctttgtatgttattcttttcttttctcttgctgcttttataatcctttctttatccttgatctttgggagtttgattattaattgccttaaagtagtcttctctggataaatctgcttggtattctgtaaccttgtacttggatattggtatctttctctatgtttgggactttctctgttattatccttttgagtaaactttctactcatgtctctttctctacttgctctttaaggccagtgacttagattttcccttttgaggccattttctagattgtttaggcatgttttattgttttttattcctttttctcttctgattgtatatgttcaattaggctgtcttcaagctcactaattattacttctgcttgatcaattctaatattaaaggaatctgatgcattctttgatataccaattgcatttttcatctccagaatttctgctttattctttttaattatttcaatcactttgttaaatttattgatagaattctgaattctttttatgcattatcttgaatttctttgagtttcctcaacacagatattttaaattctctgtctgaaaggtcatacatctctatttcttcaggattggtccctggtgcattatttagttcatttggtgaggttatatttttctggatggtgttgatgctagtagatgttcttcagtatctggccattgaggagttaggtatttatcatagtcttcattgtctgggcttatttgtagccattcttcttggggaggctttctagatatttgaaaggacttgggtattgtgatctgagctgatggcatcacaagcccagtaactctgtgtttcttgcagactcataggaatactgccttgattatcctgaatcaaatctgggagaattctcaggattttcagatactcttgttctcatcccttactttctccaaaacatacagagtctctctctctgccctgagccacctaaatttgggagtggagtggcacaagcacccctgtggccatcactactatgactttgctgggtcagacctgaagccaacacagcactgggtctcactcagggcttgctgtaaccactccctggctactgcctatgtttacttaaggccctgaggatctacaatcagcaggtggcaaaaccaactaggcctgtgagcttcccttcaaggtaacaagctcccccaggccctggatgagtccagaagtcccatctgagagtcaggaactagagtcagaaaacttacaaatctaccttgtgttctattgtattgtggctgagctggcactcaaaccacaagatatagttcttcccactcttctctcccctttccaaaggcagaggggcttcatgtcgtagccactgctaccacagacccatggggagtactgccagactacctctaatgttcccttaaaacccaaggtctcttaaatcagcttgtcatgaatgcttcctggactcacccttcaagacggtgaactcccctctggcccagggcaggtccagaaatgctatttaggagtcaattcctggaatcagggacaccaagagcctgcttggtgctctgcacccctgaggctctgctggtacctaaggtgcaagacaaagtcccctttacttttccctctgcttttctcaagcagaaggagtttcgccccatagccaccacagctggtagtgtgctgagtctcatctaaagccagcaagcctcagaggctcacctgaggcactcaaggtagtacctggtattgctgcttgttattcagagcccaacagctcttcagttagcaggtggtgaatgctgccaggactgggtcctttccttcaaggcaacagggtgtgcctaggaatgttgtctgggaggtaggacctcatgactctgcccagtgccctatcctgacgtggctgagctggtttcctagaagcaagacaaagtcctcctgaatcttgcccctcctctcctcaaacaaaaggaagggatctcttttggagtggcgagctgtgaagtgtggagttaggggaggggaggtgccagcactccttttgctgccctagctggtgtctcagtatgtcacatgacccctcggtccactgtctctgggcctagttcagcactagaactcacctaagagttgcagtccttgtggcctagactgcatttcaagtttacttgtagacacagagtgtagtagcccttagcagggaggtttgcaggcactcaaattctgacctgtggcatctgcaattcctctctggctagggctgatttagataccttcatgggcaggcatcagctgggtttggtctggttttcttttctgctctaacaagacagcactgagttcagtgacacaattgctgtgttgtcactcccccagtgcccagagctgctcttagcaccacactgctgctgctgccagggatagggaaagggtggcatctgtgattctagacttttttttaatctcttcagtgcctctttcagcaatattaagttgaagccaggtgctatgattgctcgcctgatttttgattcttatgaaggtgttttctctgtgtagatagttgttaacttggtgttcttgctgaagggatgatcggtggcrttttctattccaccatcttaccccaactctcctgaaattcttctaatttaaatgagaataggttatgtgaaaattcacatttttattgttgggaaaattctaattttgtgggtttttgcttttttttctgactctaacccattctccaataccaaatggaggyccaacaaytcccttyaattctgacactacctagagctagcatagaccccacaggttaagggctcagttccacaagactacgcctacatctcattccagctacaaatggggtctccagactactcacacttctgtccagccaactaaaaattcaggggttctctcgaccactcctcaggtttgataactccctaggatgactcacagagtcctggaaagcactttgctaaagattactggtttattacaaaggatacaactcaggagcagccaaacrgaagaaagcccaggacaagatatgagggcgaggtttccatgccctcttgccagtgtaccacgggcagcactttgatgtgttgatgtgttgatttgttccaacccagaagcttcccaaacctcatagttcaagaggggtttttgtttgtttgttttttgttttttaagctttattacgtaggcatgcttgattaaatcatcgtccactggtgattcattcggtctccagtcccctttcccctcccacttcaggagtgaggctgaaagttccaaccctctaatcatgtggtttcttcctttagcaaccagctcccatcttgaaaagatccaacctcacggtcctcaaaggtcacctcattaaaataaactcggcaatatagtttggatgtcctctccaaatctcatggtgaaatgtaatccccaatgttgtagttggggcctactgggaggtgtttgggtcatgagggatttctcataaatggtttagcaccatcacattggtgatgtcctgatgatagtgaatgatttattgggagatctggttgtttaaaagtgtgtggcaccttctccctctctctcccttgttcttgctcctggcatgtgatgcacctgctccacttttctttctgtcatgagtaaaagctccctgaggcatcctcagaagctgagtaaatgcaagtgccatgcttctacagcctgcagaactgtgagccaattaaacctattatctttgtaaattacccagtctcagatatttctttatagcaatgcaagaatggcctaacacactcagataaggtcaaaaggagctccttattaatgataaaagacactcccattacccaggaaatcccaaggcttagaagctctgccaagaatgggcacagatatgtacgtttttattagaccacactaatcatgcaatctttaattactaacccattgagaaaagagctcttggaaggactctgacactaggtcataaagttaaaccagaatgagaaagatactgaatataagtgcaaagaacttgaagccaagtaaaaagaaacaaaggcaacagcttgaaggactgctgggtaccaggcaaatttactcagggagcttgtttcctcctaacatcagtctcccaaagagtgccctttctcctgttgcatagaaagatgaaagcctatagaaagtaaataatttaatcctggtcagccaaatgatatctggaaaatgttgtgcttaatcctgagctgctcactccaagattaagattatagtcattattgacagcttcctctggtatgtaagagaaacaccaaatggaaaaaaagaaaatgggaaaacatattactgtgttcataccttcttgtcctcccccaggagaagtgttctgtcttatctaggcagaggraaggctaagacatgagagatttatgactaaacaatactctctttgagtagttgacaccagaactacataatacaaagtgataggaagacttagcatagtaattctgtgaattcaagcatcaaagactgtaaaccaacattcatatggctttcgtctggaattattcgaaagattatattctcacrgttctgtcattaggatctaaaatgttggccrttccacgtgctgcattccttggtgatctttatcatgacatctgcyaagggaccttgcagatcgtcatagctcaactcacattccccatttagtccttcatggcaccattcatctcgtctgcagttgaggaaatcctatttctgagaaattaaaatctctagtgaagacacacaaaatgagtggctaaagtgagagtcaaatttggaacaccagaacccacatccatggatgttttccrggatgtgattcaggtttggggttggaagcatttaattgacttatcaggatccaaaacttcatgagtcgatccagcagggagtgaagggaggaagtggaatcacaaagtcaagccagttcaaagcagctgtctcatcctgctgtgtctcaaaactgctgtagtccctcatgattgcttcgctcgctcgtggtggacaattagttgtggtggcttttttttttcttttcccatgtgtttatttgttttgcattgctttcccctccactaaaagaaacaagaagaaagaagaaagaaagaaagaaggccaggggctgtggctaacgcctgtaatcctagcactttgggaggccgaagcaggcagatcacctgaggtcaggagttcaagccaagcctggccaacttggtgaaaacctgtctctcctaaaaatgcaaaaattagccgggcatggtggtgggcatctataatcccagctactccagaagctgaggcaggaggattgcttgaacccaggaggcagaggttgcagtgagctgagatcgcgccacggcaccccagcctgggcgacagagtgagactccatctcaaaaaaaacaaaagaaaagaaaagaaaagaaaaggggaaatggaaggggaaagtgaagagaaagagaagagatacctacaattgtttccaccatggtgctgttgggttaagcattctaatttggtggtaatggtgttcagaggcctcagattccaacttggagaaatcggatcctaatgtaaccagtgcagtgtaacaggtgatttcgtgtaaagatgcaatcacctgctttcatctgtgaaaacactgtggtggctaggactacaagctcattggtacctaccttagctaagttgaacttgacaatcccatactgggtcacttaccttaagaaggggctggcctcttctgttttgaaattcaggaaaatgtgaccagcatttaatatcaacacagaccttaagtctgataagaaatatttacagtctattctctctgaagcctgttacctggaagcttcatctgcatgataaaacttttgtctccacaacctctaatcataacccagacattcctttctattgataataactctttcaaccaattgccaatcagaaaattgttaaatctacctacaacctggaagcccccgctttaatttgtcccacctttctggacccaaccaatgtatatcttaaatgtatttgattgatgtctcatgtctccctaaaatgtataaaaccaagctgtgcccctgacgacttcaggcatatgttctcagtgtctcctgaggcctgtgtcacaggccatggtcactgatatttaactcagaataaatttcttcaaatattgtaaaaaaaaaaaaaaggctggaaatattcaagcctgaaaccactaatgcgtgttggtaaaaccactgaacgaacatgcctttggcttttagggtcttcctaactgttgacaaatcattgaattgctagttaagatgtccaaaacaacaatcaacacccttgtaaaataaattgaattaatcgagcactatccttgaacagaaagaatatgctatatactgtaagggaggaaaaatatcttttccttctactcatcttaggtgcattggctgggtccctgtaatgaaacacagattaacgagaggaaaccacataaatttatctcaaaagagttttacctgacacagaagccttataagaaaatgaagacccaaagaaacagttaaacctgagtgtttttatgatacgtttgttgaagagtgaaaagtcataaaagaatatgataggacacaggggtatgctctcgtggtaataaactggggagacttagcaaggccagttcctttcagtcgtctctgtgtccctgtgtcttcagatgtaaggatgcttctttcctccaggtatagggtgggcacctctcaaatgagggtcttatgatcttcacaggagggtcagaaagcccttcctaggttttatgacctacttaaagtgatggtcagaaagttctccatgcacattctgtttctcaaattccctcagcttaacagatccaatatgccatatgccatatgccatatgccatatttgggggtagtgtgtcctgaacctcatcagtacagaagtatattagcaatttcctcaaccaacaatttaagagatgcaggggtaatttcaaatatatgctaatttagacccagacctccccaaaagaggcaagtgcatttgtctttaagtatcaattctttgaaacctattagccactgtttatgctacatctaacacaaaaagaaaggtagtttggaaagaactctacttttttcctagaaataaaaatacagttttttattcatccctctccagcctcctacaactttctttatgtatcaggtctttttctcagctaagaaacatgttaatgatcttattaacatattgaacaataacccaggaaaggctgacatttcccaaagcttttggtcaattttcaaagtaatgaaagttgccagttattcaggccaagcctataaacgcctgaaattcacttactgtctgaaaggtcaggtaaattagaggaaaatatagggctggccttgaagagtatgaatgtggtgatcctgagtgctcttaaaagtggctgaaactaagaggcctggtattaattctagctgacttcctggtattgattaagaagtaatcgcaagtgctcatttgtgggtaaattaagagacaagtcctttacagaaggtcatttacatgtcttctttttaattaatattactgactggaagatttgcagttaaattagyccattaattataaaagttatcattctggagagtaggaaaggatcatttatttaatatcaaatccaggttttcaataaattgccatttcttctgacactctactaggaaaagtgtgaagttttgatttgtgagttgaatggatgatcatgacctctgcagttctgttttgttgttactgattttattaataaatgtaatataaaaatgtaatattaaaaactgaaaaatacatttaattgttaasaagaaagaaaaatctatctttctttattttattgctcaaaggtaaacctaacattttagtactcccatttcttaagctcagcataaatataaatatatgctttctttaaatgtttcattacttaaaatatagttgcatttttcactttttcatataataaaagcattttcctatgtcataaatgttatttgaaaaccatgtcttaattaaacttcactttgagattattgtaaattcacatgcagttgcatgaartaatacagaagatcttgtgtaccctttttaattttactgtttttaattttggtaagatccaatttattttctttttactggtagtacttttgatgtcaagtctcagaactccttgctagctccaaatcctgaagattttctcctacttttttctgaaagttttacagatttatgttttatatttaagtttctcccaatggtaacatctttcaaagcattgaacagtcaagatacaaaatattgccctcctgcaagatccttcaacttacccttttataaccacacataatttcttgccattccattcttaacccctggaaaccaaaaatgtatcctacatgtctataattgtggcatttcaagaatgttatagaaatgcaattttatagcatatagcctttagggatgagctcttctcattcaggataactctccataattcttcttacatgtatcagtagatcactcctttttattactgagtagtattccatggtagatgtgccatggtttgtttaaccatttaccaaaggatatcttggttctttcaaacttttggccattgtgaatgaaactgctatgaacatttatgtacaggttttgtgtgaacctaagtttttatttctctgtgataaatgcccgagtgtgtaattgttaggtcatttggtagttgtgtgtttagttctatataaaactgctaaactattttctagaatgactgtaccattttacatacccactatcaatgtatgagtgatctagtttctctacattcttcccagcattggtgttatcactattattattttagctgttctaataggtgtgtagtgatatttcattgtggctttaattcgcatttccttaatggctaatgatgttgaatatcttttcatgtgcttatttgctgttgataaaatgcttcttcttgtcttttgcgcattttctaattggattatttggttcttttactgtgaaattttgagatttcattaaataatttaaatactagtcttttgtcagagatatgttttgcaactattttctcccagtgtgtagcttgttttttcatcctcttaacagggcctgtcacagagaaaatctttttaatttttataagatccaatttattttctttttactggtagtacttttgatgtcaagtctaagaactctttgctagctctaaatcctgaagattttctcctacttttttctaaaagttttacagatttatgttttatatttaagtccatgatccattttgagttaattaattaaattgtatttttatttctcatataagataaaattaatatgttcacaagggaagaacgttatgtgtgtggtgtgtgtgtgagtctgtgtgtgtgtcaaataaaaaatgtactgatgaaatgacgccaggagaaaagaggcatgattgaatatattgagtgaaaataaactacagtccatttgaatcagtttcaaaggaatcacaaactctcctggctgcctatatttctttggtgagttctccaaaggtctagcttagtatgtacattaatcacttcactactttccctttattcgtttaagctggagaggtctttgaccaaccaaggaaagatactataaacaacctaagatcaggaaacccttcactagaaataaaatttatgtatataaccaccatagcattttcttcctaggaaaatgtaaaatgatcttaaataaaacagtatatgtgtatttgtttacaagaataattcctctatcccatccttataccattgctgtcatttctttcacttatacataagtatatgcttgtgtgtatgtatatgtttgaatctattattctgaacacactgttatctattagatcaattaagaataataaaaataaaagttttgttttactcacttatcctctgatgctcttcttttcttacgtaggtacaaatttctggcttaaatgattttccttctttctaaagaactacttgaaaggcaggtctgctggccacaacttctctgaatttttgtttgtataagaaacgttttatttctcctccacttttgaaggataattttgttaccaggaggaggtcccagtctagaccccgagagagggatctttggagctcacacaaaaagaattctgggtgagtccataaagtaaagtgaaagcaagtttattaagaaaatgaaggaataaaagaatggccacagcagcagtgtgagttactcaactgattatacttatacttatttcttgagtatattctaaacgaagggtggattattcatgagttttccaggaaaggggtggacaattcccagaactgaaggttcctccccttttagaccatatacagtaacttactgatgttgccatggcatttgtaaactgtcatggtgctggtaggagtatcctttagcatgaaaatacattgtaattattgtgtaatgaccagtgaggatgaacagaggttactttcatcatcaacttggttttgatgagtttgggccaactcctttaccacatgctttattatcagcaaggtctttgtgacctgtgtcttgtgccaacctcctatctcatctgtgagtaagaatgcctaacctcctgccaatgcagcccagtaggtctcagtcttgttttgtccaacccctattcaagatggagttgctgtggttcaaacrcttctgaaaatttcagagttctaggttggtattttttttttctctctcaacactttaaatatctaactctactctctcttttttactttcatgttttctgagaagtcagatgtaattctttgctcctctgcagaggagctttcatttcctctggctttatttaggtttttttttttaatctttgattttctgtagtttgaatatgatataaccagttgtaggttttgtttgtttgtttgacgtttatctgttgaagttttatgagcttcctgtatctgtggtttagtgtcttacattagttttggggaaattcacagtcattgttgcttcaaatattgcttctgctcctttctctttttctgctcctctggtgtgctcrttatgcaaatgttatggcattcttagttgtcccatggttcttgaacattctgcttttttttttttttccatcttttctctcttgcttctcagttttggaagtttctattgtcatattctcaaactcagagattattttctcatcagtatccagtctaccartgagtccataaaaacatttgtcatttctgttagtctttyttatcactagaaattttttaaaacctagaatttccattgctctttttacatcgtctatcttttcttgcatgttttctacttcttccattaagcccttagcatattcatcatttaaaaaaattcctggtctgataatttcaacattcctgccatatctgactctggctatgatgcttattcaacctcttcaaactgtatttcttgccttctagcatttgttataacttttggttaaaagatagacattatatactgggtaaaaggaacagtggcctttagtaatgtagtggtaaggtgtaggagcagggaaagataatcatagcttcttttcatagctgactttaagtgttatcataagtgctgtctcatttaattgttagaacagtccaaaagataggcaccattatctacatgtaacagataaggaagctagagtttgcctgaagtcatatggctaattaatggagaaacctagactcctcccactcaggtttttttgactcaaaatctacttaagcactgtgctacactgagttatgtaaaaccagaaactacatttctgatccatttaagttttgtctccactacttaccaagtttgtgacccaggtaggttgcttaacataaaattccaggtttctcatctgctaatggggacaataatagtccctgcctcatcaggttgtgataaatgtgacaataattctgacagagaaattaactgtatgaattacactacaggtaatacttcaatttgcataaggattgagaagggtacctaatagaaggagacaggtggcaaaggagtgaaagagtgagaaggaattggaaattgccattttctcttcctttttcctttgttgggattctttttgagccatgaccactgttttcccaccattcttactatccacagaggagacttggagcaggaaagacaaataattattgaacacttactacagtgatgtcaaaaattgttgtaagcacttttcatgtgttaacatgacataattgacaaaaaaaatcatataagtaagaaaactgaggcgtcgaggaaactgagacttgaataaagaccatagcttatgagtgctatacttcatgtgtgctttatttttgaagaggctagtgtttgagttctcttgcctctgagacatttcttgttcattaatttctaagcactctctcctcactggggtgaagagaccacctggagattcttctcatcaccaaaataggtaggaagggtatccactgattctgccattaacatatctcagacaggcccttcagaacgattcaactcccattgattttcacagagaaaagccccattcagatggaaagcaaaggacttatttgttcctgacataaactggtgtttcatgctggactcagtaagtgctgtgagtggggaggctgaattcagatcagtgaagaatccagagatcattcttaccaagcaaacacattgtgtggcccgctgggcacagatactaaaaaagcatcagaggcatgaggtcatggttgttttcagactatccagaaatttattccagaagtcctattcagcactaaactgcagtatttcccagggtggaggaaggagacaacagtgcattatgacacatgtctaaaggcgggggctttggggacagactcctgggctttgcatcccagcttcacctgctaactctcaggcaagttacttagctgtgcctcagtgttttcatctatgaaaagaacacattaatagcactttctatcttagggtggtcataagtattaaatgagacagcatatgtaaagtgtggaaaatagtacccagcacaccttaaacgaaacagcaaaataataattcacttttgctgaatgcaccttcccatagggtctcagtgctaatttcagacagtaagtcaaccactgttgcctctatgttgccaaatttaacaattaaatctgttcaacatgtcagtgaaatacaggggaatttagcaagtttttaaaggcattttccaaattgctaattgtatgatttgcacatgctacagctcaaaggaatggtgcactggtagccagagctaggaaagaactaaggaagaaagttatcttcctcaagaaaagcctcctgcttctttcccccaacgcctcggggcaactgggagatataatggacagaatacacaatcgtgaatgagaagttcggtgttcaagttgtggctctagcacttaattgtgccagttactctgtctaaaatttaatttttctatttgagaaatacaggtaacagcacccacacaagtaaatgtatttaaatgtctttaaatgtctttttaacaaatagtgccctgtgcaaatgctacctattatttactacactgatgcaatcattcaaatgcttatgtcctgggagggtctaagtgcttatttacagcctgttataaattaccccagaatcaggctgctttcctcatagacctggctgggaccagggatggtgggtgatgggagagctttccctctgctgtggtaagggtaaagaataagacttcttggaacatgaggtactctggagctgggatgggaaagggtccagagagaaagattgtaggattctgtgagtttcacatactttgaaatgtggctgatgcaagacctgataaaactgttcatcaagatgactgagaggatgatggtgatttcagtaattacaacttacctttcacaaccgttttcaagcttaaaaatctccttttctcttgaaaaactcatcatttcctggtaaaatagaggacaagaaatacactttttgtcatccttagattgctagtttcatggtggtttgaaggaaagaccaatgtggtaggaggcagcagggtactggagacagaagtagactgcttctaccccttactggccatgtgcccttaaacaagttcccgaatccaactgggacgtggtttccttatccttaagaacagcagcacccactgcaaaggctgtgatcaagattaaataagatccttcatccaacaggccttcttcctggcactcagtaaatggagtccattatcatcacagccacccagatctgtcaaggtatcttgccatcggaagcactatgggagatctataaatgctggttacgttccattcatggtgacttggattattacaytgcttcacagagtgggaagctgaagcccacaaagatcaaagggcttgatgaagcctataaagccatcttgcacatcagctttgggaaacatcacgtaaggcatgggcctggagaggaaagcgggcccacatccaagcttatgtcagtcagatgctaaaatgtcattatctctacactgaattaagtgcttgtatatgttgctgcacaacaaaatgcattattgatgtactaaagttttcccgctgggtttatctgtggtttgcatagcgaattttgcacagcgaattttgcacattttgtcatcacctgtatttgaaaataggatgtttcttgacgaatgatcccattatctaatgagtttcatcattaagttttttcatttccaatctaaatgtttcatttcttgactgtataatgttacttcttattatacaatgctaaatcattgttaagtaattcttctagcctgttttgttactgtcttccaaatattaataagcagttatccttttttctcagtattatttatctgtaatctatacatgtgcaatgttcttaatgtctttgcatagctcatgcttttaatcactgttatcagtttcatttgtgttccagtttatcaagaagttcttatagatttctcatgcataagtaatggttttagacaacatcctattcaagatgatatttttttacacccatatattggtgtctatgtctctcccaggatagcaacctctatgagggcaaagactgtcttttttaaaatttcttcaatattttattctgaacacctagcatagtggctgcaatgtagtcatccttgatacatatttgttgaatgaatattgaatatgtagctgaaattcattttccttttattaaagcaaataattcactaagctctcaaatatctatttgtaaacattttctccctcctaacatttttgtgtgctacctaattaatgtaagacatagccccaggggttggcagtagagaaatgaatcaggtcttgcctgtccctgatgggaagtaatcagataattctagtaatgctggcaaatcacctggatagggtgactctgtgccaggctttgtttaacacctcacttgtatggatgtatttcatcctcacctctacccttttttgcatgatttttttatatttccttatctaatatacaccataaccctagtgagtaaggtaagttaattagccgctctatggctcagtttcttcatctgtcaaatggagttttatttattgaatacttatattttgcatgcctactatgccaggcactgttgtaggcaatagtgatacagcagtgaacacaatgaacaatgctcttgccttcatgaagttataatacatccatagcagcacatacttcataagattttggggaagattaaatgagatgatgctagtaaaatcaccaagaacaatattggcacatagtaggcactccataaatgctaggcattattttcatgcaaagacatgcatagaataagtaggcaaatacatgctttctgttgattctgagggaatttaaggaaagcaaatagttaatgtaaaatcatcactctaaaaaattaaaattgttgaactatgatgaacccaggaattttggggtaacatatgcttttttagactggtaaatactaatcacagtattttcaatttgtttcttttcattaagcatatgaatttataaaccttatatatggatctgtattcaaaggtttgattcattatggattttttaaaaggtgcatactaatctttctaatgcaattactgtagtctccacttatctgtggttttactttccatggttccagttacctgtggtcaaatgttgtctgaaaacagctgagtacaataagtataataaaatatggagagaaaaagagagaaccacattcacatgacttttattataatatattatagtcattctattttattagtaatatattgttaatctcttactgtacctaatttataaattaaaatttatcataggtatgtgtgtgtaggaaaaacagagtacatatagagttcagtactattctctttttctggcatccactgcaggtcgtggaatgcatcccctgcagataaagggggagtactgtacattagaaaattgtttgagcaagaagtagagcctgaactataaaaacatatgtaggatggagccctttcttccaactgaacacaaataatgctctgcaataaaatgaggtataagccatacagcagacaattataatgggatttaacctaattagtattggagaactgagagtcttcattaaaagtagcacttcataatcatgtaatcaggaagctttggttcttaaaggctgacaggagatctgatccttaaaaaaagtgtttctaaattttccaagtgtattcagcaaatcgccaaaacgtgcttgattaaaactgtgatggggtgtgtatccagaacaccatgcatcctctactccagttcttccatcttgattgctttccccaagtcactcactgaactctcatcacccccaagttctgcaaacattgcttgttatttcaaaagctgaattaaatgctatcagttgtgaacttcctcagcttaccttctctttctgaaagcactccctctgtctgactcagagaaatctgcctccacccaaaaccttcaactccttctagaaatcacatatttcttcatctgtttttctcccccaactgctagatctttcttttcatcatataaacaagcctcaagcttcttttttaatattaagagaaaagcaactttcctccagctcttatcctgtatctctcttctatcagccaagtttctggaaagagaaatacgtttttactgtttccatttccaagtctyccatttactacccaaagaaagggacccttgccattccaatggagctgctctctcagtggccactaataaccacttcatgtaaattcaagccaacacctctccgctgtcaggttccttcttactagaactttctgtaggattagaaacttttgaccatactaccatcaactctttcgaaaacccacatctccagagagacattgttcctgacttccacaccagtgtttcaagctatgcctactcttcctcgatgtcgcctctgtaatgtcttaacatgtcagagattaaccttgcaatcccctctccaccctgccccatctctgatatttctcaccttggtgagggatgctgtccttcacccatcgcctaatccagaaacatgaaaaatctttccataccctccctactgtctatatccacaatgtcctgatgtcagaataattttcctgagatgaaaatatggtcatgccatttctgtatttgtcactcttcagtggcttctcacagcttttgaaagaaaagccaaaatatttagcaagatactcagagtccctcgtgaatttgcccttgctaaattttcacttctcatgttaaccttctcccacatgtatttgtcactccatctgttccaaacttatgttagcttccagagacttctgttctttcacatctccagaacaatcctgctccccctaatacctaatgaaattcttgtcttcaaaactcaatttgagtgccacctcttctgaaaatgtttctgctaaaaatttctcttctcttcagagctctcagccaccctactgccatcttaatatctgtgcattagctcatgcctcgtttgaaagtctctttgactaggttttaagtcacttaagggtgagtacagtgtcttatcgatgctttaatcatcaagtctatcacaatgtctgattcaagttaggcactggataatacatatattaaaattataacactatgtgcatagcccagtgaacactgaaatgacatgcaccagtgccccttgtggtacattcagaaacactgcaagtgggtcacacccaagtgaaccctgatgcttcccttcatgtggtggcctctcagtggctatctccatttctcagatatgaccctctttcttacaggaaggtgatcccataaataagagcaaccacttayattgatttagtagattcccacatctatctccatatttctaacataacatttatatatttttaatataatctgctaatatgaaatttttgtgtcttcaaaaattgaagtgcttattaaccctttagagaacacaactgagaaatgctggactagagtataaaatgaaaatatcaagataccttttacatatattattataaaccttgtataattttcttccttcaaatctgagcagaaaacaaagtttctctgggtttgaagtagaaaagttatttgaatagtaatcttttaagatagttgatttacaaatgtcttttttttctttgagatagaatcttgctctgtcactcaggctggagtgcaatggcatgatctcggctcactgaaacctccaccttccaggttcaagcgattctccttcctcagcctcccgagtagctgggattacagccgtgtgccaccatgcctggctaatttttgtatttttagtagagacggggtttcaccatgttggccaggctggtctcaaactcctgacctcaggtgatccacccccctcggcctcccaaagtgctaggatgacaggtgtgtaaaaatgtctttaattaagaattaagtttaagtgttcctgaaggatcatgcttctcacagagagagtacattcacatgctgatttttagtaaatttaataaaaatatgcccctaaaatattgttttctgcctaggggaaatgccccatctctattttatgctgcaatgcttgccctgggaatggaggcagagtggcacttggctgcagaggcacagcagggtggatcaatggttccttgttttgggtgtgtagaggccgtgaagtatgggattagagcagggccttgggagcctaatactcctaactacaaatccttatgctgccacctactagctacgtgattgagagttactgaatctcttttaagcctcagtttctacatctgtaaaatgaggaaaaattaattcgcacctcgcaggactgttatgaacattatcattttagaatattttgaaaatgggaaaataaaactagttttgaagattcaccctcaccttattttccatatgactatgtcttttgcgttgttattgataaccctgtctgtcactaacatagggtcctgaatgcttactatctcagtaatctgttcttggacgggggatttgtatatacatttatggttctgacttacttgtcaagtcacatgtttctgcattgggcagtaaaatacaatagtaacaataatagtattcaccatgccaggcccctgcatatgttatttctcatctgcatgacagcccccacagggcaggcatcagtggctgcaggagagaggggcaccacagataacagagagaaatagtgagctggagggcagtctatgaaatgcctggtgaagtcgtgcccacaaccttttgggaacaaagctgccaaaagtccagctcatctttgagcacagatgccacgctgtctgtcatggacccctccaacttcagccaccttattgaaggccaacgtgtctcacactggcagaaccccacctgttagaaacccctgaggcctttgcttagcttttggagggggaaagaatatgaagaaggcagccattcctacaagaggtgcctgtcatttctggtaacctccccacttctctgtcccttcrcatctaagagagtacagctgatgcgggcaataagggtaggagggttcagtattaacttgtagattttggactatccttcctctctctaaaacacaaacaaaaaatagggtgaatgtaggcatgtatgctcaatttaactgaaaccaaggaataagaaatgcaattgaaaccagcccaattgtctcatagaacatatatttatggtttctgttgaataaacatagaaattgaccctccccatcttaaaacttgagaaacttacaaatgtcttatctgaggttttttttttcctcaggaaaccaacaatcaggcctcccacatagatcaaggaattgaaacttaccagatcacttcatctggacaatgagatactagacaccttacccatcatgagtgcctaagcgaccacctgctattgggttaccagctcctcttccatatccctccctaattcctgttttcccacacatgattacatttctttccagctatacaaactcttaattttagtacattagggagatggatttgagactgacctcccttctccacagctgcaacaaccaattaaaggcttcttccctggcaatacttgttcgtctcagtgattggctttctgtgcagcaagcaacaggacctagaccaaacccctggcattgtgataacataattacatagacaactgttattctcagaaagttttgtccacaaagagtagtagctgcacttctcagagatgggaagaggtgggccctggtggggctctgcagggacagctaggagaggagagacagagatggaaaggagcaaagtcatgcttgcatggacttgtggtgaaaattctccaaaattgcctttaaacaaagaagagaaagaggagggtgagtgaatggagttacttgtatgggataaaccaaacaagaatggactttataactggccttggaacagcatggtgaacatggagagagaagagaaaagaggaagagaagcagggaaagtagaaagaaggaggagaaaaaagacagaaagaaaacttaggatgctgttttacataggaggctaagctcagagaaggaaaagataaaagctcaacattcataacaagacaagagagaacctggggattctaatttacctggggggtcgggggcatgggtcaaccatgagaaagtgggcatgagggaggaaacaaacatcacctctgcagagaccttaggcactggagggactgtgacagggtatggactgcatccgaagaataaaaaataaatcaaagatcaaataaaccaggcaaacacaggaaacacctgaaaaatattttaaatgctctaaatacatgccttgctacatgagatagtgtctagttgtgagctctctcaatcattattttactstgagctttccataaattgtagtatgaaacatatatacatatgaagagattctgatgataaaaggcctgatttgtgaaagtttgaggtaacaattgcaaagtcaaatcctgtgcttcttaaaggagggtcctcccttccaccagctggtgacctcgggaacttccttctgcacagcatgcctgaatggatttattgttgggaactgcttaggaaagtgctatggtcaggagatttttttccaccccaaaattagtatgttgacagcctaaccccaaggtgatggtattaagaggtgggacctttggaaggtgatcaggattagtgtccttataaaagagactgtgagagggctcccttgcccctcctgtcatgtgaagatagagtgagaaggtgctgtctatgaaccagggagcagccctcacaagacaccaaatctgcatgaaccttcatcttggactttccaacctccagatatgtgagaaataaattttgttgtttataagccaccagaccatggtattttgttatagcagcctaaatggactacgacagaaagttttatcatattcccatattgttgtctcttaatgatactaatcagtgacagaattttagcagaagccttactataatttggaaaaatccaagacaaaatatctgagtggtgactttgccctgtctacacagaatagaccactgcccaagcagtctgcatatacaagttcagtctgcaccaagttcagaatggagccgtgtgataagaaactcaaatcaaagtgatggtagctgaagatgattccagctggcaatgagaaaatatacaactgattttattccttcttacagtttcaaaaatagattgaagttgagaattgtactttgagaaggccaagtttccagctcttaataactaacttatttactgtactcatttcacagtctgtgatgcagcaatccacaaaatattctatatcagtctcatgatgaactattaaatgaagggacatactcattttttgagtttccaaaaattatagaaataaggtagcctgtgaagacttacatacacacatgcacacacatacacacatatatatacccttaagcacacatgctatcaatagctctcatcagaattttcctagtataagttattaacaatggtgtaaaatggacaataatgtttctccttgtactttcaaaagatgaaatttacagtagtaaagagcatattttaaaatacaaatctctgaacaatgttgaggttgaaaattcatgcccatggcaatgccaaggcaaaataaaaggtctcgtagagaataatcttgtgtttgtgtattgtaagtacctctaggggagcattttagtgggcatactttcattgatgaaacttctttttctagtcaggaatttcctcacacatagagaactgaattaattttatactgatattgtaaacaacaaaaaatcatgtcactggtatacagtttgctacaaaacttagaaatcccaattaatcttatgttcatactgtataataatagtaattagtgatgttaaattgatatttgaaaatgcctaatagttacctaaactcattttattgtgattaactctatactctctcacttataattgcttgaaagttgaatttttgcttccttgtagtaaatgagctttcttattttacgtgaaaattttttttccatttcacatgtataactacagctatcagttttttctgaaaagtgggaatccattatttttttggaaaggtatggtttcaagtttatgactctgttgacaaaacaatttttaaataacaaaatctaacagcagacataactaggtatgaaacaaacatttgcctctaatggataaagttcagtgtctctcccaaagacttttcatcctttccatttcctggcatctttgaagaacatccctgaggctgctctgagttcctagtgacaccccttaatgcatggatcaagcaagccgtggaggaaacacagcacctgggcagtaggatgcccatgcaaataaatgagcttcctatctctgcaaaccttgctggaccaggtggttttgctcttttctggccccgcaagtaaactgcagtaaggagacactaatcagtttactgctgagaaattggaagctctttcagcctgaagtgtcttacacagaaaaaaataataaagccaagcaataatgctcccagggaatgttctctttatctgtatttagtgttccatcactaggaatccttagtcctttgttgctactattagacgagcctaaatggacttccaggcttacttcatttgactcaagggggtactagaattcctgggcatttgtcattaattcatttgggagattcaaattgcacagcgatggttcaaatagtacagcagaaagaagcctcccagggcttggctggatgcctccggtgtctggggcctgggagtggggtccttctgtcccacacatgagagtgaggccaacgaggggagatgaggaataagaacacacaggaacatgtaaggtcaggttccacaaggtgagatatgcaacctattttatgttgacccctctgcctataacacattataaacaccattctgggaaggcagagaaatgtacttatggcagttcttcattcattcctaaaggactcgccagttgattcactatctctgggggctttaatattctaaagctgtggaacagctcacagtgtatgaataacattttctgccttgtggaaatatgtaaaatcttggaaatgtgacttcctccaactatgagtgttcctagtatgtttgactcctgtttaaagaccttgcaaagaaagtgaatgattggctcatgctaataaggtttgcaagctcctcagggaaacaaaaaattaagcagtgatggtaggaggaggactgattttggataaaaacccatctccactgtttttctcacacttgtcattttgaaaaaaacactttctccatttttcttattaatcctcaacctcatggcagggtttcctaatctgagaagtacattctacatatgtagaacatacagggactagtgttgcagagcagtactttcaaatgagagtcacagagaggcaaacaaagctagagacaggatatggtatgtatcatcaacacttgacttacacccaccattcaaaatcttctgtattatcttggcaacttgtgattgaaacgtctacatgcccttggaggagtagatttaatgagaagaataactattgtgtgggtgcagaactagagtgtatcttcgtctcctttaccccaaatgccaaaaatggcatcacttattagtattgctgatgctgtttctttttttcaacactaccccaatttaatacttacaaaaaaagccagcccattcctactgctattgatttaaccctgaccccacaaccatatatattccttccctaaaccccagtatagcttttgtgtacctcagtcaccagtattctgtaagtgcagcggtagataggtcttgtaatcccaaatgttcacaaaagagactaggggcttgacaatctctgtgctcctcccaaaggcaattctggcctcattgtttgttttcttaatgtagtgttctaaactaattcagactcttttacacctaggcttttctagaaaattgccctgaagaaatttgtaactttctctgcaagtgtactatctcatcactcttcttacatctcaaaattagaaaaaaagaactcaaaacctcacactatgccctttgatttaaagtcagggaactgagtgagatcactgtaggctgaggcagacagacacaggaaagcagacagagaatagaaggggaccaatgtttgagccctgggaactccaaaatatggaaattgctttgggaagaagcttccagtgagatataaggaaaaccaagagagtgttgatgtggaggccaagagaagaaagtaattccagaagagaggtggccaaccatgtcaaatgctactagaagttccaatgagataaggttagaaaatagaccaccagatttgacaaaatgaaacccatgtggctagagagacagaaaaggaatgaaactcacagggtttggaaggaatccctctcaacaaagagagatgaggacaaaatgaaaaaggagtaacttgcttggaagagttgtacagaaaagagctgaaaagtgaggcagtgcccagaagacatagtttacacggagtttttggtttcttatttgtattatgtacagacaatattaaagcataattgcaagtcgaggttgttgttgagaaaaagaaattgaccttgcaaaagagaggggaaatcataaaatcaagatttttgagtggattagaagtgataaaaatagacaagttggtcatcagcaggaacaagcaaaaagagaaaagggggaggatgtgggtgcagagagtataaatttgagttagtttagtgatgagaagtgaagtggtttttttctgattacttccctttttattaataaggaatgaggggggccataactgatgaggaaaagagcttttggacactgaggagagaaatataagtcaataatcatcttggagaatgggaacacaaatgtaccaggaaattatagtaggacttctaagctttaccaaatgtccattcaaactttgtagtcataaatttagcccttatctctaatttgacgtttagcactgcatcacattattactaaccattttgtatgtgaaaatcatatttttcccaatcatttacaagtttctcaaaggtggaatcccaaggttgtactaattggtatcttctccagggcatacttccgtgacctggcaagtaggtgcctgatatggtttggctttgtatccccacccaaatctcatcttgaattgtaatccccacatgtcaaggaagagacctagtgggaggtgataggatcacgggggcggtttcccccatgctcttctcatgatagtgagttctcatgagatctgatggttttataaggggctcttccccctttgctttgccctctctctcacctgccgccatgtaagacgtgtgtcttccccttctgccatgattgtaagtttcctgaggcctccccaggcatgaggaactctgagtcaattaaacctcttttcttataaattgcctagttttgggtagtatctctataacagtgtgagaatgaactaatacagtatctcataaagatttgtgaactttcagattgaagactgaatttaccattgtgaattaaatgcctgaggagatgtttctagcccttctttcctctgccctgacccatattaaaagaggtattcatagaaatcattgctctttttcctctgcgcgcacccagcctggcaaacacgtctggcttagccctcatatcactaaaggtatccgtgggattcctctgagcaccccagaggtgggtctaaattctccatctactcaaatatgtcctctactcatcgaatctggtctaggacctgaagaagcactggtgtgaggtggctgtttctagtttcttaaatcgaagctgaaaactagggccagttctattcagtcatgtttttgtgtccacattctttaaccccagtaatgtctaaccctcagcattatggtagtaaaagtcagacactgtgcctgagaaatagaaaagcctcatttatttattttttttttttagtcccttgcttctcaaagttggtcctaacaccagcagcacaagtactatcttagagcttattagaaatgcatcttggttcttgggttcatggattcactccagacccactgaatcagaatctacactttaacaagatgctcagatgatccttacaccaccaaaatttgataagcactcttctagatgataaaagaagctcccaaatacagttatgtaattgtgctaacagaaagctttgaaaaataaatgaaaattttaataattgctttgatttttgttcataaataaagacacactctattgctgtgtgtcttgctggacctaaggaacagaaggattttttgatagctgtcaggaaagctgaactctgtttaatgtaggctgactcttccatgtaattgcagctaaaaagttagctatgaaataccttatcacaataacagaaatgctctcagtaatccataaattctttgtagcacatttgctttttgtaggtttttgataagtggttgggaggacaaccagcagtcagaaaaacatctgtattctttaagagcctgactctagacagactcaaaattcctggacacagagaaatgtttcctgggcattcagatgctacttagcaagttaaatagctcattgattgataaagtgagaggcaagattaggaaggggttagttatctgagtaacctattcttgaatatggaaatcacataattattttcaagagaatgtgtgtgagaacgaataaatgaaaaagttagatatagctttttttctgtgctacaaatcttatatgtttattgaaagtcttttctctaagactatgatgcatttggctaagattaatttcagaaattttacctgtatttttaatctcatttagaaatgaatagtagccataaaagaggcccttattgactgcccagagtggtgggtcacaaggtaacatgttctgagaatgctgggatgcaacctgccaagagatatatggatgaaacaaatcagaccatgcaaccgcactgcactcctgggaaaaatgctttttaaaaaaataaagataatacatgttttttatttaaagtttagaagttgagaaaataacratgacaaaaacaatgctcctayacccatctgttctgagcttaccacttgaaacccattattgaaatagaaaccagtttgtcactggtaagcttgaggttcctacatgtcaccatgtagcatgacatagcagaactgtcatcgaaacctcagtcagaattttgtatttctcaacaaaacgtatacccataggatactaatgggcacagtccattacaaagacataatatcattttctatatttattatcataacacattctcacacctatagagtagtttgtatttaatattgtcttttaggcttctgattttgacattggataatgttggtgctgacctctgactgccaggttctcaaaggacagcctcatttttataatttattccccctttcttggtctcttggtacaatgctaaacaatataatgcacaaagcaaacaaagcaaataactgaatatacacctttttgctctatctggtaaggcaaatatacccacttaattcacaccttaataatttattttaaaaaatgttaatctcttttctttaggagcttttcccttggctccttttcctgcagacaaagtaggtagtttactttgtccaaagtcgtgttaagtacaaatgaaataatgatgagctttatgtaggcagattcctccctcctttttatatattaccatttttctcaattagtttatatgctaacatattgtaaacagaaagacttgttagtaaatacaaaaagaggcatgcattttctataataagattgaataaaataaaaaatttattggaactatctgaaatttatatattattaagcacaaaagggacaccttcaggtttttgttcagatcataattttggagcattttttggttctagaaataaatggaaatgaccaatgaatgttagtgctaaaagaatcctttgatagcatctttttttggcctttctttaagataacttggcaccagaataataaaataatgtaaccacatttattcaattagagtatagtggtttaaatgcacagttgtatttttttcacctccagtatagtaacattattctacaagttagatatgactttacaaatttaatgtgctaagaataaaaataatgcacaatcagctaggaagttaacacactaaaacataacttaaagaggtgaagagtaacttgtccaggagtgattttctgcaggctggcctcccaaaggaggagttggcaacatataagtctccaagaaaattggctaaagctgaatgtccaaggcagttaatcctagttgaataccgatgtggagaattgggcccaaaacccactatatcataggagctgcaagagtcaagctttgatcctgccctctgatcatgctgggaacagagctgttggttccctgattgtgcagcttaatccaaggcctggatcccctctccacattccctatatctgaaggaactgtggattccctgtctcagaacatagggggcaatagggacctgcacaactgttcctcaaataaaccctgcttcagaaggtccattgtgtgtgcttttgttgcacaacatccacttgtggaattttcctatccacattccgaacgttactaagcatgcctttctatctcttaagagcttttcttgttcttatatataagtagttggatctcttgttgttttttatatataagttgttggatctcttgatgttttaataaagtaattgttgtgatgcaaaatttctttcactgaaatgccagatatcttccacttgattttcacccttctctttcccctaaatgctcagactacattttcatggattctattaaaggacacccatgctctctgggttccagttagttttggtgaataagaagacccagtaatggatggaaaagaaagaggaagatgaagccagggattttattctcccagcttactctttatgaaaccacttcaggctgctggggtcccttgacttcatgccattgctccatgtggttctttctggctaaactctcactctcttagtcccttcagctttaggaggggtgacatcctcactgctcctgctgctactaggctcctgcaccattctttgtagttcccgtaggtctttttattgtctttatgattattctctttgcaaacaaaggtctcctcaaaatatcctgacttcagtgtaccatcttttctttttgggaccctgatagatacaaataaattaggtgcaacatcctgattaagaaatatagttagatctttttttgaagaaggctaatagtgttttttttaagcctttcaaaatgacacttttagactacccaaataataaatctgtgtttaatatgtctacccttatatctatctctacacctatatccacaattttctggaaattcagaactactacttttaggaactttttaaaggttaggtgaatcagatgttcacataatgaagtctgtggaaaggacaactatagattggttagctttggttgtgactaaaaggttaagtagtggcggcttattgattataaatattgactggcattttctttawtaatacttttgatttttgatggttcctcagaaattaatatgtatttggaaggtctttaattttcatcatccacagcaccttgcacagtgttaagcacaaaacagatgagtaataactggttgctgatcaatttgtttgcataattaattgcttgtgcagttgtctgcattctactctgttgttttttatgcaggcaggccatccatagctatatcatctctggaaaatgtgaactctgttgcattttttcattcaatagattaaaggaacacccagagggaaattatgtagcaaatattacttgttggaaaggtctttaactttgcttgattaggttatctgtcacctaagtcaaatcgcagtggtctcttgatgrtctgattccagcgctaattcagagccagcaggggaggtggagccaaagagtgtaagaatagagcttgggtggctgttaacagcggaccactcttcaatggattcagatcacagaattgaacagcaggaaaataaggatagttctggggcaaagccaaatctgcagttctttgaagctattgcatgtttatactttggacaaaaccttccttttaccccaaatttttattctatatttttgcagtttgtaagtagagaaaaatcctaccagatactatgtgaatgacagaatttatttatgactctgtgataaatgtaatgaagtcatactgcttttggaaagggatagatgtagggagaatactcagttttgctgaggcttaatttaaatattaattaggataactatccttaaagtaatcaagaagtaaaaaggctgcctgtacaacaaccacaaactacaacttttaaatccttcccsttttaaaatcagatacaacagtggattgaagattttttaaattaatcaagtgtatatgaagtgacagattatgtgaaagctcaaaggtcttctcttaagtagaattttgggagggattttgtaaagggcatcattactgctgagcaccaactttgttttgggcatttaaacatctattggggctttcatcctcagctactgctcttatcagtccaattttgtgatgcagatcatctgagrttcaaactttcccttgtttagcccacaaagcaatttttaagaaattcaaattttcaattgcttagctcacaaaacaactttcaaaaactatgttctggttaatttaggtacccattcatatgaaattatattctactttccgaaaataatactgctctcaaaatgtgttttctagttgattattaaatctcaaaacttattactttgaaatacataccaaaatctttggagatggagttattatattgcaatggctattatatataataactattatatatcatagatgcaatggcctaaaaatcaaatggcgttttccctcattctggaaaaaaaaaaaaaaaaacagatgcagatgttctgctgcctggacatctctggtcatgtgtctttccatgaaacagttttatcctcccatcccccataccaaccacaattaagaggtttaaataaaataaaactaagaaagtgaatttttagagatgtaacctagtcctgctaataatgtaggaggcattcatttacattcaaaactgcaaaacagagcagagagttaggtttggaatctgtgcttgtggagccttttcatttactcacccaactccaaataagtcatttaagatactaaagagaactagtgcagaagatgatatgcttagacataaaatatatccttatttgaacctataatatcctgttctgaacataaaactcaaatgtaaaatttaattcttatgtttctaatgtttataataaaccactgtatttatccactttgaacaggcttagcttttgcataaagttgatttctttgcaaatctattccattaaacaattttcattcataatatgagcccgtattacattttgtaaccctaaaaatcaccaycggcatcttctattcaacagataataagttgtaaacagagcaaaaactattacggaaaccatgcatataacatgtaaagtaacagtatcaaataaaataaaaaatgaccaaaaatattttaaaggtacagtagaacaggccaatcacaaaataaaaactccaagatagacaatcatggaaagaaatggtactgaatgtcagctccaagatgcatcaatgagtaaaaagatgacttgtgcccccagctcccagcacaaaggccctggcaagcaacttggatgagttcttaatttactcacttgctatgaagtcaattcttaaagaccgtgtgtgggtttttacactctgtatttcaccaaatattagaatgtaagacaggaagacaaacgttgagattcataacaatagcattcacatctacatatggtaatttcttagagctattcaatgaaaacttccacctcggagctgacatcttagaattattttgataccatcccttgcgattctgtaagcaaagttgttaagagtctgcaaaggcataaatgcatasagcrgttgtctaaaattcttgagagaaaatagtaaatgttctgggactccatgcagatgaaaagcaaagtggcagaactacttttaaagttgttcatccattaggctaatctctaagccaatcaggttctgaggaaagcaattatgagcaaggtggacagagaacttgcctaagacggaaaggagaattcaacagtatctctgattaagtgctttaagtgctgtgagaacaaatctacaggtgcggtgtgggtttggcagggatctccgaccttaactaggaaaggggtggggatccagaaaggcttcctggacgaaggaatatccacggggaaacctgaaggattagcagaagttagcaaagtggagaggagggaggactgttttaaggagaggaaatagcttactcagactcagaggtgagaaagaacatggatccaagagaaaataaaaattcagtagggatgaatgaagcctgaatcccctcgattgccgaaaggcaagaagtgagcctggagatgaagttagggaataaggcataaaatctaaagtaagtttcattaaagcagttttacttgagacaagagtctttgagattgatgtttcaaagaaactgctccatgcaaaatggactggaggaatgcaggtgaggtaggcggatggctcggattggttatggcagtggagatggaaagaacttgatgcaggtggggtggatttagaggtaatatcgtcaaggcctatgagaaacaggatgtacagaatgagaagtaggaaagagtgagggaccaaagtgattctcgggtttctgatttagacagctgggtgcatggtggtgcagtcactaagaaaaacatcaagggaagggcagtttgagattaacagatggatacgttttgggcaaaatgggttggcaatacttgtgagccgtccaagtactatgtcctgtaagacatggatccgtgtagatccgtggatctggagctccagagaggaacctgggatagagatggagatctgagagtcatgagattacaattggcggttgaattttattgagtgggtgttgtctctctagaagaatgtgtgtcgggagaaatgaccgagggagaaccctacagagcaccataaatgtgtgatgagcagagaaaaatagtcctatgtcttagcccatgttccctaagaagcaagctggaagcaaagctacacgctaaccccttatgggggttgcaggaggataccatggcaggatagaggaaatagaaaaatagaagtgaggtaagaaagtcaagaaagtaaatacacaggggtatatcacctagttagcttcataggaatcacagcctggtgctcagtcactgagacactttcaggaaaaccttaccttacagaaggaatccccttaacaaaaaggtgaatgtacagtttgtcttccagcctcttcccttttcttgcctctcattgatcaacatttgcctcttagccattctagggcttagttaatctaggcagctcttggagaaaccagagcctccatgggtccaggctggttgagccaaggtgctggggcttcttatgccctccccaagatgaacctgagggaggccttgccacaggtcagtcagtaagctctggaagaggctgagacagagggtggtgttgggagatggagcaatggcatccggagctggaattttgtaagttatgcagtgatgtragcctcaatggattctcttcagccaggaattagagcaagcagttgatgatctgaaacaattttggataatgtgtaaactgggtctggtatatcctgtgaagaagcctgagaatgattggtaagataagtgggagaaaacaaataatgccaaagattgaaagaaaaaagcatatttcaaaaatggatcatcagtgtcaaatgtttctttcaaatccaataaaataaaaactgtaatgtctattgtggattccygtgattctagtaaggtactttgattttcctgtgggaaaccatgccttgcctattcttggtttatttggtttgggttgagtgaattccacccagtaattcccagggtcagtaaatggtccaactgcaaacaattgtgagtgactcctctaagcataggggtggcctgagccaaacaggccaatgggacttcatgccagggattgtgctggaacaattggtaaagaactgaagactgaatatatttaaattttgtgaataatacctttttcttcttaagccaagtagagttgtttttctgtcatttgtacccgaaagatgcctaattactacagaagcaaaaaaatccattagatataatgacaaaggttattggagccctcagtaaggatggtgtcagctgagcggtgctggcagaagttgggggcattctcactgcctcttcatcttctttcttcaactcttaaaacacggttttatctacttgtgaaaggagggaggaaaatgaactaaatgtttagagtgctcctgggagaaagcagaaaacagtgttggcatctcagagccaccctcttctgggcctcacctgaggaacaggtgtgctgcattgggcaggggctgggggaaggttccccagtgcttccagagtccaaacaggccccatctattttaaacaactgcaaagtccccgtgataatagatttgctcttaattttctatttttcccaagtacttaatcctgtgccagtgggcttttattaaatatagattcatttgagactccccacctacctgagcaaggatcagcccacaagaattactccatctggagttctacagtttctttctgatggctgaaaaaaaaactgcattttgattccaagtttggtccttctcttctggtgactataaggcagatatatttattatcagttctgtgggattctttgcttcatcataactctttatatgaacttgtaataaatctgtcatcacagtctcaatttattttcacaacatttctcttatcaacccttctttcctactcaaattattttctagaattcaggtgctcactacttctgcctygcaatagagtaacaatgctctaattggtcttggtgcctatagtcactctttgctccaatccgtcatcaagcaaataatccccaaactaattaaatgtgccagcatcagttaaagcaggcagtgaaaaaacacattcctaaatactcctagagaatttaatttatgttttctaaggacacattgtctgctgttattagtattagttgtgtatgcttctgtgtttttatttctattcttctcgattgtacattctttgaggatgagatgggttttagtggatctcatttcataagtaaggcaataaagatacattttccataactaattatataccaatatacagcatgtagatattgagtcctacatttctgattatcaccagttaaggaccaaagtatgacgtgggaatattgagctctcaggtagaccacaggctcttgtcagatgcctgccattgctatgctattctcattattttattgcatagatgaggatagaaataaaggtcagtcctggtgccatatttttaaatatatatagaaaatatatgattggcataagcaccattgagaatattctagaaaaataatacttagctattttatgttggctgaaataatattttctttatgagaaaaatataaatttctattgcaagactttttaacaagaattcttttgttttgtttttgcatgatcttaattgagcatttcaaactgttttaaaaattcagagactctctataagatgtgtattttttaataaaccttcacttgagtataatttttatttcccatcagtacctaaaagaaaaaaaaaaacttcttcgaaaagataaaaggatgcatttgcaagattatttccctcttaggaaaagtgcaattttttacagaacaatgctgatacattttcattttattcaacttatagtttaatttttattcatattttatattcatatttgcatgataaaaaggtgccacattgttcttagcaccttatattatttgattgctaaagaaagacacccaaaaaatcaaacaggaataaaaagattcaagtctcataatggagcaatttgcattactctctaatcttcatctcattaaatcttattgacagatcattgtcttcctagtagaaagtctgtgtcttagtcaattcaagctgctataacaaaataccagaaactgcatggcatataaacagcagaaatttattcccactgttttagaggcttgcaagtcccagataaaggcaacagcacatttggtgtctggtgagggcctactttttggttcatggatagcactttttgtgttctcacatggtgatatggtttggacatgtgtcccttccaaatctcatattgaaatgtgattcccaatgttggaggtgggggtctggtgggaggtgatttgatcatggggttggatccctcatgaatggtttcacaccatccccttggtgataagcaagttctcactcagttcacatgggttctggttgttaaagtctaggacctccctcctcccttgctccccttcttgctatgtgacatgcctgttctcacttcaccttctgccatgactataagctttctgaggccctcaccagaagctaagcagatgctggtgccatgcttgtacagcctgcagaaccataagccagaaaaacctctttttcattataaattatccagtctcaggtcatagcaacacaagaatggcctaacatacatggcaaaaggggcaaggaagctctctagggtctcaaaattttagaaggtcactaaacccatagggggtccatctccctgacctaatcagctcccaaggccccacttccaaatgccatcatcttggggattaggtttcaatgtatcaattttgagagggcttaaactttcagaccacagcagtttaagagaactattacttggcaatttttatggcagatccacaatgtcattcaacactttatgtgatattatctcaataacttttggcctttaatattagaataatcattcaacttttaagagaatttggcatttagaccaattaataaactatgcaaaggctctccccacactggctggcttgtggcttggctgaagcactgccagacataggtgcgattaatcatttgttctcacaataaagataacagtttttagaattataagaaaagtttctcattcccattkttctttattagacataaagtccatgtattctcctttttagtaagataattagcaaaaaaatatttctgaggaggttttaaagagggagattatttggggtaaactgggaatagtctgatatataccagcttgctggttgctggtctggatcaccctggcatatgatgtggatgctcaagctttacgactgcactttttagtgaaaataatttgtgccagagctcttctaagcactgtacctgtaatcctccaaatagctctttgaggtaaataggtaatacttattgttcttttacagaggaggaaactgagccacggacaagttatgaacttgctcatggtccctccaccagtgttagagcaaagtcaaaactcaggtctgatcctgaagccatagatctgaactactatgcattgataacaagagcctgaaagaaacagaaccaggaaagggggaatgtgattttcttcttttgggcacattgaaccaaattctctattgtcattatgaatttgtgttcagggcaataaccccaccttggtttattcagagttactgtgagattcttctctgtgttgggtactagattagtcagctcaggctgccataacaaagtactatagactgggttgcttaagtaacagaaatgtattttcccaaaggtctggaggctagaatctgagattagggtgccagcatggacagattctggtgaggcccctcttcctggcttgcagagggccaccttctgtgttcttaagtagcagagagagagagagagaaccagagcaagctctgtggttcctcttcttattagggtactaatccaatcatgaagcccctactgtcatgatctcatctaaagctaattctttcccaaaggccccacctccaaatatcatcacattatgatgggcttcagtgtaggagttttgggggagcagaagggacacagttcagtccataataggtactcatccaagtattatggtagaaaagttgaaaaagatccagctcttcacttcaaagaaataaaaatataaggggatgcataagcaagttattgcaacctgatagttcaaaaataaaggaatatacaagtgtcctgaaaggaacaaggaggatgcaattaattttgtttggatcttgggagcaggatggcatcraagcagggtctacagaggaagagactttgcaccaagtctggaatatgtgtggttggctcatgatgaaaaagggtccatcagccctactgttccactgtgagagggtggagtttgttacctgtacgatcttattccagaattattctacaaaaacaagaaaccttgtgatattctgggttaggactacatatagtcaccctagagagaaactcaaaattgacaagcattttctgtggactcaagggttctaaccatggttttaatccctcatctttaataatataattcaagggattacagatttttacagaaagcccttgaaatgaaggatagtgacctaaacacagcataaataaaacaaacttagaggcaacagagatggtagagaaacaagaaaagtctaggggactcctatcactaacatcctaagagaaataagagaatattttgtaacatcagcaaaagaatgaaatgcttaaaataatgcaaaaaaaaactacaattgagttcataaaaattaaaaatattacagcagaaataaagaattcaataaatgagtcaataaaatgtttttctcataaagactggaagggaaagaaaaggcaaatagaaaggaaaagataaaaaagttaaaagaatagttaagaaaatccaacgactaaataataggagttctagaaaaaggcaagcagaaaataattcaagaaactctcctaagacaggtcataagttgtcacactcaaaagcttcaatggcttaaacaaatccactgtcggcacatcactgtgaaatttcagagcagttgggacaagaagatgatacaagcttctaaagaaaaaaaatccactggtcaactacagaagatcaaaaattagaatgactttattgactttatctcttaatggttccacagtagctagaggacaatggtagtgtccttgaagttgaactttataaagaaaatattattcgtttaaaatatagaccaaaccatactatcaatcacatgaagatatactaaagacattttcaggcaaacaagattttcaaaaatttaccacacatacacacacacattctcatgaaacacaggaggcttttttccatgaaacaagggaatgaattaaaaacaaggcaaacaaacaaaaaagaggaactcatgagaaacaggaaacaggaaatctcaaataagagagaggccatgggaatccccatagttatggggaaggacgatagcaggattattgctataggtagatgtagtccaggctggaacaaggatgaaagtgtgtggtcaaagatagccaagggctctatattcatagtcactctttctgtcaattcagatgtgacaaaaagaaacttataaatgcagctgttggggattggtagagtttataagagtctgtataagggrtaaacagaggagcttaaggctatgatgaccatccagctgtttgcagactcttggagtgggtgtggaggagaccaagatggacctgagctgaaggaggtccagaggttccactccctttcttcaaccagaatgagtccacctctgcctcatgcatatactttaaatatatatgaatgaacctttaataacaaaaatattgacagtcactactctctattataggctgtcattaaaatattttagatgggaaagtgatataattcgattttaattttagaatatgactttgattccaggatagagaatagattagagggaagtaagattagaagaaaggaggccatttaggaggctgtggtagtgcaaataaggtattataagcttctgaattttaaatagtcactatagggatgaacaaagggaaggacaatatatccatataaaaaacaggtagaatwrrtatagaactggtgaggcaaagtgagaaagaatgcaaataacttccaaatttctaatttagacaactatgttggtgatagtctatctgctaatattcaaagaaaatacaggagaaagagcagattggtagaggaagataaagatgcccattttgggcatccagtgggcgaagttttgcaggcaggcggatatacaggtttggaattcaggaaggggatgatgatgtatattttggtgtccaaacaacaggtgtttgcaaacatgggtagatcacctatgaagaatatgtaatgaagaacaaaggggcataaaattatggtggatcatgagcaaatatagggtatgggaagttactaaccctgaaatacttggtccctaggaaagactgtgttagaaataaaattagccccattttctttgaatatccaaatgaaattaaacaagaatcatctctggccaaacctcatgtccttatcccccacaaagaccagagtgatggctccagagacagatctcaaggagaaggtggaagctgagagaagtgctgtggcagtggcctcgccttcatggaaagctgcagtacctttcaggagccgattttgctgccattttgtgccatgactaatattgattcactcttcacactccctgttttcccatttacataatcagattcaacaacttattctcatctcagccttgaaaatcaggacatagatttttatgcttcagagtatttttgtggcttgcagaatttcagcagctgttacttcatacatcaggaaacattagcaaattaaagaaacaaagtttgctgagaatgtgtatacatatgtaacaaacctgcacgttgtgcacatgtaccccagaacctaaagtataaaaaaataaataaataaaataaaaaataaaagaacaaagaaagaaagaaagaaagaaaaaaaggaaggtaggtccatagcattagagaatcttatttggagttctgtggcttaggccaactagtcttgtaaattagagcttcactttatagatggtctttatatttaaaaatcacattttccaaaaacatacattattttaggttttgaatttgcgaattgcgataagagtgtttgttttatggttggttactgtaaaatgtctagtcacaaccactcccctggtccccaaacaaaatagagttctcaggcttcctataagctcttttgtaaccttggccccaccaattattttcttattttaaagagaaacctgtaatggtgtcctgaggttacctctagctgttcaggactgatacacttatgaacaaggaaagacaatggaagtgattactaaatcaacatgttaccaaataattgaagatttaaaaaacatctatcatgagaaatgaatcatttttcaacaaaagggtattctttgtgttttctaagctaaaacattagaaacgtcaatttccagtagatgaggctatgttacagtttattccatttataaccctcactgtttttggctattttgttcaggctagaaacagtatttaaacatttcaattgttgtactgtttaaaatggctgcctatatatggaattctaccttgcaaagtaactatctgagtatatctgaaatttgccatcatttatcaactgcccaaaatacgtttttcaatatttcataagtatacaataaaacttcttaagatatcagaatccattttagaaactgaaataatgtagcattactaatattcactttaatagactggttggtcaatactctatgtttaattataattcatttggatccactttacatatgtgttatttaaaaagcaaatcatatcctatcatgtgcccttagccaatctcaagagcaagagaacaggactttcacaaatatgtaagcaatcttctttttatcatcttctgtgttcaaagttaatcctgcaattgtattaatttcccctatgagtagaaagctgaaagaaaaaaaagaataaaactttgtggtttacatattgcattatcaatctcttagtgtcagaaaggctgggtctttttgttgttcatcattctatctgtggtacctaaaatagtctcacgcatgcagtgagctctgagtaaacacttgttgcatgatcgatggtgccaactattggtgcattctgaaaaacatgccatggagaaggtatagcagaaaaagcctgcaccacgaaataggaactctgaagtctattctggtttttgctcttttctgaatgaccttggacaagttcgtgtcccttagagcctgaagttcctcatttacacaatgggaatgaaactacctgtcctgtccttcagcaggcatttagtggagcaaatggggagagctctgtaaacatccaaataaccaaaaagacaaaggaaaacagaatggctgaagagagtgcagatctctcgctttatctcagcagtccatgtgcctctgtgtttacactcagcttttaattatttgcattaatgaagggcagccgaggcatagataatcccaagtacttatgtttggctttggaattaaactgaatgtgctctgtgtaacattttgagagtgtattctcacaaagtcatgaaatcatgctatgaagacccagttctctgacactggctttggggtaaacttgtaacaatctcttaatctccccgggcattaaggatccttattacacccacagccctctgtcagttaagaggcagacatcataaacacggcacatcagcctttggcaaaatttaatttcgcggtgaggattcagtacaagactctttaggaaaccgggacaatcattttgtttacttgtttgctttatcaggcagaaattagttgaggctatcatcggggaactgaggcagtgggtgttcgtagttctgatttatcactgcctggcatattatatgtaaatgcggtatacccattcatatattatgatggttcacttttgaataaatgaatatatcactccatgaagatgttgagtcatattttgagtctttaaaataagtacagtactcgtagcttcccttctacttagtgatttatcattgatgaaacatgggtttctgaaatagtgctgaaataatttatttgttttctagcctatgcatttgttgatttgattagtaattttatcctccctctgcagcaattggctggtaaaactattccttgtaacttcagaaagtaaagtattactcctttctcttccttatgcctccaggctactataattccaacctgtcctacttcgctatggacatatttttaagtgtcaaaatgttctgcatatttacactggagtgtatatctagaatgcaggagttatttaaggcccttaaaaatgcagcagtgatgaggagaaaagagtgacaaaaagtgagagtgaggcccagcccactggagaggcatatcccataatccgctcattcatatggaaattcattatttttcaccctccaggtgcccattttagtcagaaatcatttgtatggctatggaatcacttcgtcactgggcttgactatgccaaggtcacaaagttaaattagtaccacagtcgagaggtaactcaagggcaatttgttccactttgcttgctcttctctactgagctggcctccaagagtcatttactcgagtttgtctctcctgtccccaaaagtggtagtgacctgctttgtgacatcccacaaagagcctccggctctagcaatgggagggtagagtgaacagaactgggtttagaacctcactctggcacttgccagttctatatcagggttattatatttacctcataattttttgtaaggattaaatgggatgagccatgagaaataccttagagccttacatacattaaactttatttttaaggagcttaatgtgactgactatgccattaatgtgacatagcacctctgcttttgctatcattgtaacaacaagggctttataaggcagaggtgctccagcatggtctgttgcactggatggagatgggggctgcttcttgattgttgtgtaatctattgcgtatatgctgctttctggttgaagggtgagaacaggtttgaccatgcacttggttgcatcctctctggcttgctgatattgtttggctgtgtccccacccaggtctcatcttgaatttttatgtgttgtgggagggacctagtgggaggtaattgaatcatggagacaggtcttttccatgctgttctcctgatagtgaataagtctcatgacatctgatggttctaaaaaggggagtttccctgcacaagcactgtctttgcctgaggccatccatgtaagacatgacttgctcctccttgccttctgccatgattgtgaggcctcccaagccatgtgcaatgtaagtccattaaacctctttcttttgtatattgcccagtctcaggtatatctttatcagtagtgtgaaaatggactaatatacttggtgaatgcctcagggggaggtctgcctgcttatctgacctagagccactcccaagttaccaacttggttggggaggcaacatgacttcctggattgagcactggagcaacaatcatgagacctgggcttcaggccaccaagttccagcactaacgatgagtgaccttggcaaactactttccatttcttcttcccattagaggaaaataattgatcttttggtcataccttacaaagatgttgtgaagatgaatgtagaatatctgaaggagcatcagagggaaatgccaaagtgtacataattagttttacaatctataattaagtatatggatagagatgaggtatccatgtgtgaattatacatttaaaaactaggcttgcttttttttttcctttctaacagtagtgaagagcccaattacacctggtgttatattagtagagacgaagacccagaaaacttcaytgtataagaagttcttaatgcatcaggagaatatgataccaaaactgttagtgaaatgattaaaggtaggacagacwgtacaccactaaaggcaaaaggtgataggttgttcttgattcacaaagaaaagaaatcaagtcaaaggtagttagatatgaaagattcagggtcttaacccagttctggatgtgggcatattacagtacagtagtaaccmstsyactraatactaaaacacactgagaaaccatctcttcaagccatcctctaagtccacatacctcagccaaaggagatgtctgggagacagaatgwgagcagctgccaagctgcaactcgaacccattcagccagcccagctggggaccatcccttgggtcccttcaggcatcaggagacttctcctgcttttgtagcctttccccaccttattcttctgtatagaatccactgcagaatggcaggggttgatacacatgaagtatttttaccacctttctagtgcttttccagatactcaacacaagcaatttgagtaagctagagctccaaaatttagagtcaatagagaaacatacattattcagttttttgaaagcagatttgaagcacgtaygccatccttccaggctgattatcttcacttcttgggtcagcactcatgccatgacctggcctttcctgctgttttctctctttccacccttcacaatcgagagaaggtctccttgggccatcatgatcatgaggttggtaatgcacttttctgtctgtgccacaggccacctgcttgtttcctcctgaaacttctcttctcacagctcacagcttcttgacttccaaattgataggtcacagttttaacacactgggttcataaagcaaataaagagcattttttaattttctctagctgtttgaatctttctcatgagcctctacttccctgggctggggccaagaaggtgggggagatttaaacttagcagtcttccagtttatttcagtccagatcatctctactgggtaagtagtctgtcggtgtagagtttcactctaacagacctgttcctccctccctctctcttcctccttccccacttggttgctggctataaggaaagcttctcattctcctgatgtcatgatggggaagggtcccatgtctcatataagggcttgggctcgtgtcccctgcactacctctttggtccttgctgtcctctggctggtatctgctgaaacctggtggattcagccttaactaaggagtcttgcctgtgtgcctgttaaagtcctgcctgttgtagctccaggtgtgtttgcttagccaggccatgttcctgggagcccagcaccttctttggctgaatggagctcttgacagtatattccactcaccaaggtctccagctctcactagtaaatttcacctaccaaggtctccaggtcttactagtatatttcacccaccaaggtcactatgtgactctgagaggcttgtccatcagcccttagattcaaggtcacttagcccccaccaaaaggagccccctgaaagctcctcagctttttataattgtccctttttcaatagggaacagaaatttctgatctcttctgtgctgcacgagagcccaggcaggctgaggagcactaaccccagcaccatcaggcccagactggctgagctgccttgggtactcactgaggtctctgcaaaatgcagccctggctctcaccagactgtccaaatgggagtggacaaaaccacctcaactcagattttctgtcaacattctcatcgtgttcatggctcctctctcagtcagggatgagggtcacagtgtctttctaggcttctcttgaaagtgcacgtctcctagaaatcccaaccaccaataatccatccatgactgactccacaattctactctttctcttcccctttgtttagcaattcttgcttattactttttttactagaatcatcgtatccccctaaccttcagatatacattgatcattagaatcttttgaatcattcttccaacaagtagttattgaggtgagctttattctttgtagtggtaatttttaaagttaataaaagcttctacctttatagcacatacaatctagtgagtgacccaaatttgtttttatttccttttttaaaaattacttagtagattagttggttgatgtatttaagcaaaattctttggataccaactatgtacaaaatactttaaaagacaatatgtgaatgtgtttgggagatgattcagtgatgagtaaacactgtccctctcttaaaaagcatatatctatgacacaagacataaataagtgctgtaatggctgtaccattcaactcctatgaagatgtagaagaaagaacaattcattctgacttgaaatatttcagaagaatttgcagagaatacagaattttatatgaacctttgaagtaatgcaaaaggccaagacaaagttgagttatattttagacttgagaaatagaattacagacatgaataaggcaggaaagtgcatgggaaggcgtaagaaagggtattgggagcaagtgccctgtgctgcccaaagcagagagtgatttgatgagtggaagaagagatgaagttgaaaatgtcagatatgaagrctttggatatcatattgagtttaggctttctttaaacagtggttcttgagaaggagagtggcatgatctggcctgttatttaaaatacagcttaaggaataatgagtttgaagcaggaaagatacttacttgtctctattactctattgtagtaattcaggcagtaattatgagaagctgagatacagaggtaggtgtcgaaatgaaaatgagaggtcaggcataagagacagcagtaggttcgattgacaatataggatgcgatagtttaataagcagctgaataagatgtccaagagttttccactaggatgttggggagttaggtgacactggggcagggagagattatgagacaatctactacatctgaatacccactttgtgtaatatcttatactgacaattctagggttgttcaccctttatctctgcacacagggatagtgacatcagaactcacactcccacatcttaatcttaaacagtgctttctatataacatcatctccctacttcttttctgcttttttccgataggctcacaaaacagcccaagtgaatgttgtgggacagtaatacaaaagaataaaggatctgtgaatgagtccagttaaccatgtaaagcaacagtgcgtgatgcccagatgatcctccatgagtatttgctgattgaataaattcaaacaattccaatggatcttaggagttatatggagcttcctgcataaccctgaagagtattgcacaggatgaaaaaaaattgatcttgttggagatatattttccttacttacattttcactatttttcatcatatatctgggccctaccctgaataccctgtttcctctgttacaatgagtgaaacatgcatgatctttcccaaggccaacacctctatttcctggtagatcccctttctcctagcagaagcttttacctgtaagaatttcacctctcacttctgaatccacagtttttcctctatactagatcactttgattaagtatcaaagtataccagatcactttgattaagatggagctataaaagctcccatcttttaatgaacaaacttcccaatctgctccagtttgaggttcagccagcacccatttctctgtgccataacagggtttagacccaccatctgaatttcctgtgattccattttctcctgaacccacccaaatcaaaccrtctasctccctgtcctctgaaattgcccttgtcaagatctcctcaacctcaactttgtgggaagagggtacaataatcaattatctgtcctcattctcatcagtctcttaataacttttcatatagtggattcctctctcatttttgatacattttccttactgagcttctgtgaagccctggaatcctgatattactgcaacttcccagccaggcactctcagtctactgtaataaaccatttccccttttcctgtattttaagtcatattttctcaaccagagctccccagaacatgagattgtaatgccggaaggattccactcatgttcttctcccccctatgcatctacagtgtttagataacatacttgggatgggacaaagagtcacttaggtcattttctatgattcagatcaagaactccagctgagaaagaatgctctaaatgttgatgtcacctaaaattcagtccttggcccttttctcatctctaaatatccttatgacttagatgagcttacgctgacgacatccaaaacctctatttccaacctcaactcttcttttaattctagagacttttgaaatttctacttgaacttattctacgatcttgtggctcaaaatgtgttactaaaaccaacattgtgagcacctaggaagttactggaaatgcagaatgtcaagctctaccccaaaactgagtcagaatctccattttaacaagaactccaggaaattcacatgcacatacacataataggtttaagaarcattaaagtaaaacatctcaatcttattatctcctaagcagactatttattcttgtttctctttaatgttctaagagactcttggtcaaatttcccttctatcagtctgaagccctttcatagcttactgcttatttargccttatgtaagacaagttgtaacttttgagtaaaagagatttaccataaaaaaaaaaaggagcatacatttcagagccccttactgtacatgccccttccaagctgctgggagaggtcccaccaatgtgttcacactatcacctgctttgcataatttgccaaaatcatttatgcaaattaagaccactttctcttatcctttccattactgtcacacttctgggtgacaagatggcactggagtgaacgtgggcattttggtgattgggccacagggaaattaagctgagaatgtattcagttttagtttaaaggggtgtatttatgaagttcatagatcattcttcatatagccttcccagtataggaatggcttccaagaatagtctggtggcttcctgtgccctctcccccagcatcctgatacagtgatgcagggtcagggctcactatgatgcaaaggtgtctatgtgcccagcaataagtttccatgagtaggggaggaggataatgttggaaggatatggagctggaagctagtctttcaaacgtttaaccatcaaaccacatgattttctacggaaattatgtgacatggaatttatcagaattcggctgggcacaatggttcacgcctgtaatcccaccagtttgggaggctgaggcaggtggatcatgaggtcaggagttcaagattagcctggccaagatggtgaaaccccgtctctactaaaaatacaaaaagtagctgggcgtggtggtgggcgcctgtaatcccagctactcaggaggctgaggcagagaattgcttgaacccagaaggcagaggttgaagtgagccgagatcacgccactgcactccaggctgggcgacagagcaagactctctctgtctcaaaataattaattaattaattmattcattcattagaactcctgtgcttgtataagttctgtaaccatacacacagtaaatatatgtgtgtgagaagacacattttatgcattccaactataaactttttcaaagtttgatcaaccatgccaaagtaaaaacagaattatctttatatccaaatgatatgattatcattttatgttaagacaatcaaagtctacgtaaccaaaaaaagtatgaaaaagcattacagagagatattgggcagtgcatttatgaaggaagattatgtatgcatattttgttatgtttgtagttttatcagctttaaatatctgtcattttgtgatttttttcttatactaaataatttctcattttaatttttgtatgtataattatttatcccttaccttgaagcctcaggtaacgaaggacctggttctgtcctgggttattgttctaaaggaagtcctaacactatatttatgtgcctttctcaaaaagataatttttatattatggtgccaaatagaactttaatgctaccaagttcctacaaggaatccttatctaaaaattgttccagctccttaccaaaggaaaggaggcttattcatcaaacccacttcaagtgaggtgctagatttgattgaatgtcatcactgccaatcctttctttcctctgatgcacatgcccaattacaacctaaattccctctatctccccaaaagaggatcctgtaggatatataaaaaatttaactcctatcaaaggtcaagtactgtgttgttagtgagtaagtaaagaataaagtattgagtagaaaatacagagcagcacaccgcttttcatgccttgaagtggcaattgaacaatgagaacacttggacacaggaaggggaacatcacacactcggacctgttgtggggtggggggaggggagagggatagcattaggagatataccaaatgtaaatgacgagttgatgggtgcagcacaccaacatggcacatgtatacatatgtaacaaacctgcacattgtgcacatgtaccctagatcttaaagtataataaaaaatatatatatatttatatatatatattctttatatatatattctttatatatatatctgtatatatatatataaatatatatatatataaagaaattcccactcattgcttacattagcagaaccaaaaatgaggaccaacccacagatgtgatcgccacactttatgcagtaactcagattaggagtcattcttatccttcttttcttatcttcacatcctatgcccagttcatcctcgattcaagacaactctaccttccaaatgtatcatgaagcagaccattaccaccattcctgtctaagccatcctcattactcayctgttgcattagcctccagcttccatgctcgccaccccgctggtgctttcctcaccacatccacagtgatctttctaaaaaataaatcagatcaggccatcctatctaaaaatatctgggactttccttcaagtttagcatgaacctcaaactccatgcatggcctttaccgcctcacatgatataccctgcctttgcaccccacctctccaacttgcctcttttacaatcatccacccacacttactttcaaggtgttcctccaggaaactcagatattcctgtctcagggttttaccaccaggaaacagctattcctgcctcagggttttacagttgccattccttctgcccccgcatctcctctgtcttcccattcacataatccagatttgggctccaacattctcttctccattagaagatgcccttgaacaccctacgtaaatccaggccccacctcacacacacatacacacacacacatacacacacacacacacacacagtcacattggcattctctgcctccttggtgtacttcattgtttttcacagcacttgtgtccatcacaaattgcatttctttttctcgatgcccttcccatgaaaccataaactccaataaggcatggactttgctttgcatccccagtgcctagaactgggcctaacatcagttctgtactcattaaatatttgttgagaaatggaaaggatccttaaaggctttaaaaccttttggtattgtctatgacatactgataaaaggaacaatggaatttttagtagagagtaaattatttttttgaatttagaacttagattttaactatgaaaggaaaattcaagaccagtgctgacgccttctcactttctgcccrgagttctttccattacaccatgcatgttgtcttcctaaatgatacgtttcgtaagaacatgcttattcaagattccacactgcgcaatcatctatgataacacgtctagaataaaaattacaaaattaacaccacatcaccctgactattgacatgcctaagcaatttgcttaaaaataaacctgtgaaaggtgaaggaaagagatataagcgtatacttattaattaatcaattaattatatatgtattccttaatttaaaaaatatttttaaaattttaatcagttcatagtaaattcattcattttttaaagagaatagtcattataactaattgtcaagttttccttcaatctgtctataaattcaggatggtgcctcttgatagcagtcataacaatgacaaagtaaatcaatagcacttatttttggatctcaataaatgcaactaattctgtatctaatcctagactaaccattttctgttccttggtaatcagaaaggtctaccactcagatctcccttcaagatgtccctggtcatctattatcaaggagtactgtaagctgatcgtctcatgcaagatttgcctcatcttttaaggcaaagcctcactcactccagggagtccccagccaatgactgagcatgactgggatgttaacattagccacttctgcccaacacagaactcctccagtggacaattcctgctttagagttccctgttcatttgacctaaactttatgagatctgcatttccatctgaaggcttttcgtcctcaattctgcttccttcctcttttaccttcacaggcattaactcctaataaacctcccgcactcctaactttgcctcagcttccaagaggaccaaaattacatcttcatggcacatggtctcaggatctcttgaaactgtgacccaggccatggtcactcatatttggctcagaataaacctcttaaaaatgacacatcttctaaattattttattcatccatttaggggaaaggtattttatcaaatgactttttacataatgtgtaaccatgttagcatgtataatcatgactacacaaaaaaaacagtacaaaagacactcattgccaagttatgtcaaagacctaagtggcttcacaatctatccacctttttcttctgtttggcttatttgaatgaccgtgcttttgtatccttccatctggggcagtggcatggtgagggctgtgttgtgatggatggggttgtcagaaacccactgagtatttagatactgcatgagtgcattacatttacaaacagctgcatgacaaggaagtgtgattgcctcctcttttatgttcttctgcatgttaaggaaaccagctactgactggagagtcacttgatttttaaaatgatatattttcctttccttttcctcccaccagttttgtgcttcttgattatagtggaagcaaactcccaatgtttttttccacaaaagttttagtctaaggatgaaatatatgtttttcagctagtcttggataatccagattagcaaagacaacacaattagaatcaagtctataccataaacaacaacaaaaaaccattgacgagaagagacatagagaatgaatacttattataaaaaacactgtaccccatttcttgctcacggattaaagaaatcagccgttctctcttatgaggcccattttttattatgtgtgtgtggcttcaggggctcaatgtatttaaatgagagaacaggacaagcatgggagtccccaggcattttcctctacttgcaatataaagaacatctaatcatagacatttcctttaagaaattgtttctactcagtacccgtgtcttgaagaggataggttttttatccttgagatatacatttcttgacccaatactttacacttccgacacaacgaagaaagcagttaccatactgttaactcctttggtattctctatttggggaggcagggatgtaagtaaggttctctggatttataaatactgtagtggaaatgtgtgctgcgttggttggttagagagtagtctcttcctaataggccccagttttcttttgtatatggccttttcaccattgcatatggtccccttgggaaggcagttcaggtgctcactagagaaggtaaaagagaccaggttctttccttcctgagtaagcaggtgaccaaaaggaattctcttctgaggcttcaaaaataggtaagtaaagccttgacagaggcaatggtggcagatttcttttaaatccctgtggtatgggggtccaaaacaagttaaagtatggaaatggatttctgtttcctatttttatgtacacatacaagcacacacacacacacacacacacacacacacacacacacacgtatacacaggcaaaacccagtgaggtatctgttccagtcctcaaaaattgaacatttacagtgaacttgtgtgaaaaaatagtggcatgacagatgtttttatgtaaaaaagaagctatatccagtggcttcccataaattcctattgttttatttaagattctcagcacttttgaaatggtttagcatgctgtcttcattctcacatatttgaaactcttaagtctgtgtgggagacaggtctcccaggatgagaccagatgagaacagaccacctcttatcctacttcccttgatgatttgagattttttttttgagagcctacatgacaacgttttcctttgaaaaaacytgtttatagccaagaacattctgttatatccttcaggcattcttgacaaacaatagtttcagatttagatgcttaaacataaaaacttagtgccgagattgtattgacttgagaatagagataagtaagcacaataaacatctcttcttcatgacatcagaaagttgcttaaagtgttagaattattttaaaagaatgaaaatatgatatttttctgggtaatttaatacaaggaaactatgtactttataattttattactttcctagatttttatttttaaaatgaggaaataaaaattaatgataagtgccctttgttttccaagtagtataaaactaaactaaacttaaataatacagaaggatttattagattggggtgtgtgtgtgcacgtgtgtgtcacacatgagtcaggcttcaggcatagtttgattcttgggactaaattattactggggttctgtctctgcctctttgaatttgtcttggttttttttcctccttctatggtatgttctttaggatagcttcccacataatagaaaaaaatgacttcagcagtcccaggtgtgactgtcatacccacatatcatctataggaagttaacttacctttgtcctccaactccaagaagaagacctaggattcggtctgactggtctggattagctcacatgcccaccggaaaccaatcactgtagccagattgctgggatgtgctgattgacttgtgtaggtcatgtgtcccatctctggagcaataatggcctcagcttctctaaaaccacatgaatccctaaaagaagctattgggaagtggaaaatgcagaaaagtacacagctcaggcaaccaacaagtgtccagtcacctccattgtatttccactgtaaattaggaacaagaactacagctagatgtgtggttcaaggttcacccatgccatccatcactttgtgcaacagctttggtgtgtgaagcaacagaaagaagtcatataatggccagggaaaactattcattgtggcttgtccctgaatgtctcagaatgttggcctcatgagtgccctagaagtattagaccaagaaacactaatcctcactaacaggacttatgagactctgatgtagaactcaaaaagcctgttgatccaataaaataaaaacatctttgttttcaaagtgactagatacttgccagctatgagaaaagccacattattatcagaaggatgtttactatacttggaaccaaaagaggcatggttagttttatatttcaaatatttatggcatcaggtcattatagtcagatgtcctcaccttgtctacaagatgtgagtgsatgagtccttgatcaggcacaggcttagacaggcactgaccatgtttgcctcattgtctcccccattcctaggctttatggctgctaataccttttcctgaatgactcttttattctctagataaacttaaaccttaaattaagtctttttgtctaggatttactctatctctttatattcatagtatgtgtccatttaaagtttaattctatacagtcaattttatctaaaaaaattgattttttctcctatataccatgtaaatgtcatactttacaggtttttatagaattaaatactttaatacatgtaaatggaagtaatacctgttgggtatctactatagccaactggtttactggtcataacacatgccctatgttatcttatttatactttgcaatagccatgtgattttacagaaaaagatactaatgttcaaaaaagtctagcagctttctcaaggtccaacggttagtaaatgatgaggtgggattcaactccatctttgtctgattccagcgtcagaggtctatgcatgtaaacactgtggggaaatattaagatcaagtttgtgtttctcacaattccttattaaactgctgaaaagcaaaattcttcatgtctaaagacaatggcaattcttaattcattatttcaaatttaattgaaaagtattaatttagtttattttttctatgcatagagtaaacaagtccctataaagcagaatgtacagtaatgaccaagaaaccatcatgaaaacagaaaagagagaagtgtttcaagaaaaccaagggtacaatctttatgacttgccacacatgaaaaaggaagggaccaaagagatggaagagctaaagtaaatagcagaatatctacctagggtcttgtctctcttaggtgacctccatagtgtcggggagctagctatagtcatgcatcacttaatgacagggatacatcctaagaaatgtgttgttaggcaatttcatcattatgcagtcattgagtgttcttacacaaacccagatggtagtgcctactacatgcttaggctatatggtatagtctgtttctcctaggctacaaacctgtacagtatgttactgtactgaatactataggcagttgtaacacaatggtaagtatttgtgcatctaaacatattcaaacaggaaaagtacagtaaaaatttggttttataattttatgggactgccattgtatatgcagtccattgttgacagacatcattctgcagcatatgactgtatttgaatgtgttgctctctggtttaaaacctagaaatcacctgtgaattacctctggcactataaaaaataatttccaggttctagtggaaggattaaatcagtcttttgtttgttggtgtgttggcagggaggggacttatttatgaaaagctctcratgttactttgttgtgaagttatgcagccagggctaactactggggtagagaataatgtccacccttcttagcaaacacacacaaatgcctgcaatctgaacctcctccacctatcgctctggccacatccagacatatggaggaactcaaaattccccaaataagtcggactcttgtggcctgggccttggctcatgctgtctgtagacctggaattcctgcctgctgcctgtctgccaggtgaacttatgcaaaaaacagctcagcagtccttgtttatttcctcagaagcagatgtaactgttaccttctttataagatcaatgctatttttgcaaacatccaccatcctgttcttatttgtccatgtgtcagactccctctactaatgaagctctttgtgcccagaactgccacaatttgcattaattaaatgaatgattgcaggtatcctgcttggggatgggggcgagagaatggtatcactgttgttagaaacactaaacgtaataaatggcaaggaagtgaataattaactacttaattgcaattaaaagtttctggtgcctggctataaatttgcttaacatgtggaggggtagattttgattggacatgatcagctagtaccaggtggacaatcaggcagggatgcccagcaaatctctgtaaatggggagtgagctcagttgtagaagatattccaatgagagactagccggaagggaagaggcattaggattgtgaaaatcctttaaaattgttacctactttacagagaagaacagatggtcttgctctgctgcgccaatcacaaaaccgccacgtaaggataattaaagtgggggacaggtctggcatccagttcttcagtcaacattctcctccccaaatcttagactaaattgtaagacacacaggcgtccacatgaagcgtctgcacaggcttccttcaagtgctgaggaacagtgtagtctttgctcagcttttgtctgggagcatggaagttaattatatttttcatgttaatattttggagtttcagtatgaccctctgcgaaatgaggttatgaatatgtaacctacctatcttaaaggattattacatgcattaatatatgccaaagagctttgtagactgcaaagtgatgtaaaaattagaagtgattttttcccaccgtagcaagacctttatcctgtgtcaattcaattacattgccaaatatcactgatttatgctcctttattcatgatctatacacccatatttataaatcactatgataggtattcacaaaaataattgaataatttattgcaaatcaaagttaatgctttttcttatggccttctatttagacagagtatatgcatttttcttctgactaaagcttgagaaattcatccaaactttatggtggcctgatttatgcaggtgatggaaagtagcaagagtagggcaaccatatttaaaccacccacaccagtggtatgccagacacctgtggaaattccatgctgggctttgagggcyggggactctaagattccagtgtgggctgggaaggaagaacacctgaaccagcagctattgttcccctctcttgctcactgacagctgcaaggtacactttcaggaccaccaggcaatggcatgctggtggcagaggaggtgacactcacctcataggaagttccttataaaagcaggtggacatgtcatctcaggctcatcaaatctacctgccatcatagatagaccacagccaggccaaccatgccttctagtatggaccttgttattttgagtttgcttttaaattagaaaaggggatttatttgacattgttttctctattatcctttatatttatttaaaatacccacccacaaacaatacattccctgctattctgttccaattattctctgaagaagattataagcaaaagagcagcttttccataacattcaaaaattgcctcttacatgataggcaatgagctagatttctgcaggaaggatatttcatttaatgttcacaaaaatcttatgaggtagctaggtaacattgatcctcaccttacagaagctcagagagagtaagtaacttgtgccaagatacatagttagcaagtggaaagacagaaatttatacccagatctgtctgactccaaagaacacacctgttagcttagaacaggacagatattgaaagtatactatcggccaggtgcagtggctcatgcctgtaatcccagcactttgggaggccgaggcaggtggatcacgaggttaggaggtcgagaccatcctggctaacacggtgaaaccccgtctctactaaaaatacaaaaaaattagctgggtatggtggtgggtgcctgtagtcccagctactcggcaggctgaggcagtagaatggcgtgaacgtgggaggcggagctcgcagtgagcggagattgcaccactgcactccagcctccgcgacagagcaagactccgtcttaaaaacaaaaacaaagtatactatcttatgggtcaaattaaattaccaaaggtttaaaarctaaaaatatctctaactttgtggttaagttatatgaggtttatgtatccataacccaactgtggtgtagtatattaataacagtcttttttttttttttttgagaaagggtcttgctctgtcacccaggcttgcatgcagtggcatgaacatggctcactgtagcctccgatttccaggctccagtgatcctcttacctctggctcctgagtaactggcatgacaggtgtgcatcaccatgccaagctaatttttttttaacatttcttctagagacagaatcttgtcatattgcccaggctggtctcaaattcctggtctcaagcgatcctcccactgcagcctcccaaagtgctgggattacagacgtgagccactgcaccggcccaatatagaaatttttaagtatgatgcataagtgctggggtcttgtatattttttggtttgttttgaattttttaaatattcaatcggtctgatttcccaggaaatagactctgaaatggacattgtctggaggactactgaggtgcgttctcagaaatagcacctgtaaggaaggtagggacgcagggttagcagagatctgagcggtgatatatcaggttggcaaaaacaacaattacttttgtaccaacctatgattcacagtagataataccttgtgccatcctcggtgaactcttcagctggcattaaccttcagagtaattcatcaaggcaaggatgctgggcctttgcactctcttatagagtattggatgtgagaagggggcataactcagggatacactactttcttccacagagggcaattcttggaaaaggaccccattgagagctatgtggtgcagtagagatagcaagagtgctttgatcatgacaaggccatgggaggctcattgcagcatgcactgtagtcccctgtgtcctcagggtccacttgaatcatctaatatgttcacctaatatggaaccagctccaggatgctggatgggctcatttcctggggtaactcataaaaggaaggtcagtgaggtaagcggcaggctccatggctgcactgattctgaggtcacaccaaaagctaattatatgccaatcttaaatcctctcacttccgctcttctaggtgatttacctggtagaatgacccacctgtgcatctctgatgtctaggactcctccttaggccatggtgctacacttgaagatgtacccctaacattgggcctaactacaagatagtatgtccccctatcccctggtctagctaggctggtctctgttgtggtttgcatttctttatttgactcgattgctagttttactccctttctgagtccaaacataccaagattcaaattcagtgagaaagcttaacacactcagtaatatttctgaagtgtctaccctagactaggtccctcactgatgaccacaccataatctttgggagctgtgaatatgttattttgagtggctaaaaagactttgcagatgtaataaaggttagggaccctaaaataggcagatagtggagtcatttttctcttctcatttcctttaatgcttcttctgtgcctttgctaagatgtttatcactttctaccttgaattataggcactgaggtatcagttaccttctctaataggctgtaagaaacttgaaggaagaatctacttctgccttatttgtgctgcagtgaattacactgggtagacatttttaaaaaactgtagattgagcttatgatatcatgcaatcttcgaaatagatgagtaagagatttgatacgggctgctcaattccacccaatactgacattttgttctctcccactcttactggttgcataataaccaactatcgaatagcttcttagatcattacaatattaataaagttcattaattaaaatggcccaagtcaccaagatgaatattttataggccagtcatttcaaacatattagtaccatcattattatatattgatgttatattgataatataacatcattatattatatcawtacattgataatatatcatattatattgataatataatataatgatgtattatatattatcattgaataatttatcaaaaatatctagaaaatagttaatccatgctatataaatttttttctattaacctaggtatatagattgttgaaaacattattttgagttagtgttgtgatttatcacataacacatgaatactaatttagctaataaatgtgtcatgtatctagtgaataaggctggaacacaaacaggacatttttgtaacattccataccaagtggtagctcttaagatatatgaaaaaaggagcaacagtgccttgtggtaaaggatgagtaacaggccagaaccagagaccttccagaaagagataattagagatcccagattgggactgacaagtttgaaagccatgctgttcaacccagacaggttgagaacagagaaaatcatatattccaatatccagactaatagcagcaaagaggtcatttgtcagaattaaaggggcagcacaaaatggcagaagagtagatttgaggattcactaaaaatgggaaccttggaaactgaggccatttctgacaagaatcatcatatgcttcccatacagaagtaagcaaagcctaggggacacatccagagtttgtagtgggaggtgaaagggtgcatctagcagacgtgagagacaataggacagaaaaatggccaactctttgcagcacagtaagtagatggatcctccaaagatgacctcatcctaatatttgggacttgtgaacatgttgccttgaatggtgtattagtccattctcgaactgctataaataaatatctgagactaggtatttataaagaaaagggatttaattggctcatggttccataggttgtacaggaagcatagcagcttctgcttctggggaggtgtcaggaaatttggaatcatgacagaaggtgaaggggaagcagacacatcttacatggccagagcagaagggaaagagagagagcaaggaggtgctacacacttttaaacaaccagatctcatgagaactcattcactatcatgagaatagcaggggtggtgttaaaccattcatgagaaaaacctcatgatctaatcacctcccaccaggccctacctccaacactggggattacaattcaacatgatatttggggtggggacacagattcaagcaatatcacatggcaaaaaataacttcgcaggtataataaagttcagggaccttaaataataatcctggattatctaggtgagctttatctaatagtcacatgatcctttaaaagcagagaatgtcttcagctgggaggagagattggcaagatgcagttgaaggggaggtcagatagattgaaagcatgagagggacttgacccatcattgctgactctgaaggtgaagaagacctagaaccagggaatgcaaaagcctctagaagcttagagtaaccccgggctaacagtcagcaaggaaacttggaactcagtcctacaagcacttggaactgaattgtagcactaaacgaaatgagcctggaggtggattcttctcaaagcctccaggagaaaaacacagccctgctgacatgttgattttagatttgtggaactctaagcacaattccagccaaaaccatctgttttcctacctgcagagctgtgagatagtaaatttgtgttgttttaaaccattgaaattatgtcagttgttatagcaggcatagaaaactaatatagatagtaaaagacatcttataattgacccattcatgacttaaaaaggattttgtctattagtctctcttttactttgtttccctgtttaaaatattaaaatgtcaagatactgggaaatttagtattatgctgttatcagaaatgggacaaaagtgacttcattatttctttggacatactctgtagaacccttacattatatgataggattttctaatgtcttctgccctaaaattcagtaaagaaaaatgtaatgcgtgatttgaaggctggtgtgtgtgtgtgtgtgtgcactttaatgtctctttacaaaaatgcttcaccaaacttttatactaaatcattttgaaaaataattatccactcagttatataaattttccttgctgatttttatttaattgtaaccaattttgcttccaattatagcaattggtattgtacaggaaagttataaagataagtaattgtttttagtgaatcgagcaacctcatatatatttttgagatttccttcctatacttttatgagacagtagcaactgaacataaacttttgtaatatgaaattaaaattagaattatttcaataagggagaacagcaattctggtgactatttagccccttgatgttgaatcatgccataccacacctgaatcgtcccacttgattagagcaaccattcaagatactcagtgccaatcctgtctcaataatctgtacttgctctgaatatccatttaaaaagtggataaaatgctaataatgctttagaaattgtgtttgtaactgcagtgttattaaatgatgccttagactagatgtattttggaaagaactttgagattattgaatgagaggttatagtaaatgaactttcacattccctttcccttcctaaagaaaaaatattcatttcatggatttagtctacctttgagattcttagtcttttctagggagttctagacatagagttgatactcagttaatttttcttttattctcaaaaacataggctttcaaatttaatttccttattttttcagattgtggtttaccagtaaaactattctggagtggtataagaaaaaccagaccgtgtggccatttatcttctttttgattcaaagtgattaagtgggttgaaggcaggggagatggactttcaaaacagagtgttagaaaatcatgttatttttatgtatttgtttaataaataagtttatgtatataaatcactaaagggaaaatcattctaatgatcttctatgtcattagaatatgactttatatatactcccagataacatacttgaatattggtcatgccgctttataaatgtataatcttgagtaattatttaaacttatcttggtctttaaaattaggattataagaatcaggctcaaaactgctctcagaggcaggctgcctttgaagcatctgctttcttagacaaattaggagtttcaaatgaggaaagaagaaaccaggtttttaaagagatagaaagtaggaaaatggtggataggaagcaggactaaattgcagctcctactcggagggacagagtagcatgtggagacacatcatgaacttttgctccaagaactactgcaggaacataccaggaaagccaagagaatccaccaaccctttgaaggaagcagattgctcctggacccggagagacagcccaaatactgtgagtgtccaaagtgtggaagtaggaaaaggggatcgttcccccttgaacacacaccctcactgggaaacctaaagatccagattacaggaaggacttgaccttacctggagatgagataattcagagagccaagcaaaatacaggagtagaggaagcagcaggaagagctctgtgggctctctcagtccccagggaagccatttctggtctcacaggggtccttggggagggctgccaggggaactgggaaaagaccacaggaagaaggaagcctccagctgaactctgtaacaattccaaacgattgcacagtttcttggacagaacgtgggggaggggttgaatacaaagtgcagatgtgggcaggtggggaggcatgaaacctgaaagctctgcttgctttctcagtcaggaggctggtagcctggggtgctgctcgcccactgcctggaaacgaactagatgcttttgaggtggagggtggggagtgcaatatgggagtgagactggccttttaagttgcatgggagtggggtgatgcctgtaactgccagctttcccccacttccctggcaacctgcattacacagcagaggcagccataatcttcctgggaacataactccattgacctgggaaccacacccccatccctcaaagcagctgcagcaagccctacccaaggagaatctgagctcagacacacctaactctgccccaacctgatggtctttctctacccaccctggtagctaaagacaaaagccatattttcttggaagttctagggccctgctcagcacctgatccaatttataatttccaagtagtaatttgccaattatgtgtcaggttttgtttgtttgtttttttgtttgtttgtttgtttgttttttgagacagagtctagctctgttgcccaggctggagtgcagtggaacgatctctgctcactgcaagctccacctcctgggttcatgccattctccttccccagcatcctgagtagctgggactacaggtgcctgccaccatgcccggctaattttgttgtatttttagtagaaacggggtttcaccgtgttaaccaggatggtcttgatctcctgacctcgtgatccgcccacctcggcctcccaaagtgctgagattataggcatgagccaccacgcctggccactatgggtcagtttttaatgatactcgctgttgcttcacaatgcagttggtacatgtctttatcaagttaccaggaaaacaatactaaggagttaccaaaggtcaaattctcatgcagcaggaaatgagatattattagctctttatgtgcaaggagtagctagtttattgagaaatcataatgtgttagggtataaaaataaaactatgttattatttgtcagtaagtgccccaaagtactctgttgaatctcacctttcacacttgctgggtgagcttcaataatagaatcatagctataatcttgactttcattcatttattaaaacagtcacttagagttcttaaaacccagaatctcataagcatttcataacccctctctccttctgccccaccctgagaagatggaatgaaaggggatttggtctggctctcacaagcttttccctcacatgtattgcccacatattggcaaaaatgaaagagatgaagtaaagcagctctaggaggcctccctgaatgaggaggcagttcctgtctggatggtctcgctgttgacctggctggtgcatggtttgacaaagatggatggggtattgtcaactagtcaaggctcattcttagctagtctccccagtattagtgcttccatgtgagatttagccacatcttctgcccaactcccactacaaccttaccttgcattcctctcaaatacagactgcagccaacaatctcatcagacatccactatcaacttgaggtccacaggcctgttcagactccaccttacatattagaaactggaaacccaagaatattcaagttgaaggttgtgtgagactcaccttggcctggcagaagccaccatgccatctctccccagtgttttcattccctactccaccagcacagaaattctggtgtcaatgcagatgtccagctagggaagaagtgtcaatttcctcttcttataggcacatctaactctaatgagttattcttttcaggttttcctttcttagatttggaaaaataaagtgctcccttccacaccctaacaaagtctgttctcctgacaaagcggtatctcttccctttccatgtcaccttgttagtctgagtgtgtatggggagtgagaatattgggacgagaaggatgtaaagccatgctgctgagacagtacttctctgcaaaaccggatggggcatagctggctcaaagctgtcagatctatgagagaagaatataggtctacctaacacctctgttctcagatataaattagggttatgggctgaattttgtagccccaaaactactatgttgaagccctaatctccagtagttcagaatttgactgtatttagagacaatatctttaaataggtaattaagttagaatgaggtcattggggtgggccctaatccaccatgattgatgcccttatgagaaaaggagattatgacacagacatgtgcagaaggaagaccatatgaagacagcagaagaagatggccagctacaagacaagttgagagttcctcagaagaaactagccctgtctactccttgattttggacttctagcctccaaaatagtgagaagataagtttctgttgtttaagcccctgagtctgtggtatttgttatggaagtcctaagagactcgcatagtcaggaaggcaagagcctgctgtacacataacatcccatgttcaaatgctccagaagacagtgttgccaagttgttgtacaggctcttacctgcagcaatggttttctgcccaagaaggcttaggttaacattggcgagattcatgacaaaatagcaggtaggaaagggttttcatattttctctggggaatatatagtttaaacttaccagagctcaagggatcaaactggattcaagaagactggaacttgggtgagatcttctgattggtctctattattatgtcacttggtttagaaaaaaatgatgttaaaagggttcagtcctcattttcagtcactgatttgtaaactatcctcccttttattcagttttactatctgtgtattcctcacaactgaggaaagtgattctaataagctataattttttacttctgaaccacttgcttggttcattcatgttggaaaagtaatcaataacaatcattttaaataaatcacgaggacttcccttattctttccttttaacaaagcaagttcaggaaaattaattcttctttgcttattcttttagtcaagtagggaattttatttttgtctaagcttcattgctacggatagtcacagtggcattcaaatacttgccccaagaggtttaattgggatgttaatagaatccatataaaagaagttacctgcaaaagtgtacatatgaacagttaagtttctctagcaagtatggtgtggaaaaatgactcattctgactgcgcaactattaagtcttttggataaagtgttctcagataattggcagataatttaggtcaagtatttcttgtctatatgtctaatcccatccccttcctgttttctctctccaaagctttcctcatgaactgactctatatctgtatccataaagttttaataattagttacatttttttaaattaaataatggtgattatggaagccatggtcagatgccattcagatctcctttcgagagaaatctgcattgaagaagtcagttagttgacagcctgcagctaccagtccttcaggacctatcacggcttactctccaaggccacgttctccccagtctgctcctagcaaatcactgatcacagcaagggcacaaaccagactatttctgcctaatgaggtcttcctttagcagaccatcttgcatcggtctttgttcagaggtacaaggtgatccaaacccttcaaacccaactctcctccttccttctctcctgtccaaggtgtcagacctatattgcgtactgaaaactctccctgcctattcctactctcctgtgccttatctttcacccattttcccaatttattctcttgcatttttggtgtctgcttcacaaaggactctgcccagtgtgacaatctctgtacagcctgcagaaaaawaagtgtttttagagaaaggggtagagagatactcttcaccactactcttactgcagcaaaccattaccttctgggggaaacagaagggtgtaatttaatataagattccaaatctagggtttttttwaaacatttaacactagaataattaatggaaaatagatgaagacagtctctcaaaataagcaagttaatcccacttttttcatttcgagtccatctttttattgcccacaacactctcaactcaattacatcttacttcaaactaaaaactaacatccattttcaataactatactttaataaacacatacccattacttcttgtgccttatatctccctgtacacaaagaacattataaatatattaagtaaacaaccacatgcatatgggttaattacttagcacaaaaactgcaagatcccttagagatgtcatctgtatgacaggattggtgtttacccaaggctaacagatatttagaataggaaggtaacaaatgcaatttaatcagtgaagagctctaatttacttgtatcaaacaatataattacataaggcaacataagcataaagtttcctatgataataatgattatgaaaaggaagaggaagagcacatcagtttttactgagtgcattttacayaaattttctaattattaaccaatttaaagtgcaaactccatcacatgatcacatttgaattgttcaggacacaaattaaacttttctcattagaggaatatgtgtgttttcatttcaaccagcaaaaaacagaaggaaaacacaggaatgtgaagagttaaaaatgaaatgttcaatctgttatttggttagtcttcaggcttcagaacaaatcttcaagtcccctattacactattctcgtcccttcagggactgctctttctcccagcgttgtgtccaagtttgggagtgtcctgaggagccaagttgcctgagtggggattgtccctttcatccttgagtaatctgatgctatctttgrctgtgtctgcctagataatccttccagacaatgttttgctgggtccttctatctactcaggattttacctgaaaacagatgtgttctcttgtattcccaagccctccaacccctctttctgaaacagttctacttccacatggctctacccaaaaatgagtgtaaaagcactcctttctctgaagcatcaaaagcactctgctggccattaattttccatatttcattcatctaattctaattcaccagtcaacattatcgttttcaaatttgtcagaaacccctgctctcttttttgatctttctctcaaatattttgtctgtgtccctaagctttcaacttcccttgaaggtttaggcttttggattggaaagccaaaagatagcaagctttctctgattgctgttctgtagattcttctcctggggcaacaagcacaatagcaaacatctgctttaaaaggaaaagaaaaaggggaaactaccaagagaggaagaaccatattattctgccacttcagcatatggctagacagtaaattaaagttttagagttgggaggaacattagaagtttccaaattcaacctcttttcctatcttctctgttatatgttcctgacagatggtcaaacagattccataatttcagtgacaaataattcagttcctcataagagagtgcattccttcaagaatcattagacttcttagaaagttcattcttatattgagtargcatctgtttccattatgggtaacagaagctgacgggaataatattggccttggatctaaacagccagagatggttcagatagtctctagaagcttcagtttctttatctacaaaatggagcagatgatacctatctttcaaaattattgggaagattaagtgaaataaatatacataaatacctggtatactgtttgttgtagtagatgtttgctaaacattaaatctgtgcaccttaaaacatccagtaacagtccaaactcattcattcatttattcatacaatattgattgaccatttatcttattccaaatcctggaataaaccctggtagtatagcagagaataaaacaaatttataccttggcgtaaggaaagatagtgtatccagtataaacattgaattactaatgtgagaagttctgtcaagtaaaaattctacttagtataaagagagcacatgcaacaggaaacattaaaaacatctattttcaatctcacacatagacacagacagacagacagacagacacacacacacacacacacacacacacacaaaaccataacgtattctctccccttacagagtctttttatatcaagaataaacactccaaagtctttatctattcttcagatagcatggttatttgatggcttaatgtttcctattacaatgtggaatgttgaaaaatccttttttatgttaactttaaacttaataaagaatttatattattttaagttcttcatgttatttctgtctctttccatgtatacaataacaactgtaagtatgtatattacttttatagtttgcccattctacgtgctaatttttatttgctattatattttcttcttcaatgttgagaaggaaaataagttttaagagaaactacaatttatttccttttggaaacttatttttaaaattcattatatctagattgagtttctaagtttctcctcatcactagacctactgctgttgtgatgcaacaaaaagtgcttgggtatcatcctttataaggagacatctgcactaagtacctatagtctcatgcttactctgtctagctgccctaggctcctgctcacagaacacagcccccagagaccaggtctctccctccttctgcacacttcagtatttaagccatcagtctgattttatctcacattgttcattttcttctggttttaagaagaatttgcacttggagattacttgtacattttgcatttcaggcctggaattgaccccatcagaagctcccaaacaatgaatttgcactctttaccccattaatatacatttaacaaccaaagttgtactgatgtatcaggttttaaaacctcagtagatgatgtgcttgttcccaaaatactctttccctttctttgtaaaataaatctccttggagttcactgtgcctttatgttagaagaacgcattttaaagaatgttcagaaaatcctacttagcccagaattcctatccccttatctgaatttcctcttctttatctctttgaccctggaattcaataaatttgaatattaattttgagattcaatcatcgagtcagatgagtttcccaataaagaaattgacaaagtctcagttggacctgaacgagccctgagaaaaattacatcatatctcagtttcctcagctgtaccaagggaagttcactggcattgggctccttggccaccgcactgaaaataaataaataaataaataaataaataaataaataaataaataaaattgcacatgttaaggaaaggaggtaagagggaaagaagactccttcaccttactgagtgtctttaagttcggctccgttcttgacccaccccacccatctgaattagcttgcttcagaagagccagtgggactgygcactaatcacagggtgtttcccagggtctcaggcaccagtcccggagtttttcccagcagggctgtgcaccaatcatagcgcctcacccagaaatgccatgcaccatcatgaggtttctcccaaccgggccatgcaccaattacagggcttcttacaacggggccccgtgcccctggaccagtcctgactacacaccttcctcagcagctaccatgccagggccagagggtaacgaggcaggcacttgtccttgaaaaaaggaagaaatatcaccctccctctgtgaatacatgtgattgttctcactgtctcccttgaaagctttattctcggaagtacacgctactatgctacgrcagatgtacaatctgggaagttttccaaattcgtcactggaaagcatggagtattcagcattagcgcctccgtggaagtttctgtctctgcctcagtcagtctggctggcagcactgaagagtagacggttgtccagaggctgggtaagtgggagctggaatcctgtgacagaggcactcccagccagcttctcaatttgcagagctgttaaggttttccctgacagctgcacacatgccacatgagcaaaacggtccactgatgaggcaccagcttgagattttctgaataagctaacctctgggaaagtgtaaagtcatgagcttcaccgcgcagtatctacaagggaaggatgcaagagcaattgtcattctcattgcttccagcacaggtggaaggagacactgcggatggtaacttccttaccaatttccattatgtgccctgatactttagatcctgagcagaagccaaggaataaattatgaaaacaacgatttgttcccctaatataatgcaggttcgtatcagggctataatccctgccatctaaaacacgggatcaagttgtccgactctcagaggccattaaaaacattcacgtattttagagtttttcacagtttcaagtacgtagttcagtgtttgtcttatgagaagttcttgaagctaagtagcagctggccttctttatcttgcattacccattatctcctacattgtagaagtgctttcagccctgaagcaggtgttattgtagagaggtgcactgaaagaaagcttggaggatcttaaatgcctgtgctctagaaggtaacccgagaaagaggagagatgcggggacattccaccgtgtctgatcctgacgctgttccaactgtacggcttagacaacaagcagagcgggggatgttgaggctgagcgctagggtggctgccatctgggtggacttgcctgagttaaaggaaatggaggattcttgaatattttcaagtagatttccagttgtctcaagattcaagaatttttaacataactacaatgttgttgctattggtttgtggattttgttttttaatccaagtgagaaaaaaatttggaatatttgagaatgttaaattctaaaatcgttaataaggcctattaagtcctgcatgttctgggttctgtcttcctctgtcacctcatctcaggccactcacctgtacaaaaggaaagaaactactttgttttcattttgtttctaacaagatttatcaaggcaggtttcatggaagtgaggaggtatgagctggcacattgtgtcagttagctatttaatgtggctgcaaaacaagccacattaaaacatagtagcctgaagtatcaataatagccattattattgctcatgaatcgaagagcaagctaataggtcttctggactctctttaaattattcatgtgtccatggccagcttcaggttaggcaggcagctttgctgatctttgagcatttttatgtatttggagatagcactgctgttagctggcctataatgatcttggcttttctcggcataatcttccagcaggccatcctgggctttttgtccagtcatggcaggttccgagagagaaggatctcaaggccacttgaagcctagtcttgagctggcggacttcacatttctcattctgttggccagagaaaatgaagaagccagcccagattcaggagctggagaaatgcactcagcctcttgaaggaaggatcttcaaagttgtattgtaaagggcatagataagggtccatttttataatcaaattaccacaaacttcaaagataagtagaagcacaactggcaaagataatgtgtaaatatgcatccaggtataagaagcaatttgagaaaagcacaacacaggttctataaagggcaaagagaattgctgccagaacaaagattttgtgtgtgcaggcctagaagaacactcargatttatgagaaagaggactagaaataacacctgggaggaccttccattccacactaaagaatctatgatcagttgaagcaaccaagaattatagcagttctctygtgcagcattgatcactgatccccatttcttattctggaaactgcccccttctgtgcattcaatgataactactctttctttgtgtacttattatttctctaatgtttattcttcactgttttagttctctgtctccatcctctgttaatttgaggccactcgacattctctgcttagccttttgttgttcaaaaatacctcctcaacaatttcatccacttcattaattttcactaatgtcatttgatggctgtcagatctatagccctcccagattctggagagctgtgatcttgtttatgtaactgcatcctggacatacatctgcagttctaacttaacttgtttcaaagacaatctccttattttgccttctatgctcctcattctcctgtgtattctcctagttaaagaccactgttatccattcaaatacacaagtcaggaagtcaggaaacacctgaacatcctctctttccctcatttcttacattgagtctgcaggtcctgagtcagttatatttcctaatatgttatcagtatctgaatgctctatttatgagctgtggctgtggctcattgggtgcttcaaattgtgtaggaaggacagagataatttgcctcacttaattttaattggaagatggttttactgatgtcttaatgatatcttgatcaagtcatatataagtaaaaaattattttttgaagcattccataatttgcttctaataacctaagattatacacctcattacaagaggcaagtgtgttatcctgaaagactggcaagagcatgcctttcaatgtaacttttgacctttttatgcactagacccagaaatcttgttttcatgtgacttgcagtcatatggcatatagcatttctccatggtcagtgcaaaggcttagcccatctgcatcttggcacgatatgaattgggctcttcctccaagtctgacaacagtacacacaatgaacactgaaatttcataagttctgctcaccaccttaagcaagggttatttaagcagctttctaaaaacaaaatcttatgtggaacctcacacataaagcaaataaaagaagagcttgctttgttaaagtatggataaaagtacccaaactttgcccctggtctccatcccaacctttctaatcacctcctgcaaagcccttggagcactctaactaatcttaaggctctgaaaaatccaactaaaaatatcacgaacctaggggaaacatgagaccaatatactctaggaaaagagcaaatgtcatttatacagaagtacatcatgacttgagctaaatctgatcaatcctagacaacaaaaaagaaaaaagttgcattaatcataaaagattgaattcatatttttattgatatataataattatacatatttttggaggtacaagtgatgttttgatatgtgtataatatgatcaaatcagggtaattggaatatccattacttcacatatttgcttttctttgtattgggaacattccaaatcttctagctattttgagatacacaataaattattgttcactatagtctttctactatactatcaactcctggaatttattccttctatctagtggtgttttggtccccattaaccaaattctcytcattcattctccccactacccttcctagcctctggtaattgcagcactattcacaatagccaagatatggaatcaacttctgtccatcaatggatgaatagacttttaaaaatatgstatatacatacaataggatgtcattcagccacaaaaaaagactgaaatcttatgatttgtagcaacatagatagaactagagatcattgtgttaagtgaaataagccattcatagaagacaaataccacatcttctcagtcatatgtgggagccaaaataatggatcatatcaaagtggattcagaatcttgaccagacaaagaaagagagaggacgtctccctcaattccagtagaamctcctctatgttacaactctagaatgaggctttttctccccaatcttctgtcgttgcttcccttacctggactgccctgatcatatcttacctggattcttgaactaaactacctggttaccctgctgttagttcctgacccatccagcaaatgagtagaacactttccaaagtcatctcactaaaaccaaatattatctcatagctttattatctgtgaaatatggagtaaagttcaaattacacagctttccccagaaaaaaaccacccttgaggagtccctgaccaaactctctggtcaatcctgcctttcttaactcacgtcctaaaccccagtaatcctgggaaaaattagagatcttcaaacttgctacaytttatatctccatatctctgtaaatattgttctttctgcttacaattagcttttctctagtgtctacctagtgcaagtgcatctatccctatgcggatttcatattgccttctcctctctgaagacttttctaatcctctcaccttagccttgatccctccttccttgccttatcatggcactttttacatgctcaaaatgtttcaccaatcatactgtattacaattatttcatgacatgtcattgtgccaaacttaattgcaatttctacaggtgaaagggccaagtcttatttactttatcatcacccacacctaacacagtacatgacatcaggcaatggtttagtgacattcaatgaacgaattatggaagcaaagctttaagaaaataaatataggaacagcatggaaagtgaatcagagagaaagccacgtgcatgggatcggttaaacgggtattgagataatcctggctggtgataataataatgaggtaaaaataataatgaggcagaaaattgtcaatgcctatggagcaaggaataatactgggtatctctgaaaacagaatctgcaatacgcagcaagagtttgaaagggcagaaggagtaattgacaataaatccaaaattgaggccagagccaagaatgaatgattttaataacaagccttgggaaagcaggagggaagctgaataactcagttttgggaataataaacatggattctatgctgtgcacaatgctagctattgctgacatgttgcttttttgtactctcctcagttttgaaagcagaactcaggggagagtgaaggctcagaattgtcgactgcgtgacatatgtctaagagcactgagggtagtcatggtcaaggctgtaatctctgccatttgctcttctctcacattggagagcatacaataggaaaattttttaaattaagggagtattttctgcaccttaaaatgaatggtcccaaatgaaggaatttttttaaagaaacacatattttatatgtatgcacacacttatagtgcacttatttctgtatatataaaaacgcaaaaataaatatacaagtttttatatacacaaacatacaatgtttgtattggggaactgagcttttgatttttaatttttaatggcctctgttaattttcactcaatcagatatctaatttgatcactgtattttcgtgtctgaagtatatttttcaagggaatccatgttaacaatactgaactgttctgttaaacttttaaattattgtcagaattttttccttataggtcattcattgtaatggagtaagaatgaatctaaatctggattaaaagattttggtgaattgggagtgttttttccccagactcagaattaatgacttaatgctccctgaagatttcatatctataggcaacatgcaccatcttgctgagttaaaatcctagtaaggattggattaattctccatttctaatgagaagagaataataccaacaatgattctaattatatctcggacttgaagagttcattccttcctaggagctaaaggaaagtctgcatctgttacgtaatttatgcataaagacaaagtcatttgacaaaggttacactgtatgattagaatccaatgtgatagaaattctgcatttttgattctacatttagttctctttgctttaagttcccaattaaaaaaaaaaagaaacaataaattgtaacgtacaaaacgaataattctaatttgatgtgaggaagatatttctgagagacatttgtgagatttgagagtgtggattagaagaagctgtgaaatttttttactagaagtgttctaacataaagcagattcatgtatgtctgatctagtttgtggggatactatctgattgaagcaaggtgaaataaattatttatcaagatttcctgtagtcatagaattcaatgatttctctttgatatgctctgttacattttttcctaataagactcaaaaatacatatataaatgcaaaatgacactgttaaattgcttcctttttgcagggaataaaagraagagacttgggctgaatcttttcatgcttgcctctctacagtttattttcaaaactgcagcmggcgtaatcctttaaaaacataggtcagaccattgcagcccctaatcaacactctgcatggctccctatttcacctggaggaagagccaagtcttttcaacagcyaacagagccctacatgatctacagagctatctcttccccacctccccactacctccctagcctcatcctctgccctactacttgcctactctgttccagccatgctggctgccttgcggtccctctgctgggagcacgcctgcctcagggcctttgcatgtgctgtttcctcagcctgggattctcttccatgagttaaccctatggctttctgcctccctttcttcaagttttttctcaagtgttactttctcaatgagactatcctcattaccccctaattaaaatttcaaacttcgtccacctccactgaattcttttttttacataatatttgttactttctcacattcttcataacttgcttacttatgtttgtttttgttgtttctcccctccccccaacatctagaatctcccaacttctagaacatatgctcttgatgggcaagggtctttgtctattttagttgatgtttgttgattaatttcaaaatggtgtctgtcacatattaggttcttcatatgttttgtamaaatgaactaatactcattaactaagatgagcaatgattacaagtgactagtaggtagcttttattttgcaaaagatgtaatttctatataagcatattttagtcagaggagtaaaaagttgccattcctgaaaaattactcaaagatatactctagcaaattgaaagacaactgaaaataagatgaaaaggcaaagtataaaataattaaggctgaatatcaataccaataaaatatagaacgaaatcttgttcattttgttaacctttttaaatataatacacatttcaaaaacaattattgaaagagaaaacataatgtaataaaataatgtaatcataaagtggatctaaaagtaacagattaaatcagtacaaactgggaaatagaaaaaaaagatataagggacaaagtaaaaatggggagaataagttcccactatttacaaacagcatcaatggaataagcattattttagagtaatgatgccatgagaagaaaatgttcaagtacttttcttaaacctgacttccacataacagaccttcaaatccttgaagacagttgtcatgtcccacccagtgcttagtatgtgtgaagcatgatagactttgaactgtcccacatagaacagaagttcaagttcttctctcatctgagtcccctactcaagctcctcctgcagattggatgccagaattggacaraaacttcagctgtggtccctgcaacacaaaggagagcacacacaccctctcacttgctctagatattttgcttttatgagtcaccttaagatcatgtttttgaggctatgttaatgactctcatggagttcttaccaaatttaattcctcagaattacgctacatatactctactgtgtacaaccaagtgtaggacctcattcttttccaactaaataacaatttgatagattttagctcgtggctatatcatgtcagtgcaattttgattcagcatattcatgaatcataaagttaatttcaactacaaatttgggagagtatgttatttctttatttaagaaatataagttattgggaaaatgctgaaaaagataatggaaaggacggaaccacgcaacaatccactagaaacctcccttgtgattgacatcaatgcactaataagcactattgaggtagcgattgagctacttaactgttttcgaatttcatatttttctatattaagaataagaacaatttaagattttcccartttaagaatgagycctggacaattatttctttaggttcttcatctgctaaccctatcatagaaataaattcrratatgctgttgtcattagaaacacgctggctttcttgtgacctttctcgggatatttacacattatcgcttaataatttattctaaaatctctttcaagattcatatcaatagtttgcataatttttcttcctactttttgaaaactaggaaattaatttgatatagctacacaaaagctgttcaaaaaaggtcaaacaagttcaaggaaattagtatgatatgctgcattattataaagcacactgctagatttctctgtaattatacttttaattctaaatcaattactttgagaatctatattaaactttkaatgatgaccaattaaaaacgtctttaaatggcattgcccttcaaaatggaatcagtgctaatgaaataaactgcttttgatattgtgaaaatctgattacatgattgcttctgtagctaattggacaaacttgcatattgaatgcttctaaatatctgcttctcttccacctacttttctatcatttggcagtgatgaggagggagaaaagaagaggtctcttagttgaacttaagatcttcaaaakcctttccatggtttattcatgcttgtcctatcctttggtgttgttataggaagatatttaaacttgcttgggtgttaytaacattcctggagttatgattagtcttgaactgtagcctgtagtggaattccacagaagggtaaagtcatagtatcttatgttattcaaacttatctactatgcagaatgaaaaaataagtaaccaatgaattattacttagaatctgctgttttaagaacaagaatgttaaagaaaatttgtacatttaattgcttgggaggtcaaggcaggaggatcacttgagttcaagaccagcctgggcaatgtagtaagactcaatctctaaaaaatttctttttaaaatctagctggatgtggtagcacatgcctgtagtcccagctactgggtaagctaaagtaggcactagagcccaggatttcaaggctgcagtgaactatgattgcaccactgtactccagtctgggcaatagagcaagaccctgtctcgaaaaaaaaattagttgcttgatggtgattttaaaattcagaatgactttaggtagtttaggttatgtctctatgatgtaaaaatggtcaacttagaaaaatgtaaagagtaggaagaaatctctcagacaattttggaggttcaaatgtacttgacaattcagagaagttacacagggtaaaataaagaggcaaagaacctgaagaccacgcagattccacatcttgtgcttaaacactggtgctttcggtcaggttgttacaactccctgaattgcaatttccttagctaaaaaatggagaaataatattttccagaattgcctcaggataatttcattcaaatgtggaagtgtcttatgaactatgaaatgcactgcagactcccagaaatataatctctttttccattcatcccctaattcaataagtatggtcaatttggcagacatgtattatttaaaccttgaatcacctattaatcatcacctttggcaaagaaaatggagatgcaaaagtaggttctgtataaaaagcttaaatacatgatttgcagcgaagctgtatttactcagttaaaaaaagaaatttatcttagaagccagttttaaaatgataattaactgttttgtgttgtctagttaactgattcttcaacaaacatagtttgaagaagttagaccttttgttttatgcaaaataaattatcatcagaccatattttctaagctgaaaaatattgtatttttatactattgtcttccatccatttagtttatgtaccttaactgcttcatggtgctcttggccagaaacaaattatttctaaatattatgtttgcattttgatcctttatcttaactgtaaaattatacatagctagtcttttctcttataaacccatctgtggttgctgaaaagtaaattattttgttgaaggtcagcattaaatccagccagatttaccttttattaatccctgtttgttgcttagggattttatcactgtgctagaaccactttttggccccagaatcttttctctcaatttaattcataatgccactataatgcaatagatgttaggatttggccatctgggcattttaaaacatggcagcagaccagtggagtctcagtttggtgttgcatctgatgttccctccttactacacatgaccagccatttttcaaaaatgcagagcctgtgtccaacagtttactgtggccacatgagctttagtcacgctttgtaactctcaattagaaaaatctcaaatttagtcattacaagttttatgggttgtgagagcacaaggggtccttaaaatgaccagacagctgaaagacgtggcaggcagtgaaacatcaagcaaggaagtatcctcgcaggccagtgactaacgatccctcctgcgctcagtttatgttgaaattaaagtaaaatcctattttcagtattgagtaaatggggtcgctagartgctatgcaacagaattatatgtggaaaaaaatgatgtgacgtatacaattacctcagctattcaaattagctcttttcagaagtggtctctggaaccctgtttccatcatttggcaatgagccagagggaaaaacaaatatttcccaggcttctctcccaaccgaggagctgcacattcttcaaaatctcagatttcacctcttatttgaagcctgtcttgcatggccatttggaactgacatttctgctgcaattccaaagcgcgaactccgggggctraagtccacytacgctccacttaaccccatatactcagaatgcgcagtgcggcatctgtccactgggggcgtctttttcctcgaattgcgctagggctccccagcggctaacagtagccacctgcgcttgtgtkcgcgttatgtatcgtttccatccttcgtggcttgatttagttctttatactctcgtcctcatatctggattatagatcgttcccacagtgtcttcacacttgacctgcaaccaaaggatgctcaaagtcgggtaaatatatagtatctaataaatttctgtaattctcaattcttctacagtggcatatgctcattcgaagaatttgagtatgtcattctcaatttgagtatgtcatgtgtattatatttgacataaatatacaacttctaaaccaatatttttkgtatcattccactcagaaagtatccagtttaagacaggagaatacacaattataatgtttaaaaaactgggatggggtcaaaggcattggaaaaatattttaatatggagattacggacgttacagaagcatatgtttggttattacaatcttgaaagttagattyttatgcacatattatagaaagacaaaatttctgtggaaaatttgtttcctgatcaaattaataattattgtacttgtattaccaagggtaaataccaatgactaaagtaaacatcgtttatgtggttttctagatggtttcaaatttgaaatttagaggctggagactagcactacattttaaccactcttgtaaattatgtcaccaacatgctatccttactcacagatctatttttgaaaaattctagatggcttgattttaattttatctcaaatagttctgttgttgtagaacctacttagaaacatttaaggtttagtttccagaactttgttctaggaaactttgtttggtttcacttggattcctagattaaatttaagattccttctgtagaaatattatgaccacatatacaacatgtcaatgtaaatgtcaatgaagccatataataatagaaggattaaaaataaaacccacagggaattatgctgcactgaatcaaattgtcagcattaatgatcgcctccgtttacacccatatgtcattcctttcattctgtagcatcgtgggaatgagcactattagagtaatatattccaaaatagctcattatgggtgggggttgggaaagagaaatattatttcatatcattactaataaatttaattacctgtaccctgctagcagtacatacattcattactttaatatattaaaaatatattacctaaagccacagttaactaagtaatagcactgcttaatcttatgatattcactgtttttggtcatctttcactagatattctctgaagcaaattctcatttttgttttaacaatattattayctaatttagatttttaagatcaacagaacattttagcaagataattattaaagctaggcttctacatattttcctgtatgtaccattaaattattccccaactccccacaaattgcctaaaaaaaactcaaaacatttagatatatcagctatttaaccaattttattccaatttaattactaattacttagaaattaattgccagtttcatttcttgagaactccctcctaaaatcttttgcggtaatgcaatctggatttgttaagctatgtgcccagctctcattcagaaatctccctgcggaaacatcctggggatttcctgtctccctcttgcttggttttctctctcatttagtggcgcacatcttggtgtgcacaggaagtacatttgttgagacttttatgtttaatgtatttttatttaagctacacacttgatctrttatttgtctaggtgtaaaatgctgggcataacatcattttttcattatattctttctatattctttagcacccagtatcactggtaagaaagtcaaagccaatttatatcctaatcttttgtttatgactgttaccctaccctgaagcttgtagcatttgctctctgttcatatactctaaaatttctggatgacttgattggatattggtccattttcatccactgtgctggttactccatagactctttcaatatgtcaacttacgataattgatttgagaaatggtctcaaaatattttattgctcattcagttcccttcctctgttccaggaacatccatatttggttacccatcttccctggttgaatgtttaattttcttatcttttctttcttattttcatcttttaaaataatgtatcttctagaagattttttaactgtattttctaaactttctaaatgagattttagtttacattacaatatgtttcatacctaaaagatcatttttttctgcctaaattttccctttttatagtattttaatcctcctccatagttataatattttatcttggctttctgcagatatgaacaatagtccttttttctagagaaggagagctatcttcatcattagggtgtctgtttctttcaagtactttgtatgtttcttcctgtttgttgtggtctctgttccccatttttgtggctttactcaaacgtctaacaattcttagttgtaggctcatrtgtaaaagttgggatargaattgctcaaaagctcttaatacgtgctgtgagtcttattgccagtctccttcatagtaagatgacagatttggcttgactctccagctggtcagatatcccaaagagagccttctagatttccacctggaacaaaagccaggattcctccttgcaagcttataaacttttcttaaaactcttatttacatttcaatgacatttgaggaaagaaccagagcatatttgtccaaccaccatcttggccaagaattcccttttctttcttgatagtgttggcgctagagcataacttgcaaaattatgtaataactaaataattgttgagtgaataaatgattaatagaaggaatctaagaagttaaaaaggattatccttactacttatttgtgttttctttaggaggggttttactttaaatccaatgccaaagtgtctgaaagtccttaagaacttattgaatggctcatttgttgctgagaacaatgatttggttaaatggaatgaaaggctttaagaatctcccatttttttactggcaatacctggcacaactcagaaccataaaacatcttttttataaaagttgatagtactgaaggtacgtcatatttgatatggatatgaatgttctaaaaagttgcataaatatgagattatgaacaatttctctttcactttatactactttatcatttttcaactaaattatcgctaagaatttcagagtttagtctttcatattttgaggaactgagagagtttaatgaggagaagaccaactgaacagagaccctgaattatagtttgattcgagggattatgagagccctttagagacaacattggacctagcaattggcgcagtccggggaagcggggctctttacaggcaagacatctcatgctggacatttagccagtcctctctggaaattcatgactttttttggaaacttttcttcaattatttgttgataatcttttcccttccatattttgtgtcctttgcctttcgatgggaatttatgtcacttaaatattgggtattctggactgttcttctatttcttgacttttctactttctatttgttaatttttttactctactttcagagaggtttcttaaaattttgtcttctaatctttctattgaatttttcgcttgtgcacttatgtttctgatattgaatatattttgttgttgtttgagttttctgcattaaagcaacctgttcatggtttctgcatgttacaaatagctttgttttgatttttctccctgcatagtgtttcctccaagttgctttagatattttgttgtttgtttgttttgatctttatggcaggagcctttccacaggtttttctcatctttgactttctatgcattcctgtaagtaagggatttaaagcctgattgctcctgataaacacatgatgggacttctccactctgagctacattgtaagttgacctgtgtgagtattttattggggaatcccaatagtttttgtctttatcttttctgctgtagagtggatcaaattacccaggaaagacttctaatttctatctacaggaagggrtctagaagccagctccaagtagaagaaagagctgggggtgtttgcattcagtattcagtatgcatctgatgatgaatccccatgttgtcagtatggtacatacacacaactgtgtgtagcattccccagctgaagatcttattttccctttctagtgaatacatctccagatttttaggggaggagggacatgcagcagtgaaacatcagatatatatttggttctcagacatattctacctaagctgccagagttcagaaccactcccttcgtcttccttctaaaagtaatggatactttcaatgattctgcaagtgtaaattgggtttgtccctacccttccctactgatggcagtttccattcattcgtttatagtttccgaaactgtgccctttactgctcctgatttccccatccttgtggtttatatttttaagaatatacacccctttgctatcatttttgtaagtatgtcccagtaatctatcttaatgaaagactaaaatggcatatttttaatatttacttatttattatttttatttttccataagttattgggatacaggtggtatttggttatatgagtaagttctttagtggtgatttgtgagattttagtgcactcgtcacccaagcagtatacacttcaccatatttgtagtctttcatcccttgctcccctcccactcttcctcccaagtccccaaagttcattgtatcattcatatgcctttgcatcctcatagcttagctcccacatatcagtgagaacgtacgacatttgagtgtccattcctgagttacttcacttagaataatagtctccaatctcatccaggtcactgcaaatgctgttaattcatccctttttatggctgcatagtattccatcatacatacatacacacacacacacacacacacacacacgcacatatatataaaacacagtctccttatccactcattgattgatgagcattttggttggatccacaattttgcaattgtgaattgtgctgctataaataggtgtgtgcaagtatctttttcaaataatgacttgttttcctctgtgtacatacccagtagtgggattgttgaataaaatggtagttctacttttagttatttaaggaatctccacactgttttccatagaggctgtactagtttactttcccaccatcagtgtagcagtgtttcctgttcgccacactcacaccaacatctactgttttttgattttttgattatggccattcttgcaggagtaaggtagtatcatattgtggttttgatttgcatttcctgatcattagtgatgttgagcattttttcatatgtttgttggccacttgtatatcttttgagaattgtctatccatgtccttagcccactttttgatgggattctttgtttttttcttactgatttgtttgagttcattgtagattctggatgttggtcctttctcagatgtatagattgtgaagattttctcccactctttgggttttctattaactctgctgactgttccttttgctatgcaaaagatctttagtttaattaagtcccagctatttatctttgtttttgatgcatttgcttttgggtcctccatcatgaaatcctcgccaaagccaatgtctagaaagattcttccagtgttatctcctagaatttttatagtttcaggtcttaggtttaagtccctaatccagcttgagttgatttttgtataagctgagaaatgaggattcagatttatttgcctatatgtggctagccagttaccgagcaccatttgttgaaaagggtgtcctttccccacttcatgtttttgtttgttttgtcaaagaccagttggctgtacatatttgggtttatttatgggttctctattctgttccattggtctatgtgcctatttttatactggtaccatactgttttggtaactatggccttacagtatagtttgaaatcaggtagtgtgatgcctccagatttgttctttttgcttagtcttgctttggctatgcgggctcttttttgrtaccatatgaagtttagaactgttttatctaattctgtgaggaatgatgtggtattttgatgggaattgcattgaatttgtatattgcttttgtcagtatggccactttcacagcattgattctacccttccatgagcatgggatgtgtttccatttgtttatgttgtctatgatttctttcagcagtgttttgtarttttcttcatagaagtccatcaaccccttagttaggtatattcctaattattttattttttgcagctattgtaaaagggttgacttcttgatttgagtctccagttggtcactattgatgtatagaagagctactgatttgtgtacatgaatcttgtatccggaaactatgctgaattcttttatcagttctaggagcttgctggaggagtccttagggttttcaaggtaaatgatcatatcctcagcaaacaatgacagtttgacttcctctttaccaatttggatgccttttatttctttctcttctctgattgctctggctaggacttccagtactatgttgaagaggagtggtgagagtggacatccttgtcttgttccagttcccagagggaatgctttcaactttttcccattcagtattatgttggctgtgggtttgccatagatggcttttattacattaaggtatgtcccttgtatgcagattttgatgagagttataatcataaagggatgctggattatgtcaaatgcttcttctgcatctattgagatgatcgtttgattttkatttttaattctgtttacwtggtgtatcctgtttgtcaacttgcatgtgttaaaccatccctgcatccctggtgtgaaacccacttgatcatggtggattatctttttgatatattgttggattcagttagctagtattttattaaggattttagcatcatgttcatcaaggatatcaatctgtagttttcttttctggctatgtcctttcctagattcagtataagggtgatgctggcttcatagaatgaattaggcaggattccttcttyctccatcttgtggaatagtgtcgaaaggattggtccaattcttctttgaatggctggtagaattcagctgtgaatccatctggtcctggactttcctttgctggtaatttttaaattaccatttcaatctcgctacttgttatttgtctcttcagggtatccaattcttcctgatttaagctagaagggttgtatttttccaggaatttatccatctcgtctacgttttctagtttatgtgtgtaaaggtgttcatagtagccttgaattaccttttgtatttcagtggtgtcagttgtaatatccaccgttttgtttcttagtgaggttatttggattttctctcttcttttcttggtttatcttgttaatggtctctcaattttatttatcctttcaaagaaccaacattttgtttcatttatcttttgtatttattttttgtttcaatttcatttagttctgctctgatctttgttatttcctttcttctgctgggtttggatttggtttgctcttgtttctctagttccttgatttgtgaccttggaacgttagtttttgctctttcattctttttgatgtaggcatttagggctatgaactttcctcttagcaccgcctttgctgtattccagagtttttgataggttgtgtcattgttgttgttcagttggaagaatttttacatttctatcttgattttatttttgacccaaagctcattcaggatcagattactaaatttccatgtatttgyattgttttgaaggttccttttagagttgatttccagtttcattccactgtggtctgagagagtgcttgttataatttccattttcttaaatttactgaagctcgttttatggcctatgatatggtctgtcttggagattgttccatgtgctgttgaatggaatgtgtattctgtggttgttggatggaatcttctgtatatatctgttaagtccatttgttccaaggtgtagtttaaatcattatttctttgttgactttctgtcttgatgacctgtctagtgctgtcatggagtatgggaatcctccactattatttgttgctgtctatctcatttcttaggtctattagtaattgttttacaaatttgggaactccagtgttaggtgcatatatgtttagggttttgatattttcctgttggacaaggccttttaccattatataatgtccctctttttctctcttaaccactattgctttaaagtttgttttacctaatataagaatagctacccctgctcgcttttagtgtccatttgcatgaaatgcctttttctacccctttattttaagttcatgtgagtccttatgtgttacttgagtctccctaaggcaccaaatggttggtgagttcttatccattctgtggttctgtatcttttaagtggagcatttaggacatttacattcaatgttagtattaaagtatgaggtattgttgtattcatcatgctcttcattgcctgtgtactttgtttctttttcttttttgtttttgtttttaacttgtatttttgtttgataggtcctgtgtgatttatgctttaaagaggttctgttttgatgtgtttcctagattggtttcaagatttgttcctttcagcagttcttgtagtggtggcttggtaatggtaaattctttcagcatttgtttgtttgaaaagactgtatctttccttcatataggatgcttagttttgctggataaaaaattcttggctgataattgttttgtttgagaaggctgaagataggcccccaacctcttctagcttgtagggttcctaccgagaaatctgcagttaatctgacaggttttcctttataggttacctggtacttctgtctcacagctgtaaagattctttctttcatctcaactttggataacctgatgacaatgtgctaggcaaagatctttttgcaatgaatttcccagttgttctttgtgcttcttgtatttggatgtctaggtctctagaaaggctggggaggttttcctcgattattcccccaaatatgttttccacggttttagaattctctttttcctcaggaacaccgattattcttaggtttggtcatttaacataatcccagacttcttggaggctttgtttgtatattcttatttttctttctttgtctttgttggattgggttaattggaagaccttgtctttgagctctgaatttctttcttctatttgttcagttctattgctgagactttccagagcattttgcaattctaaaagtgcatccaaagtttcctgaattgtttattgttttttctttaagctatctatttctttgaatatttctcccttcacttcttgtaacattttttggatttccttgcattggacttcacctttctctggtccctccctgattagcttaataactaacctcctgaattctttttcaggtaaatcatgcatttcttcttggtttggatccattgctggtgaactagtgtgattttttgggagcgttaaatagccttgtttttcatattaccagggttggttttctggtctcttccatttgggtagcctctgtaagagggaatgtctagggctgaaggctgttgttcagattattttgtcccacggggtgttcccttgatgaagtactcttccccttttcctatggatgtggcttcctgtgagctgaaatgcagtgattgttgtctctcttctgggcctagctacccagtaagtctacccagctctgggctggtactgggggttgtctgcacaaagtcctgtgatgtgaaccatctatgggtttctcagccatggataccagtgcttgttctggtagaggtggtgggaggttcagtggactctgtgagggttcttagttttggtggtttaatgctctatttttgtgcggttggcctcctgcgaggaggtggcactttccagagaatatcagctatggtagtatgggtaggaactggcagtgggcagggccctagaactcccaagattatatgccctttgtcttctgctaccagggtgggtagggaaggaccatcaggtgggggttggggtaggtgtgtctgagttcagactgtccttgggcaggtcttgctgtggctgctgtggaggatgggggtaagattcacaggtcactgaagttgtgtacctaggaggattatggctgcctctgctgagtcatgcaggttatcagggaagtgggggaaagccagcaatcacaggcctcacccagctcccacacaaaccaaagagctggtctcactcccagcgtgcaccaccctgccaacagccctgattgtgtttccaggcagagggcttgaaaacttgccccagactacccacctctcagccttgaaagaaaagggcttggttcttccctgtgaagtctgcacactgggtttgtgccctcccctgagttttggccaggaggtttctcaccccattcaaattattacaaagctcaactagagatttccttctccctgtgggattttactccctgcttccctggccactctcctgacagatccctgtggtgccaggcaggaatggcctgctagggaacccagccagttcccagggcctttctgctgctccctctaccactgtatttcacttggctctctaaactgactcggctccaagtaaagtcggaaacttctcccacaaacagaacctcagcttctccagtgggagtgtgtgttcggtagaggagagtttccctttcctgtctccagagtgggggcactcacagtatttgggttgtctcctgggtcatgcaggagcagtctgcttccttcagagggtctatgggtccttttgggattgcttgcacctgaggtctgagtaaggagcagggagaccttgggtagtgcagggctcccaccagggtgcacacacacttggggtccgctgtcagcttcttggtttttatttttgactctcatagcatatgacaaaagcttgcacgtagtagacacttacctggtatttgtaggattgaataaatgaatattttaaacacatccaaaacgtagaactacagcatttgcacatgctacagatttatgcctttaacaaattaatgaaattaaatgtctctttcctcctccagtaatgcaacatatagataacttcatcagtttaaaaaatctatattgcaaaaagttaacaataatttgagtgagcattttatctatccctgtgttcttatctatccaacaaacacttattgagcaacaacaatgtcactaataaacaccaagattaatgtttgcgttttgttatacaacatgtctattataaactggacatcattcaattagtaaaaaagtcccttcaataaatttttatatattgagacttgttatttctcaaatcaagaacagattgaagtaaacatttctatggtttatgtgtcactaaatagaactttgatatatagactctcacattctattactaaatttaataatgcaaatggagttttagtttattgcttctgtataaatttcattaggtttctgaggaagctgtaaagctaattgtaatgtatttggaatttggttagaaacaggttgcttttattaatagttttttcaaccagaattatataaaaccactagattgtgatagatcagattcaatttatccagatagtataatatttccttaaggatgtaacattagagatgtaacataatttttgtattggatgtttcatcgataaaagtttatggatcagcaggcaatataatttgccatacctctccatttttcatttcagaaataaatcattgcttgtacaagagtatgacttttttatgttacagtttcacagactgtaattggttctgatttatcttaaaaagtgtaagatttatattcagataggtttattgaagtgtaaatctttaaaggatgacagcattatttttaatgtatatgatatttttaaaaagtaaaataacatactagggtacctaactcaaaaatagaggggacttcattgaaataaaaaagaaaaaaaaatacaggagactgcttttcttagctataaatctttgtatttatttgatcttttatatcatatgtatgttatttattaaaattaaaaattaataggaaataaagtagctaatacctattgagcactttctaaaagccagaaaatctgctaaacactttatatgggttgtcccatttaatcctcaaaatagccctatacattattgttcttcacattttatagattagaaaaataccaaggcttaatataaaaaataawagaataagatagtcatgttaacaatagttaatatttaatgaatacaagctatgtttagggcactgttctaagtgtttcatgtgtattatactatttgagcctcactacaagtatgaaataggtgcaatttttctttttttacaaatgatccaaaaatcacagggccaaaattcaaacacaagcacctgcattcacagcttgtgctaaaatacgatgcttggatcacttgcaaaactttatgctacaagtatgagaaactctgacacaaaatgcctccaacattaaggtcattaacagtgctgtttgtttagttaattcttgcactgctataaagacctgagactgtgtaatttttaaagaaaagaggttgaattagctcacagttctgcaggctgtacagatagcatgggtggggaggcctcaggagactttcaatcatggtgaaaggtaatggggaagcaggtacattatcaaatggcagcagaggagagagagagaagtaggaggtgctatacacttttaaacaaccaaatctcaggagaacttactatcacaagaacagcaagagggaagtccacccccatgatccagtaacctcccatgaagaccctcctccaacattggagattacagttcaatatgagatttgggtggggacayaaatcgaaaccatatcaagggcacatcacaaagtccagaagtagwgccagtgtccaggttgactaatgtgataatgtcataaaaaacctaggttcttcccatgtctctgtttagcttctctgctccttgtgggctttcaattaaagcaagctatttaaacttattgaccctaaatatattcaaatgtaactgagaatgacagcctttcagtgttggtgcaagactggaaacaggaagactgcatcatttccaagggttcatatctcagtacctcagtttcctcatctgcaaggtcaacataatgatattatctatgctgtcggtgttgtgaggattaagttgagatacataaagtgctaacaactgtgtctgtcacactgtaagtgctacagatacatttgttgttgtcattgttacgttattgtgacaatgtcaagaagaaattatggcactgccttagatgtggatttaattaaattgctgcctggtgggagttggatttcaagccaattcctgaagaagtcacctaatgggataataggtttacccttagaccaacagctgggacactctggagctgagggtagagtcaccttttctgaggcacaaggccatgcagggatggggcataaaaggagcagggtggcaacaacctttcctgtctgctatgaagatgacataaaggcacttagcacaggggtgtttagagaacagggagcaaggcagcattcttggagcaagtttgccttccatccctgccatggaactgctatttgcttgaaacacttattcctcatttaaaaaatggaacatcactcaaggttgttttgactgaatgagtgtagatcctgttcctccttttctacttccatggtgtccctcctgtagctgcacagtcaatgaacctcccaataagaagacacccctttccacagcccttttttgtcaatgatacacaagacaccatgctttcctgccaggccctacaaacaagtgaaaatgataatacgtgtcatcccgactttagagaatggttttaagaatcaaatatgataatatatgtgaataaatgttctttaaacctgtaagactgtatatagcagtgaaggataggggttaatttacacctacaagatttctgatctatctgctagggtgcttcattagccttttctgataatggattcatgacagttgtacattagaagctatgtggatcactaacccatgacactgacatcttagttataaaagtgagcaattttatagaacacatattagcgagaacattaacaaaatgatcagaatttgatgtttcctaatgggccattatatcctttttgttctttatttttaaagtaggttaaaaaatacatgaatctgtggcagagagattaatatcattctaaagagctggcatcagaacattaatagatatacagagtttctccctttgacctggaaactggaattctgagaagaaaaaaaaaaacaaacaaaacaaaacttagagaataacagctgtcaggaattacctctcaagaaatccaaactgccagccatggtagctcacatctataatcccagcacttatgagatgaggtgggaggatcacttgaggccaggagttcaagactaacctgggcaacatagcaagaccctgtatcttttaaaaaaataaaacccaaccaaaatttacctaaacattaacatttgttactgaagatrtgcctgatatcctaaattaccaaagcagctacatcaatgactgaattatcatagtttcaattctaccttaaaaattactatgtgaaagggctttcgatcaagaagtagcatgaatgttatagcaaacaagggcttgactagagctgaaaagagtttcatacccagaatgtagagtgtgaagaggtcacaattcagtaagtaatcatgtggcttctattgctgagtagtcacagttatttatagaaagaatattcattttctatttaaagtattctttaatattttggaactacttcacttattttcctacaagtatcaggatattaactataacatattaagcttctcaaatttggaaggtgactttttttatgtctgcctatgctttatgtgttgctttcatcaattagtgacgtctgcctataagactggtattgtaacacaggagactttgaataaaaccaaagttgtgtggcttattgtgttttatatgctttattgtaattaagggtttttttttttacagtagcaagtaatgaataatcattatccagctaatttgatcaagtgctaattttgaattctaaattggtcaaattaatgtttaaaagtgttcagtattaatatatgcacatattgagattcttattaaacaagtatttagttttattatttgttatgtatgtctgtttcagtatgactatagaaaataaaccttatgaatagatttttgaatctttttaatttactagacaatagttcccaaaaaatctttgtgatggtgaatcagatggcaaaaatgataggtgtaagaacaaagtatatggctttttgagaacatgactgcctttaggttatttcttagcgtccttaaccataggtaaatcacttggttagtatggtgtatcagtccattctcacactgctgataaagacacacttgagactgggcaattcacaaaagaaagaggtttaattggacttacagttccatgtggctagggaaattctcacaatcatggtggagggtgaaaggcacttcttacatggtggtggcaagagagaatgaggaagaaaaagtggaaacccctaataaacctgtcagatctcatgagacttattcaccatcacgagaatagcatgagaaagacaagcccccatgattcaattacctcccactgggtccctcccacaacacgtgggaattctgggagatacaattcaagttgagatttgggtgggggcacagccaaaccatatcatatggcatactacttgtaaaacaaccttatcaataaaggctgagataaacagaaggattatttattatataactgtgaagttaactgtacatatttaatagtatgtaattccccagtactttgtttccagaatcacatctaagggacaccaggttaaytgactaaattccaagacagtcaaatcattatttgttgatgattttttaaaatacatttcaattcaccttgctaattcatgtatcttttttccttaatttattaaactaatttatctgtgtaagcacagtattatttataggaatattgttctttttaacacatcatttaaaatattcaattgtggtaaaaccattttttcaaagtagcttagcagaacacagacaaggaggcaaccaattcttgattccaatgtcaagtctcattggctgtcatctagagcaaatttatatctatttttaaccattttctttgctatattcctttacttttttttttataatgtacttcctcactctaagatattcattttggttttctctaattcttttatagtttacattttatgtttaactctttaatatatgtggaattgatcattttattttaaagtatacatgttgttttatttaagaccaaataattcattcaataaatatttattacctgctcattatatatctgaccctgtggtaggcatcgcacataaatagatgatttcatgctagctcttgagagatgtaaaatcagcgggcaacacaggctacgaaaagataaattacactacagtgtggaaaggtccaaagagtaataaggagacatattgttgtgccaatggtggtttctccattgattagggttctgtttcttggtgcactgggatgctgagttcatagtaaactctctttacaaagcagggctcacattagtggataaaagcaggtgtgcggttgactatggcctggctcaggactgctgaccaaagcttaacaagaacaatagacaaatgtcactggggaagcactgttgctgccactctcatctcataagtccaaaaagagtagagtattgtgattatttcccagggagatattaggcatagaatggtcctcataatttttgtgacccattacttcattaaaaatctgggaaccataagaaactaatctaccaaaaatggatgcttttcttgatgctaaatttgtgttgaccagaaccctggttatattctcttgggaactagcctcaacattttaacccaccataaaaagctttgaaaagttctgacatgatctagtcctataaatcattgtcctgtaattagctgagattttgtttggctttttcctctgagcatatggctttgttctgaattgattttcagcaaataatcaatttgtcttatactatgcctgacaggtaagtcataactatcaccaacactaatgccataagttggttaacatttcctgtaatcttctgcatacatttatacatttctttcttttttttttttttttttttgagacggagtcttgctctgacatccaggctggagtgcagcggcgcgatctcggttcactgcaagctccgcctcccaggttcacgccattctcctgcctcagcctcccgagtagctgggactacaggctctcgctaccacgcctggctaatttttttgtattttcagtagagacgaggtttcaccgtgttagacaggatggtcttgaactcctggccttgtgatccgcccgcctccgcctgccaaagtgctggaattacaggcgtgagccactgcgccgggccgatatttctatcagatgcaagaattatcacaattcagatatagacactaaacaaaagccttcattttatgtaggattgtgtcaaaatgaagtatttataaaaataagaagctataattcatacatcccaagttagaacattttttaatattgagaataattacataaatagtccagaatgccttcagtaataattcctgatattttatgatgattaccttaacacatttatacatttacattaaattacagaaacatattcatttctaaatgttaataaataaatatgcattgtgtgtggtacattctattacaactctctgaatttcagagcagaattcatggtcatgagtaaaataaatgcccaaacaataccatgaattattaaatatctgtcaaaattcccaatggaattatgatttcataatttgaattctgttttttgttaattgtttataatgcatggatccgacccatggattccaggtttattgaatgttataaaattctcttttctcctgtgcccaggcagtcagtctttctgactaagctaacaatggcaatatttattccctttttcctccttgaaaacttttttctatagcatattctccaaaggcaatgatgactgaytcaagccatcaagttatatggcctcttactgcaaattgtttccatttgttggagggctccagaagaagctactattttgatcctgaacaaaggagaggagttgagaataagagggaaattgttcttcaagttaacttgcacattaacttgttcatagaagaggtggctgatatgttttcagcaccctttcacttaactgtactttggagtttttgcaattacagtccagacttacttgaactacatgtggtcgatattatgcatctgccgcatcgcttacttcatgcgtctttatagagagccacgtaagagcatatactgacctctgagatggtgtgaaacagtggagaggcaatagctaggaaaatctttgcccttataaaatttatgtcacacatgctactctattcattactttttacgtagccccatctgtccaggagtaaaatatccctgtagcagagtcacatatagaagccggaaatttaaaatatgactttccccaaatagagccaaatataccagagagcataatattttgctgaagactgcctcaattctaaaatataagaaaactatgagagttttaaattgaaatttttgtaacttgcctaaggtattatcatactgctactttgtgcttggcctgaaattagagaatgttaagcaggtaagtgaaaattaaactcctcaaggatatataaagagtgcaaattctactatttcaattctcctttgattcaagtttaaaattcaggcaacagcttmctaggcaaactgagatgctttttttcctcttaacgatgagactatgattagaacaccagccaaactgtgcttcttaagtctcactcactgggtctgtggtacaactgctggctttgtgcactataagtccttcttcagccaagtgttgccttagagtagagaacaatgactgtaaattgcctttgtattgtagatatgaacaagaaaaaaatatgcattcattcttagagatcttgataacctagtgagatttttcaatttataatgatctctatgtgggaagattattacattcataaggaggaaacctacatcatttgaagactccttgtgtgttatttaaaggtgaaatagggcagaacatagacaatggttgtggcctcaactgttgtcacttcagacaccttgaaacatgtagccataataatctactcatcgtctcttgaatattccacctggcaagtgtccctgtggatataatcctaacttatgatagaagagttgtttcatggctagagacaggtctgtgaaagggaagagcttttccactttggataagaatatttgtattcatctaggtgtttatggaaagcatagctaagtctaattttggggagaaaagaggatgttttaagattagccactatcagtaaggagaacaaccagaaattgaccagtgcctcatagaagaaatggtctccccatgatctgaaaatttaaaagaatgtaaatattgtttggaaaatttcaaattcaactttaattaaagaaaagctaaaagtgccttgcttcatttaaggaaattcaagttgttgagattaatctttgccagtaacaataaaatcattcattttctaatgaattaagtagtggcttggaagccctctgggctccttaaaacactacgaaagatacctccatgatgcagccatgaatttaaaaattttgaagaatgaaataaccctcattatcattcctcccaacaaattaaataggaatactacaaaatgatgttcatgatttagataagtcctttgtggccattggcccttatacactcatgaactatctggttagtaataattttgtttaggtgagaggcatacagctaatgttggcatgaagaatctgcaagattggtatgattacttaccgtcaaatcaaggagtccatggagacgtgaagagagacaatattcttaaaataaatgtagctacagtgggcagatgtgggagtttcatctcagttcatcccatcccccatagcaaagtgaatagcatccctccttcccacacagacacatcaaaatatgtatggaacactcatgactctaatggagagtcaggcaacaagaatgggctaacaaacatctcatggctacagtgaaaatccacccagggagttgtatttgaatcattgtctctgaaacttccagatcacaagaggctgtctcctacagccatccaagatggttagtcaacaacttgagattggtggtgacaaataagaacctgccagagaggtttttaccatcttcaactttgcaattaatcagaactgtttccagccttggtaattatttcagcaaaggaagcaattaagaaaaatgtcttattttgcagaggattcaaaaccaatcagctgccgcatccataggtcaaaaaataacaattttgttctatttattcagctatgcttcaaaaatggaataactaaaataattatatgttttttaaaaaatcctatcacattaaaacaacatttattatttttctgaaaaaagaaatctttttctacctaagttgaaaaataagcatatattcttcccaggtggtaaatttaacaaaaaacacacacamaaaaaattgttttgtgtaaattaggtaaaatgtgtgcatacatgcatacgcatgcatgatttataagtacaccaaactataaatgtaacacattagtaccagcatgaatcacaaaggtagcacaattttatagtcttaaaatcctaattagcataaaagggaaaacatcgtaatcaaataactattgattaacacaaagccggatgtgttgaatgggtttagtaattaactaaggaaactgcaggtgtttaaaactcatagattactaatgaaatgtatacttatttttaaaaaaattacctgtagctgaatcttatcatattcagatacagcaataacacacagtactcatagatgtaaactatactgtcacatagaatacttaaagcatcccttattaaatgtcttaggtgttcaaattctttgaagcttttgctaggctgttttcacaaggatatatctgattctgcctatggatctgacacactttaaaagtagacaaagcagtataaaggaaagcatggataatgaatgaccaactaagaaataatcacagataagagaagaagagcatgacatttaaacgaaaatgctttctagcaaactacagattttttctaacttcttactstgttttctctgcattccatcaaggtggtccagcagtaaaagtagacttcttcacatcactttgtgttataggactaatgatttcttgagttattggtaggaaactggaagcttttatttggtcccttccaacagaaccaaatgrcacggacaagctaactgaaggaatgaaattaggttgtttttaagcacggttcatttccttttagtattgtatactgtctcgattatttcgattatacataagaaagtatgcttatcctccctatacttatttattatttttgtttttaaattttttatttttaatgtttgtgagtacgtagtaggtgcatgtttacaaggtgtatgagatattttgatacaggcatacaatgtacaatacttcagagtaaatgagatatccatcacctcaaccatttatctttgctttgtgttatcatccaattattctgtattagttacttttaaatgtacaaaaactattgttgactgtagtaaccctgttgtgctatcaaataatagttcttattcattctatctaactatattttggtaaccatttaccatccccactacaccctactacccatcccagcctctgataactatcattctactctatatcctaatgaattccatagttttaatttttacctcccacaaataagtgagaatatgtgaaatttgtctttttgtgcctggcttattttttttaacataatgacttccagttccatccatgttgttgcaaatgacaggatctcattctttgttatgrctgaatagttctcaattgtgtatacataccacattccctttattcattcttttgttgatggacacttgttgccccaaaatcttggctattgtgaagagtgctgcaataaacataggagtgcagatatctctttgatataccgatgtcctttctttcgggtttacacccaccaatgggattgctggatcacatgatagcttttttttttcagtttctttaggaacctctgaactgttctccacagtggttgtgataatttgcatttccaccaacagggtacaagggtttctgtttctccacaccctcaccagcatttgttattgcctgtcttttggatataagccattttaactggagtgaggtgatatctcattgtagttttgatttgcatttctctgatgatcagtgatgttgagcacctcttaatgtatctgtttcctatttgtgtcttcttttgaaaaaatatctattcagatcttttgcctatttttaaatcagattattagattttttccaatagagctgtttgagctctttatacattctggctattaatcagatagatagtttgcaaatattttcaccctttgtaaggattgtctcttaactgttgattgtttcatttgctgtgcagaagctttttaatttgatatgatcccaattgcccatttttgctttggttgcctgtgcttgtagggtattactcaagaaatctttgcccacccaaacatcctaaagggtttccccaaagttttcttttagtagtttcatagtttgaggtcttagatttaactctttaagccattttgatctgatttttgtatatgcagacagataggagagtttcattctgctttcccaacacaatttgttgaagagactattctttctccaatatatgttctttgcacctttgtcaaaaatgagttaactgtagatgtacggatttatttctgggttctttattttatttcagtggtccatgtgtctgcctataccactctgttttggttaccatggctctgcagtataattttaagtctggtaatgtgattccttccattttgctctttctgttcaggatagctttggctattctgtgtattttgtggtttcatatacattttaggattttttttctatctatatgaagaatgtcattgatatttaataaggattgcattgaatatgtagattgctttgggtagcatgtacactttaacaacattgattcttccaatgcatgaacatgacatatcttttcattgtttgtgtgatctcttcagcttctttcaatgttttataatttttattgtatagatatttcacttctttggttaaattaatcttaggtatttattttatttggggctactgtaaatggaatactttcttgatttctttttcagtttatttgctgttggcatatagaaatgctactgattttgtatgctaattttatattctacaactttactgaatttgtttatcagttggagtctttaggttttttctaacataagattatatcaattgcaaacacgcataactttttccttaccaatttggatgtcctttatttccttctcttttcctattactctagctagttcagtggtgaaagtgtgcatccttgttgtattccagatcttacaagaaaggctttccatttatcttcatttagtataatactagctgtgagtctgtattatatggcttttcttaacgttgacgtatgtttcttctttacccaatttttagaggattcttatcatggaagsrtgtagaattttatcaaatgatttctcagcatcagttgaaatgatcacatggtttttatccttcattctgttaatatgatgtattgcattgtttggtttgcatatattgaactattcttgcatccctttatttaatctttacatccttatatttattatatttataatcccatgtttatgaaggaaattcaatcaataattaatacccttcataaacagacagcatcaggcccagatgagttcacaggtgaattctactagacatttaaagaagaaattatgctattgttctatgacctcttttagaagatagaagcagtgaggttactccctaagtcatactctaagaccagcattactgtaataccaaaaccagagaagaaaatgacaagaacaggaaactaccagccaatatctctcatgaacacatatgcaaaaatcattaacaaaatattagcaaattggatccaacaatgtgcaaaaagaattacataccacaccaagtgggatttattgcatgtatatgaagatgatttagtgttaaaaaatcaattaatgtaattgaccacatcagcaggctaaagaagaaaaattacatggtcatgtcaatagatgcagaaaaagcatttgacaaaatccaatatgcagtctggtaaaaatggtcagcaaattaggaatagagggggacttcctaaatttaataaaaacatgtacaaaaactctattgctaacatcatacttaataatgcaaaactacaatctttcccactaagatcaggaacaaggcaagaacgtcccagctcaccactcttttttaccatcatactggatgttctcactaaggcagtaagacaacaaaaggaaacaaaagatataatgattggaaaggaagaaataaaactttgttcacagatgccatggtcatctatgtagaagatcaacaaaaacaacaataacaaactcctagaactaataaacaattataacaaggttgcaggatagaaggttaatatataaaagctaatcactttcctatatactagaaatgagtaagtggcatttgaagttaaaaacacaataccatttgcagtagcacccccaaaatgaactatataggtataaatttaacaaaatgtgtataagatctttatgaggaaaactacaaaattctgatgaaagaaatccaagaaataaataatggagagatatttcatgttcatgggtaagaaggctcaatattgtcaagatgtcagtctttcccaacttagtctatatattcaacaaaatcttaattgaaatccaaagttgttctgtggatatcgataaactgtttctttctttgttttttacttaaaaaatctgttttattgaggtgtaatttatatactataaaaagtacccatgtaagtgtacggttggatgagtttttcttttcactgacataatctttgcaaaagttggataagttttgcaaaaatataagttttgtaactatattatatgggtctatatttggcctttgaattgataaaggcaatataatggaagccaagatagttttttcaccaaatgatactataacaactgggcaaccacttgcaaaataacaataatctagacatagacttcatactcttcaaaagaaataactcaaaatggatcacatacacaaatgtaaaatgcaaaactatatactcctagatcatcagagaaagtctagatgatcttgagtttggcaatggcattttagatataacatcaaaagcacaatacataaaagaatgaattgattaaagtataataataaaaaataataatcataaaaaaaagaatgaattgaaaatccggacttcaattaaattaaaaactccatggccgggtgcggtggctcacacctgtaatcccagcactttgagaggccgaggtgggcggatcacctgaggtcgggagttcgagaccagcctgaccaacatggagaaacccagtctctactaaaaaatacaaaattatctgggcatggtggcgcaagcctgtaatcccagctactcaggaggctgaggcaggagaatcacttgaacccaggaggcggaggttgccttgagcggagatcgcgccattgcactccagcctgggcgacaagaacgaaacttcgtctcaaaaaacaaaaaaacaaaacaaaacaaaacaaaaaatactcctggccgggcgcagtggctcatgcctgtaatcccagcactttgggaggctgaggcggtcggatcacgaggtcaggagatagcgaccagcctggctaacacggcaaaaccccgtttctactaaaaatagaaaaaattagccaggcgtggtggcgggcgcctatagtcccagctactcaggaggctgaggcaggagaatggcgtgaacccggaaggcggagcttgcagtgagccgagatcacgccactgcactccagcctgagcgacagagcaagactccgtctcaaacaaaacaaaaaacaaaacaaaacaaacaaaccaaaaaaaaaaaaaaacaaaaaaaaaaaacctcctgctctgcaaaagacattggcaagagaataagacaggccacagactgggagaaaatatttgcaaaataaatatttgataaaagagtgttgtccaacatacacaatgtactctgaacaataaaaaagaaacgatttatttagaaagaagcctaagacctggacagactcctcaacaaggaagatatgtagatggaaaaaagcacatgataatatgctccacgtaacagttcatcacagaaatacaaattaaaacaacaacgtgatgccactacatacctattagaatggccaaatccagaacaccaacaccaccaaatgctgggtaggatatggaccaacagaaagtctaattcaatactgggtgtaacgcaaaatggtacagctactttggaagacagtttggtagtttcttaaaaaactaaacgtactcttaccatatgatctagcaattgtgctccttggtattaacacttgtgtccgcataaaaacctgcacctagatgtttattacagcagctttatccataattatataatagacatatgatatattatatatatagtatctttattcaacttttaaactttgtataactgaagtaacacagtatttattttttctataagttgtttttgtcaacattatgtttcagagattaccctttttaatgtctatgtaggcctactgaatttatttccacttcacatagcatggattgcattcatacaaattcattaatttttgatagacatttagatggcttccaatctaaatttgaaaataaactactgctatgaacactattacatgtgtacacaggtggatgtgtgacaaagcaaggataaatgcagagagttaaattgcagaatcatagcatatgctcattttaaactgctaactgctgccatattgttctgtttaagattggccgttgtcctgcatatgagtgaacaacatgccacgtttggacaataacaaataataccaagtttgatcacttaccacagcattgctaattttatcagatttataagggaccgactttgtactttattgatcttttctattatattttttatttttaattattttctgctcttacatgtacttctaatatccttattgttgtcttttaagatacttttcatcttctaacacaaaatataatttatttcttgttatatttatattctgaattgctctactagaatttagctccactagagcataaattcttgcctgttctgttcatatattaattgcaaaccccagaacagtgtaggcacaaatatttgttaattaaatgtaaatatgttaatcttttattctaacatctttagtcttgttagtctttaaaaatttttaaactgggtgctcagctcattaatttcagcctttcttcttttctattataaatattaaatgctatatatttttcytaaatgtcatttaatgtattatttctataagtattacttgccatgaaaaagaaatctgtattatgtactttggtgctatatgaattaaccatttacttaattattttaaaaactgctcactaatctttgtaagaattaaagaatttcatttgaatttgcragattgtgtttttaaaaaatttcttcctttctttttatatttattgcctcacatgttcaataatgaagacttttacctcatcaactcagttatcttgatatacaatttcttactgcaaaagcaaaataaattcttctttccctttaattactcatttttcaagtaaggtgttattttaatagctgttttaactattaacaattgagattttctgcgtttatttttaagtattatggaatcatagattttcactgattcagtgtgttttagtaggcttcaatcattccttttgatgctcaaattattacaactttgggcaatgatagagccttcagagtggctcctacatcctttcaatgtgactcaagactttgtaaaagttttcaggctttcaagcacaaaaatctaccctacactccccttgtttgttccttgcacctaacctagattgggcatttctccagggaagacctggcgctttttagtgaggaatggtatcaaacagcaaaactgaagtgctcattgctctgctagagcaacattgtttccgagccatttcagtggacagggatcacaggacacacacacacacacacacacacacacacacacacacccttccttctatacaattatttttaatcatgagtgaaatttgatattttcagtttaatttcaataatacggtatttacatttattttctttgatattataactgtcttttctcttacactgaaaatctttattaaatcattgatgtgattacttattgttttaaccctcaatacaaggaaaatgattttaaaataccaaactgatataaatacactagtaaatactgttttggtaccctgttttcatccccttgacaaagccaatgtgacctctcatcagctcctgtagtgattggctgctgatgtctccrggggaacccttcctgcctaggaagttagctcgggctcccatccctgacagcaggccacagctgactgactgacataatagtacaaaaagttagcccccgaaaccgcaaaagccagtgccctttggtggggaggaggagaccactgagtcatggtttaagatccagagccctccactgaaggtcagatcaaggacagactacctgagatcagatccagtttcttttcatccctccctcacaagtctttcttcaagagcacttcctcaaaaattcacttgcaccaaatctcctgtgtcagattctgcttctaggaaaccctacataagacaactacgaacaatgtaactccagagggaggtttgagatttcatttttttttttgcccatagaatgcatctcattaagaatatataatcaaaatgccatattataaagtcactttaaatgctttctrtatgtgtgtatagtaccagacggatatgcaattgggtacacttgggttttatttttaatttaaaaaatgttttaataatttagattttttaagaatattgcacttatgacccaaaagtcgtaactaggaaaactaagaaaactcttatctgcccccaatagatgtcattaattatatttttctccaaaattatttattgtatctagttttcaaattgatttgcatagagttgatcgtattaaactttattgataatgttacattgatttatttttgttttaaatatttctcatttttctttttgatttcttctcaatgaatgaagtcttaccaaaatgtaaaagtttttaaatgtggaattcttttatacatttttttgctattgatacttattttaattgcattattgtcagtccacattatctatgtaatataattttcataaatgcttcatgtgtaattttataatgtataaatgtatattttctaatttaggggcccagggttctagctgcatgtattattagatcaaacttgttagttattttgttctaatctgcacccctaatatttttgtttcatctgacaaatattgatggtggacttgacaattactacacacagttctgttcatttttgtttcctatgtattgacactaatgtactgtatacacagttttcacagtttttttattattatgtggggattctctttatgtttttccataaagtctattttgtctgatactagtataattatatcacatttatacctttattatgtatttttctatacatttactttcaatacttctgtgtccagatgcttaaatgagcctcttgtaaatgacacatagctgaaatttttagttgtagaattagtcaaataaatatttattgagattattcatatatgtgttattgcttctaccatctatcttttgctttctattcattgtgatttttaatgtttttttattcctgacactatcattatattttaaatttttcatttattctctactacttcaaaatcatatactcattttacttttattctaataaaacttcaccctaaacttttaccacccacatttacatttaaaattaatcattactgctaccctccacctaaacaatactaaaacctcaccttccttccatcttgcatggcactgatgagcaacttttaattccaccctgtttttgcctcataagttaggcattatttttgtctcatatgaataatatttatgggaatttgcctatcttctaggaccttctttcttcctgaaatacacttaggaagttccattggtggtaaatagtctagattttatttgtctgaaatgcttttgtttcatcattttaaataaaagtttaatcagatatatatctatacgtatatatttctgagttaaatcagcaagagagtaataggttcttgcttccattgttgctgttgacaaccacacttaatcaaacattcttttgttggcaagtttttctcttgactgcgttttaataacttcttttttttaatttaatatgttattattttactgtagtgctctggatgtgaaaatgtctaccattcattaagtttgaaaattcttcaagaacttttttctaatattgcctcctactcattttcttattctcacctccaaactctgatcagatgtgtatcaaaccttctcattctattctccatgcctattggcctttcatgttttctgaatatatagctctttgtgttgaattatgggtaatctcttcaaatacatcttccaaatcattgactgtctcttaaatctgtctaatctgctttttaacctatctattgatttcttgcttcaattatgtttttaatctctagaagttaaacatacctgtttattttaatattctcttccctttagtgatttttcatcccagtttttatttttatgaacattttaagggctgggtatagtggttcacacctgtaatcccatcactttgggaggccattgcaaaagggctgcttgagcccaggagttcaagacctacctgggtgatatagtgggacttcgtctctaaaaaagccttgaaaaatcagccaagtgtggtggtgcacaaccgtagtgtcagctacttggtaggctgaggtgggaagatcacctgagcccaggaggtgaaggttgcagtgaaccgagactgagcctctgcactccagcctgggtgacagagcaagttcctgtctcaaacaaacaaacaaacaaaactttttatgtaataattctaaaatctaaagttgctgattcttaaattgtgctgtttacatatttcctgttggctgtttttcatataattttttttccttttggatttggcaaatttttactatgggaaattattagaactatttagtcttaatctttggaaaacctgagggatctagttttaagataaattactttagaaaggaatgtttgaatttcccctgataagtcaggaagaatgcttgaacccattcagaattccctttcttatggtaaatttcttctcagggaattttaccttttcctaaaatcttagctcgatttgaatactccaagagaaataagaaaaaccaagagagaatacagtcacggaaaggagaatgttttgagaaaaagtcaggagttagtaatgtcaaaaactgctgaaaggcaagaaagataaatgccaagaagtctgtgtcatatatagtgatatctgtgaatttagccagaatagctaagagtcacgttatcatctgaaagccaatttgctaaaatttcatctttcctttatttatgaagttaagtttcactggatacaaaattcttcactgataattgttttgtttgaagaggctgaagatagggctccaatcccttctggcttgtgcggtttctgcttagaaatctgcrttaatatgattggtttttctttctaggttacctgatgcttttgcctcacagctcttaaaattatttcctttgtcttgactttagatacactaatgactatgtgcctaggtgattatctttttgtgatgaatttctcaggtgttttttgagcttcttatatttagatgtctagatctctagcaaagtcagggaagttttccttgactattccctcaaatatgttttccacaccttcagatttctcttcttcctcagaaataccaattattcttaggtttggttagttaacataatcccaaacttcttggatgctttgttcctttaaaaagtttttcttttctttgtcttcgctggattgggttaattcaaaaacctttctttctttctttctttcttttttttttttgagctctgaagttctttattctacttgttcaattctattgctgagactctccagtgcattttgcatttctctgagtgtgtcctttatttccagaagttgtgattgtgttttatttacattatttatttctctggagatttttctttcatatcctgtaacattttttaaatgtctttaagttggcattcacctttctttggtgcctcgttaagtaccttaataatacaccttctgaattctttttctggtgattcagcgatttcttcttggatccattgctggtgaacgagtgcgatcttttgggagtgttaaagaaacttgttttgttatattaccagaattctttttctggttccttcttgtttgggtacactatattagagggaagatctggggctcagtagctgctgttcagattgttttgtcccatggtgtgactccttcatgtggtgctctccccctttccctargaatgggacttcctgagagctgaactgcagtgattgttatttctctcctggatctargctcccagcagagcctcctgggctcaaggatggtactgaggagtgtctgcaaagggttccgtgatgtgattggtcttcaggtctctcagccatggataccagcaccagccctggtggacgtagcaagggagtgaagtggactctgtgaaagaccttggttttatttttgtttagttttctggttttgtgtttgttggcttccagccaggaggtagagctttcaagacagcatcagcaacagtagtataggaaggatataggcttgccctagggtcacctggataagtttctcaggtagtgggcaggatcatagagctcccagaggattacgtcctttgtctttgcctaccagggtgggtagagaaagaccttcagatagggagcggattaagtgtgcctgaggtcaaactctccttgggcaagtcttgctgtggttactgtgggggttgctggtgtggatttcaggccaatggagttatgttccaaggcagattatggctaccactgctgcagcatacaagttgccaaggaagtgggcaaaagccagcagtgacaggcctcactcagctcccacgcagcaccaaagccccgactcactctcaccatgtcaccgtgcccacgcaacagcaccaagtttatttccaggcagccactaagcagggctgagaacttgccccaggctaccagcttcctcactgagaaagcaagcagggctctcaagtttcacacmtccccacctgccaatggcttctgtgctgtgtctgcattcctggttcactctctcccccagattctgtccagraaaacttcgcattcagtcaaaattgttacaaagttcagctggaagtttccttctccctgtagtctttccctaatttgactggcgagacacaggaccccagtgagacaaagtcttaagtggcttccctggggactgagagttccyacagggcttctctcaatgcttcctctagccctatattttcctcagctctctaaattcatctcagctccaggtaaggtcaaattctcccatgatctggaccttcaggttccccagtgaggatgtgtgtttggaggtggacatccctcttccacccattgggcactcacagttttttggctttctcacagaacctatagcctcaatctgcttccaccaaagggtctgtggattctcttggctttttgttgtgttcctgcagtagaccttggagcaaaagttcatgatatgagtttccatcaaaagttcatgatgtgagctcctgagtgggacccacaagttagttgtgcctgctgtctgccattttttcctgccaacctctcaaaattgcccttgtttgatgataggaatgagcagaagcattgtcatggtggagaaggaccctggtgaagctttcctgaatgtttctctgctaaagctttgactaactttctcatatcacttttacaataagcagatactattgttctttggctctccagaaagtcaataagcaaaatgacttgaacaccctgaaaaactgttgccatgacttttactcttgactggtccactttggctttctctggaccacttctacctcttgttagccattgttctgattgtgctttgtctttagaatcacactggtaaagccatattttatctcctgtggcaattcttcaagaaaatgcttcaggatcttgatcacacttgtttaaaatttccaataaaagccctgctcttgtctgcagctgatctgagtgcaatggttttggcacccatcaagtggaaaatatcctcaactttatttttttagtcagaattgtgtaagcagaaccagttgagaaatctatggtgttggctatagtatgtgctgttaatcatcaacccccttcaattagggcacaaacaagataattttttttccttacaaattgatgtgaatgatctgctggtatgagcttcatcatcaacactgtcttgtctcttcttaaaatgagttatcattgatgggcatttgggttggttccaagtctttgctattgtgaatagtgctgcaataaacatatgtgtgcatgtgtctttagagtagaatgatttataatcctttaggtatatacccagtaataggattgctgggtcaaatggtatttctggttctagatccttgaggaatcgccacactgtcttccacaatggttgaactaatttacactcccaccaacagtgtaaaatcgttcctatttctccacatcctctccagcatctgttgtttcctgactttttaatgatcaccattctaactggtgtgagatggtatctcattgtgattttgatttgcatttctctaatgacagtgatgatgagcttatttccatgtgttttttggccacatgcatgtcttcttttggccaggcacggtggctcacacttgcaatcccagaaatttgggaggctgaggagggcagatcacctgaggtcaggagttcaagaccagactggccaacatggtgaaaccctgtctctactaaaatacaaaaattagccgggcatggtggcatgtgcctgtaatcccagctactcgggaggcagagacaggagaattgcttggacctaggaggcataggttgcagtgagcccagttcatgccactgcactccaccctgggtgacagagcaagacactccatctccaaaaaaaaaaaaaaaaaaagtcctcttttgagtagtgtctgtttatatcatatcctttgcccactttttgatggggttgttttttcttgtaaatttatttaagttccttgtagataatggatatttgccctttgtcagattgataaattgcaaaaattttctcccattctgtaggttgcctattcactctgttgatagtttagtttcttttgctgagcagaagctctttagtttaattagatcccatttgtcaattttggcttttgaaatgccctccaatgatagactggataaagaaaatgtggcacatatacaccatggaatactatgcagccataaaaaaggatgagttcatgtcctttgcagggacacggatgaagctggaaaccatcattctcagcaaactgacacaggaacagaaaaccaaacaccacatattctcactcataagtgcaattgaacaatgagaacacatggacacagggagggaaacatcacacaccagggcctgttgggggttggaggctaggagaggaatagcattaaragaaatacctaatgtagatgatgagttgatgggtgcagcaaaccaccatggcacttgtatacctatgtaacaaacttgcacattctgcacacataacccagaacttaaagtataatttaygaaaaaaawawatatatatatacacaaattaaaaaaaagaattatctatttgtaaactgtggatttctttggagcattgtcctcataaactttttgtatagcattaatgatttcagcattcttccacccaagcttcactgcaaatttgttgtttgttcttgtgtttattttaccagaatttatgttgctctgataggggctcttttcaaactgatgtcttaacattctcattgcttcaaactagagcctgttcagacatattacaacaagttagtatgagtttattttggtgcaaaaaaattgaaatccatgcataggtttttttttaaaataatagcattttccatgaactttttaaagatccctctacctgttaaatggatggataaggcttcattgctccctgaagtgatcgtatctaaggaagtaagccccaaaatgaaaataaaaggctcgataacctttagctctgactcttgtctataattaatggtaaagaattgaaaaattctagcaatacctagttgtaaagataagaaagaggagatcaaaatgatcagtggccactcctcaatctgtaggctgctctttatagccaacatcagtggcaaaagtccaaatgattatgacttgctcataaattgcaggataaatttttttagaaagcaacaggacatgacagacactcctaatgaaaacgtaaataccttttaagcctatctgtaagagatgcttttaatgtagaaaaatatcatataatttttgatatatttgaactaattctaagcctttgtattacaagctccaaacacttaaacctatcaatcactctatttgctctttattatatagatccatagtgctctatgaaatatttagtgtttcaggaaaaagaaaacaattagaaaaataagacatttgccctaactattctaatttatattctgagacgaaaaaatatttcagaagaagttcaattggcatgaattctactatataaatataagatcaaagcacactctgtaaaattgaacaaaatctggtttcttaagtatatatgggcttctctttaaggtcacgttttcacttacagatgggctgacttgtgatggaaacaaaagtgaaaagacaaagaaagtagatggctatataaaaatgaatgcaataactttttgagctgcaactaaggagaaaggcaaaaaaatgattattgttagaagttaggagtccatttctagaaatagaaagcattacatttaaattagacacatacccaaaaaaaggagattattaaaagagcaaagaataataatagagagactagctccttgactaatgagaaattgtatagtggtatactgtaaagaagtgaatattgttttttttttagaacataagctgattctaatatagcaaccacacttactatgaataaaatgtgtgcaggcatatgcacatacatagttaatgaacaacatttcaaataattctgggtatcttttttaattgaaatatttggagaatatgagagcaagtttggaattcacactaatgaaatgaaagagctcaaacatttaatgtttacttaaatatattttagggaaaaggtagataccatggaatacatttcttttaagtcataactctgtgaatatataaggtayacctcacacatggttatcaggtgctttttctttttctccttgtccacccttaaagccaccatttaatgttcttactaccttgactcctaaactttatgaaaaaaaaaaaaaacaccaaatcttctcctcttagtttctttatgtccttgtaatccagttttttactcccagaactctcttggaattgcattttgtaaggttgtctattgccccaataataagaaaatttagtagtcttttttaggagactttgagtctatgacgttacagacttacctgaaattctcttttctattgtccttgaagttctgaacactgcactccaatatatgccattctggcatattgattgttttgagttaaagaggaagtgggaagggggagagggagaaagaaaaaaaaagaatgagtgagagagaagaaagagagagaaagamggamggamggaaggaaggaaggaaggaaggaaggaaggaaggaaggaaggaaggcaggcaagcaagcaagcacactccaaccttcctaaaagcaggagataaaactcccatgtggaatgtcttctcccctccactggaagaaggaagaccttcttatcaccagagttgaagagtcgaggctgagagaaatctccaccaacaacctgtattaaactaacccttatcttcctagccacttctctgtaawcaactacctcagcccaagcccccttgctttgttacattttcacaatttaccactctttttccaaataagtatataagttgtcaactctaattgcagctttgtgtttttatttccttatgatggctccatgtcaggtaaaactgataataaatttgtacgctttgctctcctgttaatttgccttgtgtaaatttaattctcaggcccagctaaaaactctaagagggtaaaggtaaaattgtgccttccctacaaccttaacatgctgtcttgtctctaggctgccctcacacctcccaaaccctcctacttggttttatttttgggtttctctgttttctctttgccctcttcttccttattctacaaactattccttgatcatcacgtatgtaaagcaggaaaaataattttttctctacccttctgagttcttagctgggactctttttcacaaaaggcagattaataagaaacttgaaacaagcagaattttattaacatgtatatcttatatatatatatataggtgatactcaggactaaaagactaattcttaaataggtggcttagaattcaggcttaaataacrtcttcaactgaaaacaaagaaagaagagtgtggggcaggctagttataggaaacttatgacagataaaaactagttagtaaagttcattatgtagatttctctgatgccctctccaggatgacaaaggtctaaagtaatctcaggtagttaactttagtttttactggtagagaaggaaggagggacatcattgtaaatttatgycttgcttttaggcaaataggaaaaagacagagagatctgtatatatctgcttcttctcagttgccttcagctcaaaaaatcctcatgccaaagtggaacattttggggtggcatattctgctaccctggacatatgcttgcataaatacaaatgccattgtttatatctttttaactctaaagacaaaagcaaagacaccagttgtatcagttgtcaaccttctcaactgtgatgtgcttaaatcatcacacagtagtctatttccaagaagtaaaagagaaatggcatttgaactactgacattatttttaagattaattcattgatttatggtttagcattaacccattgtattagtctgttctcacactgctaataaagacattctagagactggataatttataaaggaaagaagtttaattaactcacagttcagcatggctgggaaggcctcaggaaacttacaaacatggtggaaggggaagcaagctcatccttcttcacaggagagagaagaatgagaaccaagcaaagggggaagccccttctaagaccattaaatcttgtgagaacttactcactatcactagaatagcatggggaaaaccacccctatgactcaattacctccaacaggtcccttccaccacatgtgagattatgggaactacaattcaagatgagatttgggtgggggacacagccaaattatatcacccatgtatttcaaaactacacactttgatgtggtaactaaaagcttcaacaataaagtgatttgtgtttctttttctgtataaaaygttattttctgtgtggtgtttcctttgatataccttgtatagaaaactgagttgtcatgtggtaagtttaaaaaaaaatgtttctaatctagtactgaaatagatagaaatcagacacaaactttagataaaatgttacagtgtaggtgtggaaagggtgtgatacttttttccccgtcgaaagggtcacagtccacactcctaaaacaaaagagaggttaacaagagaaaagcattatagatttattcaatcaaagttttacatgtcatgggagacttcagaaatgaagacttaaagattcagggaaaactgtctatttttatgttttgatttgatgtagaatgcacaaccatgtagaaagaagaacagactcaggcatggtggctcatggtcctagcaatggtcctagctatgcaggagtgggaggcaggagaatttgcttgagtccaggagttcaaggatggaatgagctatgttctcaccactgtactccagcctggtcaacagatggagactatctcaaaaataaaaaataaatatgattgaaccaaaaaagtaggacctaatggtaagagactgaatggggaaacccaacaagacctgtctgctcagattcttcttggcttctctgtgtggcatttcttcttcctaggtatagggtaagacctttctggagtaacagtcttatgtctacctttagacaaggtaagtcagagaatttctttattgctagctcttacacagaaaggcaagtgatagagtaatatttctagattttatggccagctgtgggagaaaagggttctggttcgttctggttctatgacctgtcttagggaagaggaatactaatttctatggcctgccttggggagaaaggaaagcaggagaaagaagggcagaagaaggttagaaagagactttccttctgaagttcttccagtgtccttcatgttcaaagtactcaacatgccaaatcactatatttgggggtgtcattttcagagctcccacacaaaaaacttaagaagtttgaagtttaagtataatttaatgttatttatattctcattcaaattttaatatagtcattgtgaggaatagtaccatttataaatatgttatagttccaacaaatttaatgatacstatgctgaaaggttttatgagtgtaacaaatatgtatgattagttcataaattgactcttgttttatttgtataatataaattttagttaaagtcatactgaagtgaactcacagtctgcaatargaaaggtcgctgggtaagaatgcttaaggaatggaaatcgctatgaattttgagatcrtgctagttcatctcgaacctggtgaattctattaagatgagaaataatgtatagttcttctgtaatgagcacatctaactgtaagaaattaartctgatgaccaaaaaagggagcaatcagtgtgcatctctgatrtttgtgtgcaggtaaattgccttgcgttaaactgaatttggtagctgaagcaattatttctctataatattttcccttcaragagtaactgcaaatgatacargtagcaaaccaacaaccaaaaaaatgacctaaaygttttattatcaataaagtgctacaactgtgaaggtaactgaatagaaaaccaacaatcaaaaggaaaaaggcataacawgttttattattgatataatttgaggcatacttataatgatactttgaattccttgaattgaagaaaatcgaaaactgcatagtaaccctgcctacttatatgcactgggaatgttactacccttgtgattcacttaccatatacagcagtgtaaarrgagggtttccctactgtccttttcagagagctccaccctgattactttcagtgccacccatgtgtaagttcaaggctttccatttcccactagcttcctctaagttttcagagttccaacctcaatttcaggcatttaggtgtctccttggcaactgaagtggacactgtcctcaaaggaaccttggaatgcactgacgtgtgtcagttgtgctgcatagtctgcgggcagcctctgcacctctcagcaaaagtcacgtacggaccctgctccaacatggccccctggcactaagacagagctcactgttggagggagtggaggctggaaaataaacaaaagctgactctgctcctgcatccccagctaccctgcagagcagtgtccttgcccggggactgctttggcctctctccatcaccactacttcttctacccaatctacatgggtggttgcagtctttggattatttggaagtcaaggtcctggtccctaatctgttcttttcaatctattgtttatgaccacaacattatgatcttagcccttcatacattaacaccccagaaatactaaagggcatctcttaaggatcaaaaaccaggctattttttccattaagagctctgaaagtgtattttgatatacataaaagttaaggtttgtcttctttgttcttgtgattgactgtggtgccattttcttgaaacaactgaggaggaaggacctggctgtcttcagagtataaggaatgatcagggctttggagggggaagacagcaagtaatgtgagagagtgccgcattatagctaaaagtaaacactgcacaggattacatcccagctccaccactaactagctatgctaccatggacaaattaaattacctcactgtgacttacttttctcaccaatattagtttctcatgactgctttaacaaatcatcacaaaattgatagcttaaacctcagaaatttattctctcactgttctgaaggccagaagtctgaaatcagcttcactgagctgaattcaaggtcttggcagggccaaactctctctgaagctttagaggagaattcttcctggcgtcttcccacttttggtggctggcagcaatccttgctggctgccacatcccagtctctgcttctatggtcacattgcctttgcctcttctwccttgtgtctaatctctctctgcctccctcttataagaatatacacgattgcatttagggtccactcagatagtccatgatcatctccccatctcatgatcctaatttaatcacatctgctcagtcctttattgccttataaggtaaaattcacaggttccaaggattagaagctaagtatcattggtggagrcaattattcagcctgctataaattagcttgatcattaaagtgcctacatgaacattcaagaatataatatgtgaaattcacttagaacaacatctaccatgccataaaagcattcaacaatatttatcctatgatagtgatattcatgatgttgcagcaacaagaaaatgcagacaaaagtttcaaggtagaaattatttttaaataaatgtatatggaagatctcatgtctggattttttaaatatatgttgcccttaaaatgttaatagtaatcaaaggattatctccccattgaataactataacccaatagtttaggcatataatacatgcagccacttggggctttgtcttttgttacytttcacttgaaattgaaatcactgtagcaatttcatctaccctgaattcttcctaaggtcaaagtcaaagacgtgatgtaatacaatttcctcattttgctcttttgtctcctacccacctaggacaccgatctaatgacattcaatatctctgtacatcggtcatggtggagagaacatgggcctggttgtgtcagaagagtgctgcctccctcagcccatggcatgatggacgattacacrtacgtctctgtcacaggctgcatcrttgacttccagtacctggaggtcatccacagtgctgtccaaatactactctctgtaagtgtcacttttgtgtcattatctaatcagaactcttctttgctggcatttttttctccacayctacctgatagaaaatgccacagataagcacacagagaacatccaacagaaatagaagcaattatggtaccactagttatacctgatggcaggttacaccttttttctcttggtatctagacattttgtatttagaagcagttagtgactatcatttctaacttaagatacagtccacactattcaatgaaacagtatcaccatccaccagaagtggtcccttttcacttaactacctcaggctcttctactaatgcattcttcgactaatgcacctcagttccagagaaagaaggatggaaacacccacagccaatggcttgcttggtctaataaacctgacatttcatttattccttaaaaaacaaatcccactggagactcttcgcattttagtgcctaaaatctggcatcagaatacaattccatatacagaaacgagaaggaaatgatgtgattagtccacagaaggttaatgtgccagggattccttaaaagtaattttattccaccagactgccccactcacagtttgaccacaatgaagagtggaattaatttaaggatgtataacatcatcaagaacaatgttcctttcagacccgaaaaggacttatcatttagtttgagtcaatatccaataaagccattctcaacccactcttcacataaaccaaccatctcagttctgttcaactgagcttagcttagtaggaataagagacacagactcaatagtaaataaatagataacacaaatatgagtggttatgtcaatgaagaaggtaccttggaattaattctagaaaatctttaagaaatccttgctatcacttactgtattcattatctactactatgtaaaaaaccactccaaaatgcaattgcttaaaacaatattaatttattgcttagagttctgtgcattaggaatttgggcacatctcagccaggtagttcttctgctttatgtggtattagataaggtcacccatataaactccacacaatattggctagggtcactgatgtgagcctgtcaatcttgagctttgctgggactggaatgtccaaagaggcctcactcacatctctggtgctggctgttggccccattctcctgcacatgcacatggcttctctttctgggggaaaaaaaaaattgaccgattctcaggcaacaaggtagctgaataataaaaggtgaagtcaacacgcaagcatttgtcaagcctctacgtgagtaatgcttgctattgcttcgttggctacagcaaatctatgactcagcctgtagttaatgtgagagggggctatcaaaaggtgagaagacaaggaggcatggctcttctagggccaccagtgtagtgatcttacctcatttactcaatctactatttactattcttgaatttgcatgtctcaagttttaaaatgatgtttcagagcacatttgaattacaatcttctagaaagactaaagatctgaataaaacaaaaatcaaagatcttttagagttctagttcaaagaaaggcaaatttgatactgaactcaaagaaagggattgcaccttgatgggaaggaatttcttttcagacatgcaacagggaatctgatcattctaggtttctacaatcatatttacaggtataaatataatatacagtcacttgccaatatatgcttatcagtcttttcttattctctgatcctttgttaatgtagccattacatacaaaattgtggcaaaatatatatgtttaaatttttgtcttgaaaaaatgtggagrcaaattttcttttaaaaatgtgtaggctattttaagttataaaagaactctattatcctatactagatactaacagtttttattaatcatcttgaacaatgaaaatgtttttctaaaatctttcatatgtggacagattactctcctttaaaaaattatcgtagcaaattgctaaaccattttgtggaatgatagcatggccagacctttacaatgcagcaggaygcttggaatccaaaagtcatttccccatagtaactccaattcaaatgaacagcaagtatttatttgataaggagctggagtgtcacataaaaacattccctaaaggacaatctaaataaactgtatgtgttgccacctaaaagtacttttcccttataaatgaatttctccacgtgttattttagtaaacattcaaagctaccaccctgcacatatagctctatactcttcagcctttgagaaataaaagattagttgctgctcactgacttttcttggaacacacctgcaggacaagatttttaatattttatctttttatattaaagtaaaatatatcaagaaattgtttcacaactatccaattatgtattagtggtgtgactgatttttgtatgggtttcttgtgtttgtcacttattttatatgattatgtatacttattagaattgtgcttttttcttttcttttttttttttttttttttaagacggagttttgctcttgttgcccaggctggagcgtaatggcgtgatctcggttcactgcaacctctgcttcccaggttcaagtgattctcctgcctcagcctcccgagtagctgggactacaggtgcacgccgccacgtccagctaattttttgtattttcagtaaagacggatttcaccatttggccaggctgttcttgaactcctgacctcaggtgatccacccgcctcggtctccgaaagtggtaggattacaggtgtgagccaccaagcctggccagaattgtgcttcttaaacatttgattcaggagaatccttcttgttgcccaatatgtgctgaaatgtttaccttattactgaaaaacaggggtgatggtcgcaatatttaacagcccgaggggcgtgggcaacaaccaagcaaatagaggggcagcttcgagaaagggcaggggctcggcggctctgctgcagggaattacccctttcattactggaggcatagaaatatctagaataacctaggggagggactgacggaggtggccaggaaggtgatttcggggagcgactctccaccgaatgagagggaagtatttgagtgctttgaccaccgacacatctcctccatgaatacagcctgagcaagtgcctcgcgtgagtggagcttggaactggaagaaaagtcacctctgtcataagcattccacagactgtgtacatgcttgacggaaacgaatacaattaactggactcagaaaggcgaagacgggcggggttccttaccaggctgttgcttggggctcagggagcatccccactctccaccgcctgtgccttgcttggcgcagaggcccccagcttctgccggcgcctctgtccctgggaggcggcggggggtgccacgtgcatcctcccccggctctcaggctgagaacgacagggagagtgctaggcacagagaaggttcttgttgtcctaaagtcaccaaatcctgaagaagagttcctgcaaattgtcagcaacaccaaggtgaaaatcagcgcggaatccatagaaaggttgtggatggtattgtgggggagcagcaaaatgcaatccatgctggagtggagaagtcaaagacaagcagactccggccctgggatggtgagtcccccgctctgtgcccactgcccgtctctgttcatatgctcatcacttctcacctgaagctggccagtaacctcctaaataatcttccccaccaagttttgccctacacttcatgcatgcctcctgctccctgtaagatgatcacaaagcgcaaatcttatcagtcacgttccttccgatcacccttcagtgattctcatcaccttcaggatgaaatctgaattccctactgtgcaagggaggccctcgtgacctgcgccagcctaactcccaccctccccttctggcatccagcaaaagaacccttcctgtgccatcctcaggcagcggcctgcatggaatgggttctcccccaagtcccttctccctcctaccccacctgggctccttatccacctagctcctagcagacatcttcccccaaaacacctcaggatatgttaatttaattttgttaagtagttaatacatatacttggttcgaaaacatacaaatgtatacattaaaacctctgtccggcgtttgggccccatatgcctggttctcccatctctgtttccaacaggcatccagttttactcttttttatttatttttgtacatgagtccaaagtgcctttatgcaagtgcaagaaaatgtgactatatattcttatttgctccccacacaagctaacgtatgatatgcactcttctgagcccttctttttattcttatgtattttgtaactatttccttatcagtactcaatgtatcattgtttatttaatactcttctattaaatatattgatggacatttggactctatccaaatatgaaaataacttcagatgtatacataacacatctatgtgtgcatatatatactatagcgagtataatatatagatagtatgtgttacatattataatcatatgtcatatagctattatacacaatgttatactaaaaaactgtgtgtgtgtgtgtgtgtgtgtgtgtatgtgttactgagagcatttcctagtcctctccyactcactccctcaggctgtactagatgccctgacacctgagcacactataatcattgagtttctattctatctactggaaggaaagcttcttgcaggatagaattgtgttcttttttcacttgttcatgtctgtggtttcagcaactaatgcagtgatggcacataaatatttgttgaatgaataaatgatcaacaaacaagagactctgaagtcccaaaagggtgaacacaaaaggaatctattgagcaaaaaccagcaggagtgaatgcatggacaagatgtaggagccagagtgaagatgcccttcatctgggaagttaagagaatgtcagtaaaatgttctgtgcagggcatagcacagaagcattcaatacatactagtttcacattgctattactaatgttattattacactgccctgtgcttgtccttatcctatttaggctggtccgtcttttgaaggccaaagggctccattctggtggcactccatctactgaattctcatttctttaatcccacaccagacaactgtttcctgcatgagaacataattcctgtgatcttcataggacacggcaatcataaatccctattaggagggctgaacttttacttaatatgtatgtattttcctcaatcttgtttcccagaattctttcctacctgtgcctcacaagagcatttgttggactgaatatattctcatattttcatgaaaaaatatcagaattattacagtggaacaaagatttcagtagcctgtcaacagccagtagtgtgctcctaaaagctactctttaacttcttatttatctcccattaactagaactgtactgagtgcagagtggccactctttcatagttattgagtaaattgttgtatacattttctggattttagatttacaaaacccaaagtatgtaaaattttttttaattggaagtaatttaatgaggctatgtcttgattttattttataccatttgataaaaactatagagaaaacatactgtcaaattatttctgatgcagacgcaatttgtttggattggtaaggatacctagctacaggaaaagggacagtcaatctgctccaagattgtaactctatctttgaatttgttcttccgcatgttctttattttgagagttattttaataagtttagactaccttagttgctttgcttccagtggggggatttcaaaacagtttctggtgaaaattaaaaactatgtctagttgaattctaagcactgtattttaggcatttttaaattacattcttactctgggaatttaataccacagatttaaagaggatgcacacacacacacacacacacacacacacgcacgcacagtatagcatttcctttttctgctagagaatgtgaataaagtatttctgcttgaaataatctctattatcaattaatgtcatcctacagtgctgtattttactcatttagcacccgaacatctgaaacatgaaagcttacaaaactgaaatttaaaagtaattttaatatttgtatcacatgtggcaaagaaagggtcattattcataatacacaatgagatcatttaaattagtactaaaaccatgaaaatttagtaattaattcaatgaacaatatgaacaaatgtgttcacataagggaaaaacatccaaattgtaaacagtttggtataaaatataattattgatactaacctgatgtatgcaagttaactttgaaaaaattattttcactaatttagcaatttgtaaagataatgttaaatagaattgtaattcacttattggtagaagcagtctttgtctcaaagactattaaaatgcccataacttttggtcttgtaaccccactcaatgggctttcttctaagaaaataattcaacagaaagaaacagctacctgcattatgttcatttcagtgttatttataacagcaaatctggatatgtataaatatatgcaattaaagacatggtataacaatttatagtacatcaacttgatgaatagaaagtaataactatgttaattttaagaccatatataaaacatgaaacagttttttatgattcaagtacataatccaggaagaaagttcagatacaaaaagatttagaattatggatatgccttcccaaaaaaatgtttttacacattgtatgatattttaaataatactatttaattatcatatttgtatatttgatttgtatagaaaatcagaagagatgttatagttgcttttcttaaattatcaaccaatcctaaatctcataacttttatttgatcatttagaggcactcataaatcttagttactataaaatatttcattttagtggactgctcagttctggggttaataagtcaataatatccaatttaagtccctttttaattttcagtgttagttatttactggtaaacatggattcatatgctcatgttgattagtgcacacacacacacacacacacacatgcacacatataaaggagctcatttttataactagtagaaaaatcctaatctccaaacttggaaaagagttttaaaactcaccttattgatttctctttgcagctaattttacacatatattgtcttgaatcctcactgtcaatatattctccctcatatctgataggtgacaagtcacattctttaacaaacctttggaggttgtcaccatggtcggagctggggtcctatgagaattgttttttcatcatccctatgccttttgcattgtatctctctgttcacatcaacatttgtcactgttctctgcctttcatatcggacacattcagcttaatgataaattaaaacttaatagagaagggtaaaaagtaatattagaccacaaggtatcctgtagaatctttgttctccaaaggctgtatagctatctgttcatatgcttatagaataaattgcacaatgtcagagtagacaatactactgttgcttcagtaacatgctcacagagtgcaagaatgtaagtcaaaagacaggtgaaactgaacttttgaaatatatcccaattgcttttaattgtacctctccaaaaatgtaaatatagttaaaagatttttttaaatttctgtgttaacatttgcatttatttaacaaactcagcatgctcttggagctgatctctgtgcttttcaaatatgaactcacttaattctcaaaatgacccatgagggtagtgttattatagtcattttatatgtgtgaaaactgagacacatggagaagttaaaaaatgtgcccaagatcccacagcttgtgagtgaaggtggacctcaaaccctggcagacaattcctggtcatgtgagaaaagaggacttctccttgcaacaccttgcagggttcgggggtaaactctgtcagatccataaagctatgaatctcctgttaggctgatgggatttaattgcagctccactattagaaagtaaaaataaaagtacaattatgtctaatagttaaaagattggcaaatagttaaaaatgtttcctttcactcttgaaaacatctctcaacagcctttctgatcattgttgtttattttttaaatggattatttcaacatttgtcaaatgctaaatatattggactctttttttttctcttttgcttgctagcgctttccagggtctagtaagaggaaagaaatcatgaccaacctctcctgtcccaaaagcctcccaggattacccttttaccagaaaatctatttttatataaaatagatggcttctgctcataccaaattttgagctgcttctaagtgctagatagaactattaaagatktagactgacttactcactatacaccatctctggtctctatattcagttccatgctcagaaaagtaaagcaacagtttatctaaagttccactcacccaaggaatcatttattggatcatcacaatattgagaggggtttatggttgtgggagaatttccatgccaaaaatattcaaagggctttggcagaaacatttgtgttcagaagccagggtacacctggtcagtcaaattgttggggcctggaactgtccatttagtgagctgtgattttaaatcacttcattctttgtatttgtgtctatgcagtatactctcttggtgaaatgtgtatacatttttgtcagacttactgaaatatgattcacataccatacaattcatcattttaaagtgtacaattcaatagctttcagtctactcacagatatgtgcaaccatcaccatggtcaattttaagacatatttatcaccttggaaagaaagcaccaccccttagctatcacaacctgtgcattcttctccccagctctaagaaactactaatctaatttctgtctctatagacttgcctctactggatatgtcatataaatgtggtctttcgtgtttggcttctttcacttagcacatatttttaaggttcacccatgtagcatgtatcagaacttccttttttatggctgaataatattctatcatacatttactcttmatatctctgcctgttacagatatatgtataatatttagcaaaattttctgaactaaaatttaaatttagttagccttcaccttcccactgataaattctgagaggaatttaggcaatccactgtatattttatctacataacgtcatatgttcatcttttggaaacatctgcgttacagatagcaactgacagctcttacayggatgcctggtcttatataaatccaatattatggttatctatcttttgtccacagcatctatgggttttaacaatttaaagcatgtgaacatttaaagcttatattcctcttataccataacactctccataacagtatgcatatgattagtattttttctatatgccaatcagttatcccaaccacaaattttatgccatcgctaaacaacagaattcagtctcttgagccctgatgctcatgattatcccagacagacatgtttgtgcatcttcataaattattactgccttactagtttcaaataatctccaaatattgattattaaatgcaaacatgagttatgacatttggtaaacttaaatattgtttcatcagagaaatgaaaaacttaattagaaatcgtatctagtacaaaagccattaacatagaaaatctgagatccgtttaataattaatcgagccaacatggtgacttagggcttatggaaatattagaggcaagaaagctaattttattggtgcattacttgggataatttaatgtcattcagagggtggcagatttttcacttttagccttaggttagagtaactattagattttaaaaagtagcttttcataataacgagagttcattcaaatagatttccatgtcacttgaaattaccaatttgtataaatttcattaataaaattttatatcactttttgtaatctttctaaatgaaaacaagctgtttcattcattcagcgaaacatattcagaagcccctactctgtaagagcactatgctgagagctcagagacgcaaggatggagatcaactaaacaaggttgaattgacgtggtccttcctgctgtaccttccagccggccgtcaaagtgccataacttaggacagaaaatgagagttctaaacttaatttctcagtgccatgagaactcatagaaagaagtagtgttcagaaaagttgtgatatttaacttccatctaaggcgttcactcttggatgggaagaagggaaaaggaattctatacagaaggaacagcattagcaaataaataaaaataagaagtcagaggaataatgagtgcagtgccctttggcttgagcaaagtgtttatgaacagaagtagtggcttaaagctggaaagaaaggttgaagataatgatgaaggggcttgaatgccaagtgaaggccttgggcctttgcagtaagtcaaataaggaactatgtttcagtttgtaaacaggtgacatatatggagtcctgaagtaaggaggctattctgaatggcatgtgcagggtggatcagatatgcagaaacaagtattaggatattcctagaaagcttggacccattctccccagagtgccctggaaatacctgtcgcagaaattcaacctcgaggaggacttcacagtgacataagtttgactggcatcatgttataccacttcttggagattcactatgtgaattaacacattaaaattcctgagaaactttgctgttaaaaaacaaaacaaaaaaaactcacggaaaacaaagtgagaractctgccagattaaaggagactgaggaaacacgacaactaaataaaacttgtgaccctagaccaaaaaacagacattaatgagacaactgttgaaagttgtataaggtctgtggattagataacagtattgtgtcaatgttaatttcctggtttttataatcatactgtggctgtataagatgctaacatttgaggaatatgggtgaaggatatacaaaaattcattgcattattttttcaaatttttggtaagtctgaaattacttcaaaattaaactttaaaaatatttttataattaaaagtataactgcatttccaatcaatyatctaagataaacacttttggaaatactcccaggaaagacaggggaatttatatccacagagcagctgggagaaagagctgggttgacagagtaaatgagttcagagctgggttgacagagtaaatgagttcagatgtggacacatgatgaatcttggcaccattcttgcccttaacatattttaggtacatatacatgttttaaacctagttacctacttgagataatgaaatcccctctcttgctctttcagtcagaatggtccctattgcaatgactgactgggaaagggaaattagagacagaattatccaaataattcacaagaatcccaatatgaatttttgagaacatggtttatttcgtatctccacattattcagaagtaaacaataaacttgggattcttcacttaatatatggtccctggagattctcaaatggttcctcaaaccctaacactctagtattatcagtaaagacatagttaatcacactcttttttctataacctgtaaaacaatgaaaacacaaagtaatcttttaaaaattacattctcttaaccataaaacaataaccacatcaaaattattgtctgaattttagttttttatataaatggatttttggtgaaaacttatttaatatgataccttactaatttaattacatagaaccttcatggatgggttgttctggagatctaaataaaggattagtcttgagtgtgaaaacttgctaaattttaacaatatttaatttagtaatggtagaaatcaattcaatgatttgtaatggtagaaatcaattcaattctccatttcttcatcaatggagtaataggattagaaatgtgcctaagtaagatgaattatgtagcagttgcagactatatttcagggaagatttagagtcagaacagtcctgcagataggtgggggcttatgaaagcctgagctagaatagcatgaagaatgtggaactagagagacttatyagacggacatcaaatcatgagaacatggtcattaattgrataagacagcaattkaaagaaaaatcccaaagataatactcagattttgagcctaggtgacaagtgaaattgcagtaatgctgcagaaagagggaaataatgattagaaagtacataggcatgggcaaggacttcatgtctaaaacaccaaaagcaatggcaacaaaagccaaaattgacaaatgggatctaattaaactaaagaggttctgcacagcaaaagaaactaccatcagagtgaacaggcaacctacaaaatgggagaaaatttttgcaatctactcatctgacacagggctgatacccagaatctacatagaactcaaacaaatttacaaatttacaagaaaaaaacaaacaaccccatcaacaagtgggtgaaggatatgaacagatacttctcaaaagaagacatttatgcagccaatagacacatgaaagaatgctcatcatcactggccatcagagaaatgcaaatcaaaaccacaatgagataccatctcatgccacttagaatggcgatcattaaaaagtcaggaaacaacagatgctggaggtgatgtggagtaataggaacacttttacactgttggtgagactgtaaactagttcaaccattgtggaagtcagtgtggcgattcctcagggatctagaactagaaataccatttgacccagcaatcccattactgggtatatacccaaaggattataaatcatgctactataaagacacatgcacgtgtatgtttattgcagcactattcacaatagcaaagacttggaaccaactcaaatggccaacaatgatagactggattaagaaaatgtggcacatatacaccatggaataccatgcagccataaaatatgatgaattcatgtcctttgtagggacatggatgaagctggaaaccatcattctcagcaaactatcgcaaggacaaaaaaccaaacaccacatgttctcactcataggttggaattgaacaatgagaacacatggacacaggaaggggaacatcacacactggggcctgttgtggtgtggggggaggggggagggatagcattaggagatatacctaatgttaaatgacgagttaatgggtgcagcacaccaacatggcacatgtatacatatgtaacaaacctgcacgttgtgcacatgtaccctaaaacttaaagtataatttaaaaaaaggcactgggaggtaaactttagtcatttcatttaatctatcacataattaaaaaatagtttaattttaatttaaggaagagagtcaaagaattattcctggcagtcaggaaccttaacaaatcctggggtrcaggaagcctctgcacctgtcggcaaggtggggagttctctcaacgggtaacgtcaggtattgcttagcactttacatctactgcatcctacttttgcttacttttgatttaccttttctatttctcctagtaggtttgtcctagaaggattttttaaaattttttaatttttcttttctgtttttttaccaccttgccttggacataacaggctcacagtgtatactgcataattactagcatatgagacatttatgtataggtaagcaaaactaaatgaactaattgtagagagtcaaaagtcaggtggaggaaggaaaactgtgctgcaaagtaatgacagcatgtgttgtgtgctctgtaatttactttaaataatgttctgtgtatgcatactgggtttgctgcttatcctggggaggtgggggaggacgggggtggattggtcagttgtgctcagctcacacttagagtatgcgaatcagaagggtggttcacagctgaaggactctaaacaaaagcccacatgtcagagacagcttctaaaagcttttagcatcyactccctgatcaacaccaagaagtgtttacttagtatattgagtatcagaaacgatgttatcttggtcagatgaatggatctcaagttaaatgaattgactggatgtattcttcaggcattcctagttgctttgccttcacagagcatctgaatgcagtgagcttctggccctatgctttgttcagataattgaggattccattgcctgactccagttggaagtatggctgcatcttctattagaatattgtcagaagcagctcttcatattgccgaaaagaacagacagctgggactttagcaagcttgcagaataggttttgtaactgcttttatgctgcttgctaataaatatcggtatgtgttaagacagagtttatattgagacttacttgatttctggtagctaggttgtgggagagaaacaatttggccctttacttcctctagatatctactccccccaaaaaagatgttatgattgtaaataatcaaattagtttagttaatatttatcagaatagcctaggcagacttctcttaggaagtagcattgctggacatggtagctcacgcctgtaatcccagcactttgggaggctgaggcgggtggatcacctgaggtcaggagttccagactagcctggccaacatggtgaaatcccgtctctactaaaaatataaaaattagccaggcatggtggtgggcacctgtaatcccagctacctgggaggctgaggcagaagaatagctggaacccaggaggtggaagttgcagtgagccaagataaggccagtgcagtccagcctgggcaacaagagcaaaactctgtctcaaaaaaaaaaaacaaaaaacaaaaagaaacatggcatttgagctgaaatgaactcatttgaatactggggctaagaatattccaagggaaacaaaaattcatatgggtagaacttagcaagtaaagaaaagagtgatggaagatgaaattagagaagtaagtagatgttaaagaagatgtgacacacaatttaagacattaggatggtgtcaccatattttaaccagaagaatggcatattctaaatttaggaaagcaactctggaactactcaagagaatggattggagagaacaaggctatcacagtagaccacatgacagaagatggtagattggctttggtggtagcagcagaaatagaaatgcctagacaacagttcttgcaggaaaagaggaagtggtatgttaggtaaaggaaaaaagaggatgaggcttaggttttggatctgagcaacaggatagatgatactgctgcttactgagatgacagagttgagagattttgctccactggtagcttgtatcttttttaaacttgaataaaaagtacagtacaaacacagactaaaaaaaaaattcaataattagagaaatctttctagatctatcaaacaacttatataggctgggcacagtggctcacacctgtaatcccagcacttcggaggccaaggcaggcagatcacgaggtcaggagatcgaggccatcctggctaatatggtgaaaccccatctctactaaaaatacaaaaactagccgggcatggtggcgggcgcctgtagtcccagctactcaggaggctaaggcaggagaatggcgtgaacccaggaggcggagcttgcagtgaaccgagatcgaggcactgaactccagcctgggcaacaagtgcgagactccgtctcaaaaaaaaaaaaaaaaaaaaaaaaaaaaaaaaaaaaaaacttwtwtagtcagcctaaaaagaagtatcatctagaaacagaaagtatgccttctcagattggaaaacctggctactccagtggttcggaattgattgtcatttcataatggcttaaagcaattagtgtgtatcagcatttacctttgactaaaaataaaactgctaacaagaaagctacagggaagtggtattctttatttaaattgattaatgtaaacagctctttcatttaaaattgatttacataaattcaagaaaatatttgcaatacacaattattacttagtaacaaagataatcaggaagtcctgcagacaatgaaacgtgaacaattaaaatattcaggatacacaaagcttttaattaatgagctaaactaatccaaataagcagggaactgtgttgtaaggcttggctatcatggattttgaagtcaatgattacaagaagaagaatcacagctactgttaagagttaacgaaagaggaaagaaatatgaaaagcagctcaacagtcaaagacaggtttattttggagaataaacctgagaggggcttctggccratttcagtcaggcacattctctcttacaggctaagagtatttaagggttcagrgcaagaaaacttatcacaggcttggaatgtgtctgtgtgaaggagaagtttattgaggggttgtaatgtctctggtcagaggggaggttcgggctgacatctctctggttggggaggttatatcaggctggcatgtctctggttagggaggggtttaccttaggtttggaatgtttccagttggagatgtcatttgtggtttatgattatgccgaccttagccatttggctgatgccctttgggttggatttagatggtttttgatcaagaggaactttaaaatggcagtgcctgtccaagatggtgatgttcctgctctgtcagctaccctgtactgaacatattccatgtgcctggtatctttctttgaagtactattttgcagaatcttcttgagaataatgtgaggtaggctttattatttctatatatgaagaaactgggacataaagaaaataagtattttgttcaaggtcctgtggccagtgttggggagagggcattaatcttggttctgatgtatctcaacactgctgtacttactgaggttactttgttagtacatagaataaaaggtaatatacaaataagtatttttttttgagacagagccttgctctgttgcccaggctggagtgcagtggcatgattatagtcactccagccttgaactcctgggctcaagcaatcctcccaccttaccttcctaaatagctagaactacaagcgtgtgccaccatacctggctagtattttcattttttgtagatacaaggtctcaatatgttccccaggcttgaaataagtgcattttwaaatacatgcgttggaaagatattagagttataaagagtcaatttgcaaatttcgtctgcttgacaatgtcatacaggtcaaaatcctcaaatcatgagatttatgtgtcctacatgtactggacaaagaaaacaaattcttttcaagctattctcattaatggaattaactatcagaaggaaaatccaattatcagataattttttaggtggggctttggaagattattctgtgcttacatgtgaacatgaaattatgtcaggttctctaggcgtggtggctcacgcctgtagtcccagtgctttgggaggccaaggcgggcagatcacgaggtcaggagctcgagtccagtctggccaatatagtgaaacctcgtctgtactaaagataccaaacaaaattagctgtatgtggtggtgtgtgcctgtaatcccagctactcaggaggctgaggaagtagaatcgtgtgaacccgggaggcggaggttgcagtgagctgagatcatgccattgcactccagcctgggtgatggtgtgagactccatctcaaaaaaaaaaaaaaaaaaaagaaaagaaaagaaaagaaaagaaattatgtcagattcaggtactggatgaaaaacaaatacggaaatcagagcatgagtgtgcaaatcatagaaagatttcattctcttatttctagaaccccttctcaacctggctagtacttccttcagcccctctaactttcagattgatggaaaggacctgcctaagcagaattcacctgcccctaatctagaaaggtgctctttcttgagcagatgtggtaaattcagtttttatcttctttccttaccactgagtcagaatttatatttgtataggagctagggtataagaaaggatgagtcaacaataatccaatacctttttatataagaagttaattacattaccttggttaatcataaaatctgtcttgatgttgcagatgattctattagatttaattgaataaaagaaagctttaaatcatattcgagtaaatatgtaccaggtataaattgtcaatatataactataattctgtatgtgtgtatgcatatataattactataaatgaatttttttcatctattaaactcagtattttatattccacttcagtacaagactttctataagattagtattcatattcaattaatatttcattataattttaaaaatatactttaaaaatacaattaaaattttatcaaatcaagccagaatatttattgctgagttgttttgatgctactttgcaaattacttgaatctttcttgcttgctttatttccattatagtcatcaacatcaagtattgattgatttacctttggcctagcactaaaccgggtagattccgtatctcaatataacagatataaaacatgttgacacagtcctatgctgatgattattggttattagaataacacagaggaaaagagaaaaaattatctgacaactattagtggaggcatataatagattttatgattaatcaagtaacgtaataactactttattaactcatttgatgttcctagcaatgttattatyagctccatttcacaaataagaaaactaaggcaagaaaatgctattcggcttgcctagaatcatacaccaagcaagtggcagaactgagatttgaaaccagtactctggctccaccaggtgtctgctaaacaccccctctgtattttgattctctgataaagattaacttcagaattggcttccaataagatataaaagacacttccaattttctttgaaatttatgggtgagagggttcctagttgctattttcctgagccagatgctgaaatgaagacttgagtgcagatcattgatgtaggaggtgatcccaggacacacaagtgagaaaggaaggagaaaacccaggaaagggtaggctattgagcaaaaaaaccttatccactatgagtgacagggctcaattccctggagattttcccctcaatttggagtgtgtactatatagctcagaaattcctcactgaggggcaaagaagctggagtatttacttgtccaccaaatcccatccctattttgttgagggctttctaagaacattaaacctatgacattccaggatgccctggtttgggcttgagcaggttcccttggggacagaataagcctcagccccaccccccgaccccggcgagcatcacagtagccagtatgtaggaaaactgtccattatagcttcaggttaacttgcagattggccatgagaatagggagcagggaatccagcaaggagtagtggacatctattgtctttgcctgccagtttccattcccctaactttttataatagtacctcaattcccttttagttagagagctacacacttaattctttccctccgcatggtgaaggtgggttctcattaggatggagctgaccccactatcctccaggctctggattggacatgagacacaggaattgtcagtcagcatatttcttgctttggatctaatagttggcttaggaatagtcatatgagataaactggtccctgcatttcaactcaatgactcttaactattggagaagataaattctcacctcccctccaaggctgctgaattaggagggcatacacctgaagaggctggtgaccacctcatggaaagcacctacaagagaggaaagcagggctgtaaaacagagagacacacgcagatacagacaggcagacagaggatccagttatgctcaacccagctctacccttggacttttcaattacatgagtcgataaactcttttttttttcttaaatcagtttgaggagagtttctcttaccagtattatttcttcaccaaaatgttttcagtgtctacatagtctcttaacttctgagtatttttcatttacttagaagcttaggattcttaattgaaatagacatttaaagtctgctagaccgatcttctcacaacgcaggaacatcatctacagctgtgctgtccaatgtgacagccaccagcctcatgttgctatagagagaaggcatgtggcaggtccaaatgagagtgctttaagtatagaatgcacactagatttggaaaacttggtacaaaaaagaagataaaatatcatacataattattctatattgattatmtatcttaaaagtcttttggatatattgggttaaatagaatatattattaaaattaattttacctgtttctttaaatttattaatgtggctactagacaattcaaaatcatatatgcaactcacattatatttctattagacagtgctagtccctgacaaagggtgatgcagcctctgcttgaaaatgcagctaattaaccctctgggcaggcgcatccatcattggactgttctaagtgtaaaaacgattttgtgcctctacattcaaaatccatcactttggaacttccatctattggcactagttctgcctcttgtgtatcacagagtatctactcttcatacatattcagctatttttacttcttactggaagattgccatccaacctgtctctcacagtcttatgaaacaggacatcacagacatttttgactcccgctctgctgacaggatacgctatttgcattgacaacagttgcaggtttggtagccataatctttctgtgcttaatgataaattaggcttcatcttcttgtgaagctacagacaaagtagagacttctgcttgaggctccagaagttctctctgccccaaaagtctaaatgagagaggtacaggagttaaggacatccatcagggatgtcattccttgctctgagttctatcacgggaaatgaatgtggactttgggatgagaaaagggcagttgtcaacaggaaatagcagctctgagttcattttcagcagacaacagtctgttccaacataacctactccaacctaagcttcatggagacagactggggctgacaaaaggtaaatggttttcatgtcactagtgtctttaaagaaataccaataaatttaatttccttcttaaatttaacaatccaaacaagtaaggtggaatgcagcagactgttatttaagtatgtcatgaagatttcaagttttagatcttgatgcctattttcatgattaaacaaaattaaaatctttcaagaaaaaaagttatggttccaaagactgttgtctgtgattatgatatattcaaagtattttcattgcaatgttgtggacatccatgataaattatgccttcttaattgggattatttttatttcaggcaattggcactcttgaaaataaaaacccatctgtccaaaaccattttttcatttcctgtcatttcagcttagattgcaccactaatctctgaaatccacattctagtctagtgatcaaacaaaagttttttctgatctatggaaaactttttattgcaaagaaagttcttaatgaaaaagttaaataagacaagttcaaaagtttatacaaggcactagttagagcatctaggatttgtggataaaataatatgccccaattatccggatgtgtaatttaggaagtaataaattgtatgctgatgaatctaattcaaaatatcaatacatgctaaggtactctacagcctgttcaaacaccctccccaattgtcttgtttcaattactatcaacagccacaaattggagttctgtctatatgatgccccaaacatttggttaattcagttcattcaacctagttaattcaatatgcaaaaaaattcaccaatgaattgacaagctaatgttctcaaaattgttgatcagtgagttgtaacctaagaagatttggctaagacagtctgaaaagccagggctctcctcccatctcactattccttcaacaactcattttgcttattccttccacttacaataaacttcagcatcttatagtgcctcttttaccctaattcaataagccttctctatcattaaacccaaagtttctaaagtcttatctctagaccattcctggacaattaaaagagtataggtgattcttctaagcagtttggagattcaacagtcctctctgaaaagcttcctaatttatgacttttttatcttctatcctagaatatgtagacactgtgggccccaattaactttctctattggtggatggaacctaagatractcaataatctccccttatagtactcatgcccttgcataatcctctcctcttgagtgtgagtagcatctgggatttgcttctaactaatagaatatgacaaagatgacatgtccatcmcacgatttattatattatatggcaaaagtgctaggatgttattcccatgattattttacattacacaagactaggaggagcctgcacatctagcagaagagaaactaaggggcccaagctctccaaacatccctggctcattgggtgactgcatgcctaggcaagaaagatctggagagcacagaagatccagggataatctacaaattgcctgagtttttagtgtactccataacccccacacaggtgcaatagcagaggataggagatttactggctttaggtgtgtcttagtcagttcaggctgctataatagaatactacagactgagtagtttaaacaacaaacctgtgtttctcacagttctagatgctaggaaatctaagatcaaggtaccagcagatccagtgtctcatgggggcctacttcctaaattgcagatgattggcttcttattctatcatcacatggtagagacagacagaaaccaatccctcatgtctcttcttatgagggtactaataacatttataagggatccactgatgccatcacattggcggttaggattttaacatataaatttggggggaacacaaacatgcagtccatagcaaggtgtttgagcaaacctctaaccagtcattgactgaccactaagttatgcagacttataggtgacctctaacagcccaggataaaaaataaaataaaaataaaagcagaattaaaaaaaaaaaactaagcagagacttcagcgaccagaagccaagattaaacctagaaaattattttaacacaaaacaaagcaaacgagtaacaactgacaggaggctggtgggcggggggtggagggaatgcagaatccagagttgagatatattatctaaaatattcagttttcaacgacaacaaaaaatgagacatgcaaagaaacaagaaagtgtgactcaaactccaaggggagaaaaaattaataaatagatatttgtctctaattggtattgtacattttatcaaagacttcaaagtattaattatcaaaatgtccaaaattttaaaaatcatgtttaaataataaaagtggtctggcacagtggctcgcacctgtaatcccagcactttgggaggccaaggtgggaggatcgcttgagcccgggagttcaagaccaaacagggcaagatagcaagatcccatctccacaaaaaataaatgaataaatacataattaaaggaaaatatcccaacaatgactcaacaatagaaaatctcaataaagaaagagatttttaaatggatattttataattgaaaattacaataaattgaaatgaaaagttcactaagcagtttcaataatagatttgaaatggcagaagcattaaacttgagaaacagaaattattcaatttgatgaaaaaataataataattaaagaacaaataaaagaacctcagagatctggggaaaatatggaacataacaatataaatgtacttggggtgtcagaaagagagatgagagagtaagtagcaaaaataatgtttttgaagaatgaatggcccatagcttatcacatgtataaaaaaaaagatctatagattcaagaaacttgacaaacctcaggtaggataaacacaaggagagtcacacttcaattcactatagttaaaatgctgaaaatcaaggagaaattcttttttattttttatttttatgggaacatagtagatatacatatttattgggtatgggagatactttgatacaggcatacaatgcataataatcacatcagaataattgggatatccatcacctcatatatttatcctttctttgtgttacaaacaatccagctttatcattttggttattttaaaatgtagagtaaattattgtttactttaggcactgtgttgtgctatcaaatactagattttatttatcctatctaactatatttttgtactccttaaccatccctactaccccccactattcttcccaccctctggttacaattattctactttctctctctccataaattcaattgttttaaattttactacctgcaaataagtgagaatgtgcaaagtttgtcttcctgtgcctggcttgtttcacttaacatgatgatttcaggttccatctatgttgttgcaaatgacaggatctcactttttatagctgaatagtacaccattgtgtatgtataccacattttctttatccattcatctgttgatagacactttgttgctcccacatcttggctgttgtgattagagctacagtaaacatgggagtgtagatatcttttgacagttttttgagaaacgtccaaagtcttctccacagtagttgtactgatttacattctcaccaaaaagtgtataaggattcccttttcttcacattcttgccagcatttattgcctttcttttggataaaactattttaactggggagaaatatcccattgtagttttgatttgcatttctctgacgttcagtgatgttgagcatctctttatatgtctgtttgctattcgtaagtcttcctttgagaaatgtctgttcatatcttttgcctacttttttttttttttttgagatggagtcttactccatcatcaggctggagtgcagtggcacgatctcagctcactgcaacctccacctgccaggttcaagcgattcttttgcctcagtctcccaagtagctgggactacaaacgcacgctgccacgtccaactaatttttgtatttttagtagagacagggtctcaccatattggccaggttggtctcgaactcctgatctcatgatctacccacctcaccctcccaaagtgctgggattacaggtgtgagcaaccacgcccggctcttttgccctttttttattggattattagatttttttcatatatatttgtctgagctgcttgtttattctggttattaatctcctgtcagacatacagtttgccaatattttctccctttctgaggattgtctctttgtttattgtttcctttactgtgcagagctttgcccagtctaatgtcttggagagtttccccaatgttttcttttggtagcttgatgatttgagatcttatacttgagttttttaattcactttgatctgatgtttgtatatggagagagattggagtatggtttcatttatctgtgtatgcgtttctggttttcccagcaccatttattgaagaatctgtcctttccccaatttatgttcttggcacttttgccaaaaatgagttcactgtagatgtatagatttaatcctgggttctctattccgttccattgatctatgtatctgtttttatgccagtaccatgttgttttggttactgtagctctgcagcataatttgaaatcaggtagtgttatttttcctcaggatagctgataaggtttggctatgtccctgcccaaatctcatctcgaattgtaatgccataattcccaagtgcagtgggagggacctggtgggacataattgcatcatgggggcagatctttcctgtgctgttctcatgatagtgaataagtctcacgagatctagtagttttataaaggggagttctcctgcacacgctctcttgcctgccaccatataagacatgcctttgctcctcactcaccttccaccatgattgtgaggcctccccagctatgtggaactgtgagtcaattaaacttcttgcctttataaattacctagtctaggatatgcctttattagcagtgtgagaatgaactaacacaatagcattgtctattctgggtcttttgtggttcaatataaattttgcaattgtttcttctattgctctgaagaatgtcattggtattttgacagatattgtattgaatctgtagactgtttttggtaatatggacattttgacaatattgattcttccagcatatgaacataaaatatctttccatttttctgtgtcttaaattttatgcatcagtgtttcatagttttcattgtagacctctttgatttctttggttaagttaatttctgcatattttgctttatttgtaggtattgtaaatgagattactttcttggtttctttttcagattgtttgctgttggcatatagaattgctactgatttttgtatgttgattttgtatcctgcaactttactgaatttgtttatcagttctaaaagttttcttgtggagtctttaggtgttaccaaatataagattatattatctgcagacaaggatcacttaacttattcctttccaatttggatgccctttatttctttctcttgtctgattgctctagctgggacttgcattactatcttgaattacagtggtgaaagtgagcatccttgtcatgttccagattttagaggaaaagctttcaatttttgcccatttagtgtgagactagctgtatgtgtgtcaaatatgacttttcttgtgttgtgatatgttccttctttactcagtttttttagggtttgtatcacaaaggatgttgaattttatagaatgctttctcagcataaattgaactgatcacatggtttttgtactttattctgttgacatggtgtattacattgtttgatttgcatatgatgaattatccttgcatccctggataaatccaacttggttatgatgagagatctttaaatttattgttcaattcagtttgctagtattttgttgaggatttttgtatcaattctcatcagggatattggtttatagttttcttttattgatatgtttttgcctggttttagtatcagggtaaaactggcctcatggaatgaatttggaagtatttcctcctcctgtattgttcagaatagtttggatgtgattggtatttgttcttctttaaatggttggtaaaattcagcagtgaagctatcacgtcccaagcttttctttgctgggaggcttcttattatggcattaatctaggtacttgttattgggctgttgtgaatttgggtttcttcatggttcaatcttgggaggttgtatgtgtccaggaatttatctaattcttctaaactttccaatttattgtcatataattgttcacagtggcctctaataatcctttgaatttctgtagtatcagttataatgtccccttcttcatctctaattttatttatttgggtcttcgttcatttttttcttcatttaccttgctaaaaatgtgttgattttgtttatcttttcaaaaaacaaaattttcattttgttgatagtctatattgttttattcatttcaatttcatttatttctactcagctatttattatttcttttcttctactagtttttcacttgcaatgctcttgctttcctagtttttcaagatgtcattatattatttatttgaagtttttctacatgtttcatgtaggcacttacattataaactgtcctcttagtactgctattgctgtattccataggtttttgcaggtcatgttcctacaataatttgattcaagaatttaaattttttttaattttctttattgacccactggtcattcaggagcctgtcattaaatttccatgtgcttctatagtttcccaaattcctcttgttattgatttctagttttttctagtatccattgtatattctgcagccattggatgaagtgttctgcaaatatctattaggcccatttgatctattgtacagtttaagtctgatgtttctttgttgattttctatctggataatctgtccaatgctgaaagtggggtgtttaattatccagctattattgttttggatctacctctctctagctcaaataatatttatttatctgggtacacatatatttacaacttttatatccacctgctgaattgacctctttatcattatataatgatcttcttcatctctttttgtagtttttgtcttgaaacttatttgcctgatataaatatgcctactcctgctttttgtttccatttgcatgaaatacttttctcatcactttgctttcagtctatgtgtgcctttataggtgaagtgtgtttcttctaggggtcttatttgttgggtcttcttttcctttcttttttctatatcaattcagccaccatatgtcttttgtttggataatttagtctatttacactcaatgttattatggataagtaaggactttcttctgcaatattttaatttattttctgagggtttttttgtgaccttctctttcttcttccttcctatcttctgtttagtgaaggtgattttcttcagtggtatgtcttaatttctggcttagtttgtgtgcatttctattgtatgttttctgatttgaagttacaatgaggcttgcaaataatatcttatagcccattattttaaactgatggccacttaatactgattgcattaaagaaaaccaaataaactaacaaggaaagagaaaaccaataacagctgtatactttaagttcttgcccctgcttttaaagtttttatagtttctatttataccttattgtataccctatgtcttgaaaagttgttgtacttattatttttgatcagttcatcttttaatctttctactcaagttgtgagtagtttatacaccatgattatggtattataatgttctgtgtttttctgtgtacttattattaccagtgagatttgtaccttcagatgattacttctcactcattaatgacattttctttcaaattaaacaactccctgtagcatttcttgtcaaaaaagtctggtgttaatgaagtttttcagcttttktctgagaaagtctttatttctccttcatgtttaaagaatattttcactggatatactcttctatggtgaaagctttttccttcaacactttaaatatgtcatgccgctctcatgctctccagggttgccactgacaagtctgctgccaggcacactggagcttcatttcatgttatttgttttcttttgctgcttttagaaactttctttatcctcgacttttgggagtttgattattgaatagtttgaggagccttctttaggttaaatcaacttgttgttctataattttcctgtacttgaatattgatatctttctctaggtttggamgttctttgatattatccctttgaataaactttttaaccctatctctctgtctacctccactttacaggtaataagtctcagatttgctcctttgaggatttttttttatcttgtagatgtgcttcattcttttttatttttttctctttggtatcctatgactatgtgttttcaaatggcctgtctagctcactaattctttcttctgctttatcaattctgcaagtaagagagtctgatgcattcatccatatgccagacattttcaacttcataactactgcttgattattcttaagtatttcagtctctttgttaaatttatctgacatgattcttaattttttgtttgttataatgatttaattgaaattccaccaaaaagctactttgaattctctatctgaaaggttacatacgtctgtctctccatgattggttcctggtgccttatttagtctgtttggtaaggtcataatttccttgatagccttgatacttgtggacgttcatcagtgtctgggcatagaaraattaggaagttattgtagtcttcatagtttgggcttgtttgtacacctccttcttggaaacactttccaggtattcaaaggtccttgattgttgagatctaagtttttggcttctgcagctgtgtcagcattaggagacattccaagccccatattgtagcacttgaagacttgtagaggtagcatgttggggggcttggataagacccagaaaaattctctagattatcaggcagaaactcttattctcttcccttactttcccccagacagagtctctgtatatgctgagctgcctggagctgggggaggagtaacacaagcatccctgtggccattaccacggagactgtgctggatcaaacctgaagccaatacagcactgagtctctcccacagcccatggtaaccacatcctggctactgcctaagttctcttaaggcactagacccttaaaatcagcaagtgggaaaaccagccaggtttatgtccttccctttaaggcagtgagttcctgcagtccaaggtaggtttagagatgctgtctgagaaccaggtcttggaatcagaaacttaaggaatctaccagatactgtatgctacggcagctgagctggcactgaagccacagaacaaagttcttaccattcttctctcccctttccgcaagcagaggagtgtggaactcttcccacagtcaccactaccacaggttcacaacaaatattgtctggctactgccaatgttcactcaaaacacaagcactcctaagtcaccttgtagtgaatactgccaggcctgggactctcccttcagggaagtgggctctcctctggcccagaacaggacmagaaatgctttgagagggcgagagactggaatcaaagaccccaagtacccactttttgctttattccactgtggccgagctggtatctaagctaccagaaaaagtcccctttactcttccctctcttttctcaagcagaaagagtccctcctcatagctaccatagctgggaatgtgctgggtcacacctgaagccagaatatctttgagtctcacctaggctcacagtgggtactgcctgggtattcctgctgattattccaggcccaaaggctcttcagttagcaggccatgaatcttgccaggacttgatccttcccttcaaggccacaggtttctttttggcccagtgtgtccagagatgtcatgtgggagctagggcctggaatgggggcctcaggactctgccaggtgccctatcctactgtggctgagctggtatccatgttgcaagagaacctcctctttaytcttccctctcctctcaagcagagggaaggaatctcttacaaagctgtgatctgtactagctggtgttggtggggaggggtgacacaagctctttcttgactgatgtagctggcatctcactaggtcacatgctccccaagttcactggcaccaaagtccacacagcactaaagcttgcccaggagcgcagtccttatgcttakcctgcttcttgcatttrcttaggaccctagagcactcacccttcaatggcaaggcttgccagaacctaagttctgaccactggcatggatgattctcctctgactagggctgttataaatgctccctacatggtgtcagctgagttttttccagtgttgctttccactgagacagcacagaactgtgttccaacacaaagtctcacaatcactgtgctctccctgtcccaatcccacatattctctctctgtggcaagaaagccaaaaaaaattgaatttacactgcatgttagaccaaatagacctaacagacatttacagaatattttgtgcaacattgtcagaatatacatctttctcatcagcatacagaacattctccaagatggacactatgttagaacacaaaacaagtatcaacaaatttataaagttcaaaattataccaagtatcttctcataccacaatggaacaaaactagaaatcaaaacagtggtaaaagggaaatttatagtaataaacaactacatcaaaagaaaatcttagaaaaaattcaaacgaccaaataatgcacctcaagaacctaggaaaaaaagaacaaacaaaaccccaaattgacagagaaaagaaataataaagatcaaagcagaactaaatgcaatggagactacagaaacaatacaaaagatcattgaaacaaaaagttggttcctagaaaagataaacaaaattgataaactgctaccctacaaaacaagagggaagacccaaataaacaaaatcagaattgaggagatattacaactgacaccagagaaatataaatgatcatcagagactattatgaaccattataagctaacaaactggaaaaccctgaggaaatggatatattcctaaaaatatacaacctactgagattgacccaagaagaagtagaaaacctgaacagttaaatagygagtaatgagattaaatcagcaataaaatgtctcccaacaaagaaaagtccaggaacagacagatttatcaatgaattacaccaaatgtataaagaactaataccaattccctcaaactatcctaaaaattaaagaggagggaattctccctaactcattctacaatgatagcatcatcctaataccaaacccagacaaggacacagcaaagaaagaaaactacaggcctatatcactgatgaacatagatgccaaagttctcagcaaaatactagcaaaccgaatccaacagcatatcaaaaaaataatataccatgatcaagtgggatttattccagggatgaagaaatggttcaaaatatgaaaatcagtaattgtgatatatcacatagacagaattaaagacaaaagtcatatgataattttattagatgcagaaaaagcatttgataaaattcaataccctttcatgaataaaaactctcaactaaaagttaggcatagaagaaacatatctcaaaataatagtggtcatatacgacaaacccatagctaatatactgaatggaaaaaagtcaaaagctcatcttctaagaactgtaacaagacaaagatgcccattttcaccactcttattcaacatagtatagaacctccttagcatagcaataagacaagagaaagaaagaaaaggcctccaaattggaaaagaagtcaaattgtccctctttgcaaataacctcattttatatttagaaaaaccaagatttcaccaaaaactcttagaacttacaaacaaattcagtgaagttgcaggatacaaaattaacataaaaatcagtagcatttatatatgcaaatattgaaatagccaaaaagaaatcaagaaggcaattccatttaaaatagctgcaaaaaataaataaaatatatatgaataaatttaatcaaggatgtgaaatatatctacaagaaaaactataaaacactgatgaaagaaatgaggagggcacaaaaaaatggaaggacattttatgcttgtgggttggaagaatttatatcattaatcataccacccaaaggactctacagattcgatgcaatctttatcaaattgacaatttcatttttcacaagaatagaaaaaaaaaatcttaaaatgtgtatggaataaaaaatgagccagaatattcaaagcaatcctgaactaaaagaacaaagctggtggcatcacattatctgacttcagaacatattatgaagctatactaaccaaagcagcatagtattagaataaaaatagatgcatggaccaatggaacagaatagagaacccagaaataaatccaaatatttgcagccaactgatatttcataaagcctccaagaacatacactgggtaaaataaaccgtcttcaaaaaaaaagaaactagatagccatatgcagaagaatgaaactggatccctatctctcaccatatacaaaagtcaactcaagatggattaaagattttaaggtaagatggattaaagattttaaagtaagacccaaaactataaaaccattagaagaacacatagaaaaaactctttgaaacattgctctaggcaaaaattttatggctatgacctcagaagcacaggcaatgaaatccaaaataaacaaatgggatatttaactaaaaatctgcacagcaaaataagcaattaattgagtgaaaagacaacctcttgaatggagaaaacacttgcaaactacttattcaacagggtattaatatccagaatatacaagaactcaacaggaaaaaattctcattaaaaaatggaaaaaagacatgaatagacatttcttaaaagaagatatgcaaatggccaacagtgtatgaaaagatactcgacatcactaatcatcagagaaatgcaaaaaaaaactacaatgatatatcatctcactccagttagaatgccaattactaaaaagacaaaaataacaggtgctggcaagcatgctgagaaaagggaatgcttatatgctgttggagggaatgtaaataagtaaaaccactatggaaagcagtatgtagatttcttaaaaaaactaaaaatttaattaccatacaatccagcaatctcactactgggtatttatccaaaggaaaagaaatcagtacatcaaagggacacctgcactcacatgtctatctcagcactattcacaatagcaaagatttggaattaacctaggtgtccatcaatggatgaatggataaagaaaatgtggcacatatacataatgggaatactatctggtcataaaatagaataaagtcatgtcattcactacaacgtggatggaattggaggtcattaatttaagtgaaataagcaaggcatggaaaggcaaatactacatgttcttactcatatgtgagagctaaaaataaataaataaataacttggtcacatggacacagagaatagaatgatacatacgagataatggatagagtgggtgaatagaagaagggaaaaatgaaaagaagttggctaatgggtacaaaatgcagttagatagaagaaaaagttctaatgtttgttagcagactaaggtgactgtacatagtaacaatattgtgtgtatttcaaaataattagaaaagaggacttgaaatgatatcaaaacatagaaatgatactcaaggtgatagataccccaaatgctgacttgatcattaaacattctatgcatgtcatgaaatgtgcatttttgtaccccacaaaaacattatgtattaataaaagataaaataaaataaaactttttaagtttacagacatgcacaaaaataattgataacagagtgctaaggactgaaagcttttgtccccccaaaattcatacattaacatcctaatcccaaagatgatagtataaacagtggggtttttagtaagkgattaagtcatgagggctttgaatggaattaatgcccttataaaagagcccccagaagccagatagccctttctaccatgtgaagtcactgcaagaaatcagcagtctgcagcctggaagaagatcctcagcagaatccaaccatgctggcactctgattttagactttccagactccagagctgtgagaaataaatctctgttgcctataagtcacccagtctatggtatttggttatagcaggtggagcagaatgagacacagagaattagcaaggatataaaagacctccacaacactagcaaccaagttgacctgactgatactctgtaaaacgttccacttaacagcagaaacagcagaatacacttttttttttttttttttttgagacagggtcttgctgtggcacccaggctgctggaatgcaatggcaagatctctgctcactgcagcctcaacctcctgggctcaagcaatcctctggcctcagcctctagagtaggtgagactacaagggagactccagccatgtgccaccacatgcagctaaattttttatttttttgtggagacctgtattttgttttttgtttgtttgtttcaccatgttgcccaggctgttctcaaactcctgagctcaagtgatccacattcttcagcctcccaaagtgctgggattgcaggcatgtgccaccgtgtctggcccagaatacacattttttaaagagcacatgcagcattttccaggacagaccaaatgacaggctgtaaaacaagtctcaataaattttaaaggattaaattatttaagtgtgttctctgaccataagaacattgaatagaayggaaactaaaacataacgtatcaaaatgtacaagacacagctaacacagttatgagaggtaaattgacagttataaatggacatattagaaatgaaaaaggttttcaaacaatttgtctagatgttcacttcaagtaactagaagaagtgcaaactatccctaaagcaagcagaagtaaagaaataataaagagtaaagcaaaaactaataaaataaaaatagaaaaacaacaggaaaaaatcagtacaaccaaaggttgctactttcaaaagaccaacaaaactgataaagctttagctagactgactaagagaaaaatgaaagaaggcataaatcatgaaaatcagaaatgaaagaagggacataattattgaccatacagaaattttaaaagattataagataatactatgagcaactgtatgccaataatttagacaaactaccaaaaaatggacaaattaccaaaactgactcaagcagaagtataaattttgaatgtactgaaaaagagaaaataaataaattagtaactaaaaatcacccaacaacaacaacaaaaatatcctaagccctgatagcttcactggtgaattctatcgaatatttttataccaattcttcacaaattccttcagaaaatagagcatgaaggagcacttcccagcttctgttgggctggtattacttagacaccaaggccacaaaaagacgtcacaaaaataaaaaacatagatatatgaatcttttttcagacattgacaatccaaaatccagcaacatatgaaaagttttattttcaaatgaaaactacagtgaaatagtcacttcacacccactaattgggctatgatttaaaaagacagacagttacaaatgtgggtgaagatgtagagaaattaaaaccttcatccactgctggttcgaaatgtaggatgatgcagctgctttggaaaacagtctgacagtttctcaacaaattaaatacagaacttctgtgtaaaccagcaatttcccttctaagtatatacccaagaaaaatgaagacataaatccacacaaaaatttgtacacaaatgttcacagcaactttactcataacagccaaaccataattataactcattaattttcatacaatgaaatgttattcagcaataaaagtaaatgaatcactagtatacactgcaatgtagataaccctcaaaacattataagttaaagaaaccattcacagaagaccacatggtatatgataccatttatatgtaatgctgtaataggcaaatctatagagacagaaagtagatcagtygtcacttacactggggatggggtggtgaggaggaggagagatggagagtgactgttaatgggcattgrgtttctttttgcaattatgtgaatgttctaaaattagattgtggtgatagttgcacagctccgtggatatactaaaaatcactgaattgtgcactttaaatgggtgaattgtatgctatgtgaatatatcataataaaactggttttaaaaagttttatatactatgacctaggggaattcattccaggaatgcaagattagcgaacatccagaaatacagtctttctctgactttttatgttaaaaataatactgcaatgaatagacatattgtcatcttttcagagggttgttaaaagacaatacatcactcctctattttctttttcagtttaaaattaagctggaaaatgacacaggaaatggataaatggaaatcagaatatsatccttatttctcataaatccagttgaagagcatggctttagataggcaattaaagtgtctttcgaatccctgcctctcaaactgagcaccctcacaactggacagccaggtgttctccatggggccggtacggaaataagtgtcagagagcaaatcatgctttcaggcaagttggttctcccatccctacttccataccaccaccaccacacccccctccctgcaacaaaaagaaaaaagtgctcaattcaagtgctcccaacctcagcaaaggagttttagtccctacaaatgtacatataaaaaatggagatagatgatactcccataacaagtagtcttgcagagctacttacactagacatgtggaatcataattaaaccttcttatgaataaatatttgtggaataaataaatgactaaataacacatttaacagtatagtactgaattgtttttatcccatctggggtaatatttttattaagtgtctttcatttttatatattgcagggagggacagcttgaggataatcagtactttccagtaaaaccctgccccactcctgtactcctaagggattgccacctgctttcagagtggccaaattctgcttcacttctcatctcctcatataaaaggattcatgttgaattacctagcaaagttgaaaaaaaacacctacagagggtccatcatgggtgatctagggaacagtaacagaagggcacaaaaaagaaaattggtcttgtaattgcattctgtcaaacagctagataagcagccagcagttttgcattagaatgcattcggttatcctatttacaatgggctagtaatcccataaatatttattgctgaactaagaaaagcaacataagcttttaccctttgagaaaggtctgtaacatgcatggtgtcagtaaagtaggaaaccctgatgatttggttacttcttaatatgttagagtctggactgtgcttggcacatgtgaacagtttgaatgcagttgtcagtgcttgttcctggaggacaattgtaagcatatgtttcagtaggtgagctatcaaacccacagctgctctctaccctgaacctgaggcaggacaatgggaaacccaggcattggcagatttaactttgaatggttgagtacagggatcaatccgtttagagagcaacaaatgcaagaacagcaggagaaaaacagaaaaagaaaatacttttcttgagatgattctgtatctgtgtacattacataattttaatcattcattgtggcttgagggaaataactgatgctttccttgaaaggcatggcattcctcaagcaataaatatatttcatttccagttttatatgctgtatgtgtcaagtaaacaaatattaaaaacatatcgcttattgttttacaggtattttcatattctgtttactctccaaaagatttaggcagctagcaatagaagcacaaaaattgaaaagaccaaaaacagctattaataaaacaaagaaaatagtcaaaaataagagaaaggcagagaaaaagaacaaaacctcctgcccccaaaatctccaatagttagccatgatacttaattataaacttcctgtgtaaccaggacaaagaggaaaactcagttaataaatactatcatcctctttttttaaaattattattaatatactttaacttttagggtacatatgcacaacgtgcagatttgttacatatgtatacatgtgccatgttggtgtgctgcacccattaactcatcatttaacattaggtatatctcctaatgctatccctccccacttcccccaccccacaacagtccccggtgtgtgatgttccccttcctgtgtccatgtgttctcattgttcaattcccacctatgagtgagaacatgtggtgtttggttttttgtccttgtgatagtttgctgagaatgatggtttccagcttcatccatgtccctacaaaggatgggaactcatcattttttatggctgcctagtattccatggtgtatatgtgccacattttcttaatccagtctatcattgttggacatctggcttggttccaagtctttgctattgtgaatagtgccgcaataaacatacatgtgcatgtgtctttatagcagcatgatttataatcctttgggtatacacccagtaatggggtggctgggtcaaatggtatttctagttctagatccctgaggaatcgccacaccgacttccacaaaggttgaactagtttacagtctcaccaacagtgtaaaagtgttcctatttctccacatcgtctccagcacctgttgtttcctgactttttaatgatcgccattctaactggtgtgagatggtatctcattatggttttgatttgcattcctctgatgggcagtgatgatgagcattttttcatgtgttttttggctgcataaatgtcttcttttgagaagtgtctgttcatatccttcgcccactttttgatggggttgtttttttcttgtaaatttgttggagttcattgtagattctggatattagccctttgtcagatgagtagattgcaaaaattttctcccattctgtaggttgcctgttcactctgatggtggtttcttttgctgtgcagaggccgtttagtttaattagattccgtttgtcaattttggcttttgttgccattgcttttggtgttttagacatgaagtccttgcccatgcctatgtcctgaatggtattgactaggttttcttctagggtttttatggttttaggtctaacatgtaagtctttaatccatcttgaattaatttttgtataaggtgtaaggaagggatccagtttcagctttctacatatggctagccagttttcccagcaccatttattaaatagggaatcctttccccattgcttgtttttgtcaggttggtcaaagatcagatagttgtagatatgyggcattatttctgagggctctgttctgttccattggtctatatctgttttggaaccagtaccgttctgttttggttactgtagtcttctagtatagtttgaagtcaggtagcatgatgcctccagctttgttcttttggcttaggattgacttggcaatgcgggctcttttttggttccatatgaactttaaagtagttttttccaattctgtgaagaaagtcattggtagcttgatggggatggcattgaatctctaaattaccttgggcagtatggccattttcacaatattgattcttcctacccatgagcatggaatgttcttccatttgtttgtatcctcttttatttccttgagcagtggtttgtagttctccttgaagaggtccttcacatcccttgtaagttggattgctaggtattttattctctttgaagcaattgtgaatgggagttccctcatgatttggctctctgtttgtctgttactggtgtataagaatgctcgtgatttttgcacatttattttgtatcctgaaactttgctgaagttgcttatcagcttaaggagattttgggctgagacaatggggttttctagatatacaatcacgtcatctgaaaacagggacaatttgacttcctcttttcctaattgaatgccctgtatttccttctcctgcctgattgccctggccagaagttccaacactatgttgaataggagtggtgagagaagaatcaaatagatgcaataaaaaatgacaaaggggatatcaccaccaatcccacagaaatacaagctaccatcagagaatactacaaacacctctacacaaataaactagaaaatttagaagaaatgaataaattcctggacacatacactctcccaagactaaaccaggaagaagttgaatctctgaataaaccaataacaggctctgaaattgaggcaacaattaatagcataccaatcaaaaaaagtccaaggccagatggattcacagccgaattctaccagaggtataaggaggaactggtaccatttcttctgaaactattccaatcaatagaaaaagagggaatcctccctaactcattttatgaggccagcatcatcctgataccaaagcctggcagagacacaataaaaaaagagaattttagaccaatatccttgatgaacattgatgcaaaaatcctcaataaaatactggcaagccaaatccagcaacrcagcaaaaagcttatccaccatgatcaagtgggcttcatccctgggatgcaaggctggttcaacatatgaaaatcaataaatttaatccagcatataaacagaaccaaasacaaaaaccacatgattatctcagtagatgcagaaaaggcctttgacaaaattcaacaaccttcatgctaaaaactctcaataaattaggtgttgatgggatgtatctcaaaataataagagctatctatgacaaacccacagccaatatcatactgaatgggcaaaaactggaagcattccctttgaaaactggcacaagacagggatgccctctcttatcatcctcttattttaaaaagttatgagaatttctcaaaactgcacatcaatacaaaatgtgtttttcttgctgtcttggtgtgatgctgaataccactaggcagtgagcaagaggctcttttccttgtgtgtgtgtgtgtgtgtctgtctgtctgtctgtgtgtgtgtgtgtgtgtgtctgtctgtgtgtacagcagaaattctaaaaggaaaataattattctctcttaaatatctgctgtatgtctagtacgtttccaggcactggggatacacagaaaacaaaacagatgtggtcttgccctcactgcacttaaaagctattgagaaagacatgctttgggcaagtaataacaactctgataagtgctactcacagtgatgggtgcataatcctcccatcacagataacagggagattcggcttagccctggtcagtagagcatttatctctgcctaggtgagtggtaggtttaaatatgctaaagtttaaatcctatctcggccgatgaccatccccatagcctcagccatgttgctcagcttctccgtagtaattgtattattgtgaggactaaataggtcttttctcatggcagtctcatgactaagagtatatcagcagaagcttcaaggtctctgagtccaagtcttaaaactcctcaaatctcacttctgctgcatcccactggtcaaagtaagtcacaaaggcaacctagattcaaaggatgagaatacagtttccacccgtttagaggaaatgcaaagtgccatggccattttggcaatcttccacatgacagtggagaatataaaatgaaccaacaagaacataaaatgaacagctcttagtgtatgactggacatggggaagtggaagaaaaaggaaaaaaggagccaatgatgacaccacattttctgtccagagcaaactatgtgggtatttttgcaaatcacttggtactgaattgagaaccagtgaaaatttaaccaacaattttagaatattttgttattatttggagtttttcaaaggtccaaataaatgactcaggctggtgtgagaatcataatcctcaatattattaaatattgttgaatttgttttgactttgatcctcaaaactgaaaacattcttcaatgtgtagaccaagacataaattgcttatactagttccattacaacaaattccacatatatcctgattgataccagttatgttgaagtgtttctaacactgtaaatgcctattcctcccatgtgagaattagcttattttaaggtgttttgactttcacttatataatgattgaaaacttccctgtgaaaaaactattatccatcttcataacagtttccagaaaaattaacagcactaccttaccaaaggacccagaagtaaacattattgaatatattttttgtttgtttttgtttctgtgctgattgttctgtctttcttggctttattgaggtacagttgacaaaaattgtatatattcaaggtgtacaacctgatgttttgatatgtatgcattgtgagataattacactatcaagttaattaaaatatttatcacctcacatagttccaggtatcactacctctttagttaaattcatgaccagggatactaatataaaaatttcaatagtctgagacctcttatcctcaaccctacccatgtaaatgaaactctggtggcttcaatgtgaatactcctaaatatctcttcctgtcttcctttctgcatctatgcagccactgccttaatttaagcttggaacagtacctgaataggtctcccttcctgtacctcccccttttaaagctattgtctgtatgtttctaaaatgtaaatccaattattaacttatcaacttaaaaaaagtgaatttctctaycagagagtccattccaaaccaatattttcaatggattacagaataaattagcagatttatttaacctattctcaaactttcaacaagagaaagcatacatttgcaaggaaattggactgttatttccaagccacactcttcattttcttggctataattcaagcagcatgttcaacattatttgggtggagacattggatataagttgtgtctggtgctttcagtttcaaagtaatggggtttgtttttagtttccaggcttatttctcaccacatgtcagtggcggagaatgatggatatgatgtagctgcatgatgactgcctttcaattttgagtttttgagttgtttgagatctttctctgatgttctacgtggccttgggtcagttaagagcacacacataatgattgcttgctcatgccaaaaatggagagaagaataaaacatggtccttgttctcaaggaccccatagccctgtaggtaagacagaccttcaacaggtaatagtagctcagtgtgatacacactaacataaagttagaggaccaaggtatcaaggaaaagtggattgaggaagggatctggtgaaatgtgggaacatttcacagataagctgacacatgaataagtcttgaaagatgaatagaaatttataggttaaaaagccagggaataatattccagtgaagggggaacagcacagacaattttatgaagatgtaaaacaacatagtacattcaggtgagtgaaatgatttagtgtaatgatttaataggaaaagtggtggaagataaggaacaaaaaggtaggtgggtactaaacccatgaagggcttcctactctgtgcatgcccaaggtgatatacatagggtgcagtgttgggttgaaccataagagataatcctttatgttggtcaaaagagtcaactattggagtttcagagatgcaaaatactacaattcatctgtggagtcttaagccaccttcaactttggcatttagaagtgagtatgcctaacctgacacatccgcttgtgagaaaaagaagcccagtcaacgtttttcaggtagtgggtggttttaccaagggaaaaaaaaaagcactcccaaaagtccaagaacaagagttggactcagctgatggaaatgatccccaccctgccttccccatagcttgctggtttttttgtaaatttcatttttctttctccgtcaattgacattttttacttatagtttctgcttcctcatggctttatctcactatagacatggcaccccaagcccttctccaaatcaaaactttttggcttcagctttctcagcaactgagaacttacaaacctgttttgaaatcctgaaaggatgaatctcattggttcagctaatcttttttttactaggctgtgggttactggccagtttatgagctggttgtccctctttaagtccactacctatcagtagatccattacctgtgactgtgggaataacatggagacgtagtggtaggagggtggatgggaccacttccctcagaagtgattatggtgggcaggcctgttgaggctgagcagctctgcttatttctcccagtaaagttggcataaaagcctctgagttgattctcgaggtctaagaaaatctaatctccaacattgwagtttcagctctaagaacatctaagatatgcatcctaaatgtcattacccagaatgtctataatcttcatcaaacctgatatttctacattaattaattcctaacattactggaatttgagcccaaggttggggggaaatcactaataaagtcacaacagaaagatgccctgttttattaaccaaatgcatctgaccatataaacaattgttgacagtcatttmttttctacctactcacattggatgtgcttgaacatctgctttctgccctttaaaataaaaggcctctcttacaacatcagtggctattagaataggtgagctgcagtgctagcaatagctttgttcttcttcttatcactgcttttgccttctgtttgccaccattagtagcctttgcacataaagcctattaatttctctacagtaagtaaggtggcttgactagtaataagtggcatcaaaatgagctgatttttttaacatgtycagattctagtctggctccaataaatatcaaataaatcatgagacaaatgtcatagacaactcctttttcacttcctatgtcgtgtataagtacatgaaaaatccattcaacagtcactaatgaaygctattaatagataaaatgtcatcaggcaaaagcagagctcagtaacagtacttacaaaatagtcctggattctgaagcggctctctggaaaatctatacccacccccccaccaaatctacataaaatactgttcttacatatctattaaagtgtttcttgaggtgaggggctgggaagggaaaagtaagggtagcgagcaggagaaacggagatctgtttgagctcagcccttcttctagcctcatgttctttcctctccatctcctacacttgttacttatttattagggagagcattacaaataatgtcagacttcctggtagttgcctacagccctgtgatactgcgtataatttgtattccagcattgaagtgtctaacgtggtagaaatgaggagtagcttcctgacacacggactgtgagtgcagagatagtgaagggggtgtagctgaagagcacagcactagctgtctcttggctcctgctgcttcttttattgcctttcccccttctagcttgttcatgccaatatttatccatccatccatccatctatgatctttccatccccttcacacaacttattgtgtacctgtgtgtgtatatcatggtgccagtgaccacaatttgacttaagctcagcatatcaaaatctgtagagagcaaggtccaggaatttgtataattaatcaactctaaagatgattctgattctcagacctgtctgagtaccgcttatttagcagcttcaaatatgtttgacctggattgctaccaccaaggaggtccccctttgactttttcttatctgctgctaaaaccttatcctgattattttcttctcttacaaatgtaacacaaaaggaaaccaataactaatatgtctaaggtttttgccaacatttataattgaaataaatgctaaaattgagttagaggttagtgaaaagaaaaatgtacttttttccccaccatgttcatgggtcccctgaattccatccacaagccccttgggtgcctatggaccccaggttgagaagtactgtaaacaggaattttacagcagtgctgtgcagcacaaaaggcaccaacccatcctagaatcaagcagtcttaagtttagatcccagctccagaatttactcgctatagaacgttcagctagaaggtacttaacttctcaatgtcttcattttgtcttttgtctttttttttagctctaaaatggaattaaragagaattagtaacaataatgtcttataagtttctaaatttaattagataacataggtagtatcttggaacattatgaatgttcaaaattaggttcagtatatattattcacctttccccatgttaatctaaattacctgaaggatccttaggcccagaaaatcattattgtatgaactcactttaactgtatcagctagtcatgttttcagttgaaattactatgtattaatcacattttcaaatatgtgtatgcatgtgtgtatgtatgaaatgaccctaactctgcaatttgtgaatctgtataaatccaccaaatatccagatcccaaycaagcctcaaaacctttcaaagaccctttttaaaagtgttgatttggccaaaaaaatgactgtcttcaattctccacctttagtttgaggcttaccaattaaatgtccctcctctgtgatgtgattttaaagtcagcagtaggccaggcagggtggctcacacctgtaatcccagcactttcggaggcagagacaggtggatcacttgaggccaagagttcgaaaccaaactggccaacagaatgaaaccccatctctactaaaaatacaaacaatagctgggcatggtggtgcatgcctgtaatcccagctactccagaggttgggacaggagaatcgcttgaacctgggaggtggaggttgcagtgagccgagatcacaccactgagctccagcctgagcaacaaagtgagactctgtctcaaaaaaaaaaaaaaaaaaaaaaaaaaaaagtcagcaatgaatgctagatactgcatccagtctctgcagatgctcaaggctgctcaatttgtctagatgattacactgcccaaatgcacacatgatgctcgacattcatctaattgcaggcagccaatctgaattcctcacatgtaggccattgatgactaaatgtatccagagatctggatttacagagaatattttctcataacaacacttaaatctcaaagaattgtttacacccagactctagtcttaacctatcttgtactgtgcagaggaacaagtatgtacaggatagtaagcactgtgtaatttaatttggtagaaaggggaagtgtgatttttatgctgaaagaatactagtttttgtatcacacatacacacacacacacacmcacacacacacacacacacacacacaaatactcatgaacacacattgagcttaacaaaaatttcaaggcaccattctgaaatctgtccattagcacttcaagtgtgattttattcatacatgctggttctcctgaaaaaggtggactttatctcacaagtattttagactaacttaaagacagcatgaagtgctctctgattccatttgtttagagaacaatagcccctctgtgatataacaggaattggatgaaaatatcttctacctattgtttcttctgtatgtgacttgatctttattctctgtaaaaagcagaatttctttgtttccgagaaggatctctcctcaggaggattaaaactcttttcttacagctctttagcagaaatcactttcatagctaaacaagagcatagtaaatggattttttccagaccctaaaacttacataaatgggctctcttgttcacccaaaggtcaggaaaatgcagtctgcaaataacaaatggtagaaatccacataatagactccttggtcataggtgaatttagcagcaggcacttttggaaaatgtgtacacatgtaagttaaaagaatgattctaccaaaatcttgcagatgatgagcagttaaaataatgttgggaaaaaatgactcatcctttttatacttgagatgaacgatgcaaaatggagtgcccttccattgtttacctgtgtctcctgccagacagtgacctccctcagctcgcagggccttacttattttttctcatgtctggcagagagtctcatatatggtagactttcaataaatattagtggaaaatgatgaacacataaatgaattaaaaattgtaaccagcaatgtctaaacaaggtaaaaacaactataatgttatgggctaaattgtatgccccagaaactcatgctgaagtcctaaccctcagtgactcagaatgtgaccttatggaaaggagtctctgaagacaataattagttaagatacggtcacagtggagtagagtgagcccctaattccatgtgactattgttattataaaaaggggaaatttgtagaccgaccctcacacaaggagaatgccatgtgaagaatggagttatgctgccacaaattaatgaactgccagatgctagacatggaacagattcttcccaaagtgcttttcaaatatgaactcacttaattctcaaaatgacccatgagggtggtgttattgtagtcattttacaagtgtgaaaactgagacacatgaagaagttaaaaaatgtgcccaaggtcacacagcttgtgagtgaaggtggacctcaaatccaagcagacaattcctcatgatgtgagaaaagagaccttatcagttccttgcagcaccttgcagagtttgggggtaaactctatcagatctgtaaagctatgcatctcctgttgggttgccgatatttaattgcagctccactattagaaagtaaaaataggccaggcgtggtggctcatgcctgtaatcccagcactttgggaggctgaggtgggcggatcatgaggtcaggagatcgagaccatcctggctaacacggtgaaaccccatctctactgaaaatacaaaaaaattagctgggcttggtggtgggcaccagtagtcccagttaccctggaggctgaggcaggagaatggtgtgaacccaggaggcggagcttgcagtgagctgagattgcaccactgcactccagcctgggtgacagagtgagactccgtcccccccaaaaaaaaaacaacaaaagaaagtaaaaataaaagtagaattatgcctaatagttcaaagattggtgaatagttcaaaatgtttcttttcacccatgacccttttcaccttgatctcagacttctggcttgcagaactgagataataaattgttgttgtttaagccaatcagtttgtgggcattttgttttttacaacacatagccctagcacactaatacacatagcaattaagaatttggaagtaggaagagtaccaaaaatgttgaaaggaaaggagatatcaagaaaacattgctaccagaggcagtgtcctaaccactaattaggatggaagaactggactataatgcctttggaagaaataggcccctgacctggagtcaaggcagtaaccagatggggactcacaggaccaaggtgtccatcaaagggggttgaagatcaaatagcacatgagggcctgctttgaggttggaattagagctggttaaatgttttctttatcaagtttaaattgttgttgggactggaaatggaggggaattgtatgtggagatctagagaatatgaacatagtgaggagggatgcataaactaggaagcagtctgcccaaaataatttcatcatgtttggagcatatttcctacttaaagtaataatcagcagagttaacagacaacccacaaagtgtgagaaaatcttcataatctatacatctgacaaagtactaatatctacagtgtacaaagaactcaaacaaatcagcaagaaaaaaacaaacaattgcatcaaaaagtaggctaagggcatgaatagatcattctcaaaagaagatatacaaatagccaacaagcatacggaaaaatgctcaacatcactaattatcagggaaatgcaaatcaaaaccacaatgtgataccacctaactcctgcaagaatggacataatcaaaaaatcaaaaaatagtaaatgttgatgtggatacagtgaaaagggaagacttttacactgttggtgggaatgtaaactagtataaccacaatgaaaaacagtgtggagattccttaaagaactaaaagtaaatctaccatttgatccagcaatcccactactacttatctacccagagaaaagtaagtcattatataaaaaagatacttgcacatgcatgtttatagcaacacatttgtaattgcaaaactatggaatcagcccaaatgcccatcaatccaccaacgagtggatagagagaaaatgtggcatatatatagtatgcaatactagtcagccataaaaaggaacaaaataatggcatttgtagcaacctgggtggaattggaggctattattctaagtgaagtaactcaggaatggaaaaccaaatatcatatgttctcactcatgagttggagctaagatatgaggacgcaatgcataagaatgatacaatggaatttggggacttgggggaaagactgggaggtgggtgagggataaaagactataaattgggtacagtgtatactgyttgggtgatggatgcaccaaaatctcataaatcaccactaaagaacttattcatgtaaccaaacactacccgttccccaaaaaacctattgaaataaataataaataaacaaacaaataaataaataaaaagttaaattggccatactgcatatgcaatgggattataattttgtatatgccagtggttgattctgccaattattactcgtggaggggttcatgcaagaccctctgcaaagcattgtttgtgatacaaagtattctaggactctggagtaagaccaaagaccaagtctaccactctgccacttatctgctgtgatggaattcccttctagtactgaattttatgctatgacctcagatctatttctaaaaggaggaattcccagtacacagaactaaaatcatcatgtagatctgcagacatacagcctgcaccttccagggattttctctactataaattcactacggagaatttcggtaaagccatgtttttctttaaaaacaatatcagtggcagccaagatggccaaataggaagagctccggtctacagctcccagcgtgagtgacgcagaagacgggtgatttctgcatttccatctgaggtaccgggttcatctcactagggagtgccagacagtgggtgcaggtcagtaggtgcagtgcaccatgcgcaagctgaagcagggcgaggcattgcctcactcgggaagtgcaaggggtcagggagttccctttcctagtcaaagaaaggggtgacagacggcacctggaaaatcgggtcactcccaccctaatactgcgcttttccaacgggcttaaaaaacggtgcaccaagagattatatcctgcacctggctcggagggtcctacacccacggagtcttgctgattgctagcacagcagtctgagatcaaactgcaaggcagcagcaaggctaggggaggggctcccaccattgcccaggcttgcttaggtaaacaaagaagccgggaagctccaactgggtggagcccaccacagctcaaggaggcctgcctgcctctgtaggctccacctctgggggcagggcacagaaaaacaaaaagacagcagtaacctctgcagacttacatgtccctgtctgacagctttgaagagagcagtggttctcccagcacgcagctggagatctgagaacgggcagactgcttcctcaagtgggtccctgacccctgacccccaagcagcctaactgggaggcaccccccgataggggcagactgacacctcacacagccaggtactcttctgagacaaaacttccagaggaatgatcagacagcagcattcgcagttcatgaaaacccgctgttctgcagccaccgctgctgatacccaggcaaacagggtctggagtggacctctagcaaactccaacagacctgcagctgagggtcctctctgttagaaggaaaactaacaaacagaaaggacatccacaccaaaaacccatctgtacatcaccatcatcaaagaccaaaagtagataaaaccacaaagatggggaaaaaacagagcagaaaaactgggaactctaaagagcagagcgcctctcctcctccaaaggaacgcagttcctcaccagcaatggaacaaagctggacggagaatgactttgacgagttgagagaagaaggcttcagacaatcaaactactccgagttacaggaggaaattcaaaccaaaggcaaagaagttaaaaactttgaaaaaaatttagacgaatgtataactagaataaccaatacagagaagtgcttaaaggagctgatggagctgaaagccaaggctcgagaactatgtgaagaatgtagaagcctcaggagctgatgtgatcaactggaagaaagggtatcagtgatggaagatgaaatgattgaaatgaagcgagaagggaagtttagagaaaaaagaataaaaggaaatgaacaaagcctccaagaaatatggaactatgtgaaaagaccaaatctacgtctgattggtgtacctgaaagtgacagggagaatggaaacaagttggaaaacacagtgcaggatattatccaggagaaattccccaatctagcaaggcaggccaacattcagattcaggaaatacagagaacgccacaaagatactcctcgagaagagcaactccaagacacgtagttgtcagattcaccaaagttgaaatgaaggaaaaaatgttaagggcagccagagagaaaggttgggttacccacaaagggaagcccgtcagactaacagtggatctcttggcagaaactctacaagccagaagagagtgggggccaatattcaacattcttatagaattttcaacccagaatttcatatccagccaaactaagcttcataagtgaaggagaaataaaatactttacagacaagcaaatgtggagagattttgtcaccaccaggcctgccctaaaagagctcctgaaagaagcactaaacatggaaaggaacaaccggtaccagccactgcaaaatcatgccaaattgtaaagaccatcgaggctaggaagaaattgcatcaattaatgagcaaaataaccagctaacatcataatgacaggatcaaattcacacataacaatattaactttaaatgtaaatggacttaatgctccatttaaaagacacacactggcaaactggataaagagtcaagacccatcagtgtgctgtattcaggaaacccatctcacgtgcagagacacacataggctcaaaataaaagtatggaggaagatctaccaagtaaatggaaaacaaaaaaaggcaggggttgcaatcctagtctctgataaaacagactttaaaccaacaagatcaaaagagacaaagaaggccattatataatggtaaagggatcaattcaacaagaagagctaactatcctaaatatatatgcacccaatatgagagcacccagattcataaagcaagtcctgagtgacctacaaagagacttagactcccacacaataataatgggagactttaacaccccactgtcaacattagacagatcaatgagacagaaagttascaaggatacccaggaattgaacccagctctgcaccaaggggacctaatagacatctacagaactctccaccccaaatcaacagaatacacatttttttcagcaccacaccacacctattccaaaattgaccacatagttggaagtaaagctctcctcagcaaatgtaaaaaaacagatattataacaaactgtatctcagaccacagtgcaatcaaactagaactcaggattcagaaactcactcaaaaccgctcaactacatggaaactgaaaaacctgctcctgaatgactactgggtacataaagaaatgaaggcagaaataaagatgttctttgaaaccaacgagaacaaagacacaacataccagaatctctgggacacattcaaagcagtgtgtagagggaaatttatagcactaaatgcctgcaagagaaagcaggaaagatccaaaattgacaccctaacatcagaattaaaagaactagaaaagcaagagcaaacacattcaaaagctagcagaaggcaagaaataactaaaatcagagcagaactgaaggaaatagcaacacaaaaaccctttaaaaaattaatgaatccaggagctggttttttgaaaggatcaacaaaattgatagactgctagcaagactaataaagaagaaaagaaagaagaatcaaatagacgcaataaaaaatgataaaggggatatcaccactgatcccacagaaatacaaactaccatgagagaatactacaaacacctctacacaaataaactagaaaatctagcagaaatggataaattccttgacacatacaccctcccaagattaaccaggaagaagttgaatctctgaatagaccaataacaggctctgaaattgtggcaataatcaatagcttaccaaccaaaaagagtccaggaccagatggattcacagcagaattctaccagaggtacaaggaggaactggtaccattctgtctgaaactattccaatcaataggaaaagagggaatcctccctaactcattttatgaggccagcatcatcctgataccaaagccaggcagagacacaaccaaaaaagagaataccaaagcctggcagagacacaaccaaaaaagagaattttagaccaatatccttgatgaacattgatgcaaaaatcctcaataaaatactggcaaaccaaatccagcagcacatcaaaaagtttatccaccacgatcaagtggacttcatccctaggatgcaaggctggttcaatatacgcaaatcaataaatgtaatccagcatataaacagaaccaaagacaaaaaccacacgattatctcaatagatgcagaaaaggcctttgacaaaattcaacaatgcttcatgctaaaaactctcaataaattaggtattgatgggatgtacctcaaaataataagagctatctatgacaaacccacagccaatatcatactgaatgggcaaaaactggaagcattccctttgaaaactggcaaaagacagggatgccctctctcaccacacctattcaacatagtgttggaagttctggccagggcaattaggcaggagaaggaaataaagggtattcaattaggaaaagaggaagtcaaattgtccctgtttgcagaggacatgattgtatatccagaaaaccccattgtctcagcccaaaatctccttaaactgataagcagcttcagcaaagtctcaggatacaaaatcaatgtacaaaaatcacaatcattcttatacaccaataacagacaaacatagagccaaatcatgagtgaactcccattcacaattgcttcaaagagaataaaatacctaggaatccaacctacaagggacgtgaaggacctcttcaaggagaactacaaaccactgctcaatgaaataaaagaggatacaaacaaatggaagaacattccatgctcatgggtaggaagaatcaatatcgtgaaaatggccatactgcccaaggtaatttagagattcaatgccatccccatcaagctaccaatgcctttcttcacagaattggaaaaaactactttaaagttcatatggaaccaaaaaagagcccgcattgccaagtcaatcctaagccaaaagaacaaagctggaggcatcacactacctgacttcaaactatactacaaggctacagtaaccaaaacagcatggtactggtaccaaaacagagatatagatcaatggaacagaatagagcccttggaaataatgccacatatctacaactatctgatctttgacaaacctgagaaaaacaagaaatggggaaaggattccctatttaataaatggtgctgggaaaactggctagccatatgtagaaagctgaaactggatcccttccttacaccttatacaaaaattaattcacgatggattaaagacttacatgttagacctaaaaccataaaatccctagaagaaaacctaggcattaccattcaggacataggcctgggcaaggacttcatgtctaaaacaccaaaagcaatggcaacaaaagccaaaatggacaaatgggatctaattaaactaaagagcttctgcacagcaaaagaaactaccatcagagtatacaggcaacctacaaaatgggagaaaatttttgcaacctactcatctgacaaagggctaatatccagaatctacaatgaactcaaacaaatttacaaggaaaaaacaaacaaccccatcgaaaagtgggtgaaggacatgaacagacacttctaaaaagaagtcgtttatgcagccaaaaaaacacatgaaaaaatgctcaccatcactggccatcagagaaatgcaaatcaaaaccacaatgagatatcatctcacaccagttagaatggcaatcattaaaaagttaggaaacaacaggtgctggagaagatgtggagaaataggaacacttttacactgttggtgggactgtaaactagttcaaccattgtggaagtcagtgtggcgattcctcagggatctagaactagaaataccatttgacccagccatcccattactgggtatataccgaaaggactataatccatgctgctataaagacacatgcatacgtatgtttattgtggcactattcacaatagcaaggactttgaaccaacccaaatgtgcaacaatcatagactggattaagaaaatgtggcacatatacaccatggaatactatgtagccataaaaaatgatgagttcatgtcctttgtagggacatggatgaaattggatatcatcattctcagtaaactatcagaaggacaaaaaaccaaacaccgcatgttctcactcataggtgggaattgaacaatgagaacacatggacactggaaggagaacatcacactctgggtactgttgtggggtcgcgggagtggggagggatagcattaggagatatacctaatgctaaatgatgagttaatgggtgcagcacaccagcatggcacatgtatacatatgtaactaaccttcactttgtgcacatgtaccctaaaagttaaagtataataataataaaaaataaaataatataaaaaaataaaataaaataaaaacaatatcaccagagagatgtcttgtttatttccacttgtctacatgagaccaagcaggggactaattcctgtcctctgcagggcacagaggatagtgcgtgatgaaacgtagtgatgaacaacatggtccactgatgaccctgcccaaaatcataactagaatatttcctaaaacatatattattctttcactactttgtacatcacgtatttagtttgttaaatcttttacttcaaaggatagattttctttttgttaatttgtgcacatatgcatttgtgaagatttagaatttatggatatttgttataawgtatttcaagcraatagaaaatacaacatatacccttgtatccaaattgaataaatgttaacatttgccatttttgtttcaggtatgttttaataaacttgactgataccattaaagcagmcttgcatcttgttttctccattacccctcaagttggggtgtgtccttctcctcatgtgcttatcttattaatgtatatggaattacatgtagattacagattttttaaatttttgtgtgtctatttactatatttttcactcattatcagttttcttgtttcctactttttgtgggactgatcaactttcttctctactgtcttcatattctttctgctagttaaagattatatatctatttctcatctttcaatagttattcttttctggtttttttttttttttgagacaatgtctcactctgtcaccaggctggagtgcagtggctcgatctcggctcactgcaacctccacttcccgggttcaagcaattctcctgcctcagcctcccaagtagctgggactacaggtgcatgccaccacactcagctaatttttgtatttttggtagtgatggggtttcaccatggtggccaggaagatatatatatataaaatacatacatatatatatatatatttgaaaactcatgctctatatgataaatacatacaattttatcaattttataaaaatgatttattgtttaaggtataaaaatgagattgtgattatgttaaaaataggctatatgttttagaatgaatactggaatagttattaataaaaaaagaaaattattttcaaattttaaaaaagacatatacttgattttaaaaagttaaactaatttaaaattttatcttctttttgaacacaataaagtctttatagcaatcatccctcaccaatttttcatgttaattttgtctagtttttaggtctcccttatttattaggggcacaacttaaaaaatatttttatagcagctgattactttgatgtgtccacgtgcttgtcaatgtctttggtcactattctaacatactactttgggttctattttcctattcctgaagaacatgctttagtagttgtttcaccaaaaacttgtgaactctttagtagctttttgttactccgaatgtctttatttcagtctcattttataatagtagttcaactcaatagttattctagtgtaacactattttcttcagtgcatcatcatctggtgtctattgttgctgtctgatgttatcaattgcattaggttggtaagcattccctatcaggggaaaccagcccctgatatttcaacgtaggttcttttctattttccctaagtgtcgaccggtctgagaaataaggggaaagagtaccaaagagagaaattttaaagctgagtgtctgggggagacatcacatgtcrgcaggttccatgatgccccccaagccacaaaaccagcaagtttttattagtgattttcaaaggggagggagtgtatgaatagagtgtgggtcayagagatcacatgcttcacaaggcaataaaaaatatcacaaggcaaatgggggcagaccgagatcacaagaccagggtgaaattaaaattgctaatgaagtttcatgtcccactgggcatgcattgtcattgataacatcttatcaggagacacggtttgagagcagacaactggtctgactaaaatttactaggcaggaatttcctcatcctaataggcctgggagcgctacgggagaccagggcttatttcatcccttatctrcarctgtataagacagacagtcccagagtggccattttagagacctacccctgggaatgcattctctttctcagggctgttccttggtgagaaaaagaattcagtgatatttctcctattcgcttttgtaagaagagacatatggctccgttccgcccagctctcaggtagtcagacctaatggttatctcccttgttccctgaacatcgctgttatcctgttcctttttcaaggtgcccagatttcatattgtttaaacacacatgctttacaaacaatttgtgcagttaagcaatcatcacagggtcctgaggccacatacatcctcagcttatgaagatgacaggattaagagattaaagtaaagacaggcataggaaatcacaagagtattgattggggaagtgataatcttcacaatttatgtttagagattgtagtaaagacaggcataagaaattataaaagtattaatttggggaactaataaatgtccatgaaatcttcacaatttatgttcctctgccatggcttcagccagyccctctttttggggtccctgacttccctcaacaattcccaaaagcatgtgtgtatgaagaaaatacttgactcacagtttcataggaaaacaattgtataggttcttaagtggttacactactactgcatttatcttatcaaaataattcaaattccattaaaatgtacatatattgaatgcatattgaaagccagggattttcataaatttatcccatttattctcacaatcttargaaactgttttaatatctctacactttacagatgaggaaactgaagcccgtggtggtcaagtaatttacttttgatcacacagctgagaaacggcatttgcctgargtaacctargtcttctaattctgaatccagtagagttgcctctagagtcaatattatgtattttaatcccctcacttatttttatgacagtgaaaggagatagaataattgtaattaagatcagaggcactggtcactctcatttaagaatcgcatggtttatgaggaaatcttcctcacagggttcaaggtggaagtcagaccttgaagccccaacatgcccctgaggactgagcaagccgctcttcttcaaagcctgagagacaggaactcagctgcttgcttgcataatcatattcatgagttttagattctgggtagtttccttagctgcacgttgagaaattgaaaaatggcaaaattaaaaataaatgacctttgtaatacagaaaagcctttactctggagaaaaatgtaattcagttttcaggcacattccacttcttttatgatttgaggatatcacaaagcatgccagcaagtytaaggggatgtatttggaggagtaggtcatttctcaggtaaaaaagtgttttatttatggtgtgcaagcatgggaatgagaagrtctgggtttcagcctggacccttgatctgattcgctttaaggacaaccacaagtcacttagactccatgggcttcagttttttcatttgtaaaatgtaaaagtcaaactagatatctcttttaataggtgagctgaatatgtttccatttattggagaaacctcaatctttttatgttttatttaccatattatgtatgcatgattgtaagtatgtaggtagaaagttttttttttttttttttgctttcttttttcccttttcctgacttctgttaaactgatattgatttaaatcttcctggtcttaatgtttgtatgcctgcatgtaggtakgtatttgccactcacttgaaaaatgtacctatattttcttctattaaagattacttktaatttcttcctaatctttaaattaaactttaaaaatataattggattcatgtacagctgtaggaaattataaaggaagagcttgtgtacttttaccttgttttccccagtaataactatatcttgccgaactatagtacaatattacaaccaggatattgacgttattgcagctaacatactgaacaatttcatcagcacagggattccttctgttgctcttttataactatatccccttcctcctttccttcccaaccccacccttgatctctgacaatccctactctgttctctgttgttatatgttgtcatctcaagaattttttacaaatggactcatacagtatgtaaacatttatgattggcttttgtcttgcagcatatatcaatcattcatttttattactgtactggtagtattccttgatatgggtgtaccatagcttatttaaacaattgcctgtgaaaggacatctatgttgtttacagttttgggccattacaaataaagctgttatgaacrtttatgtaaaggtttttatgtgaaaaaaagttttcatttctctgtgataaatgctyaaaagtgtaatttctggatactatggtatttgcatatttagttttaaaataacttgctagactgttttccagagtagttgcaccattgtacattcccaccagcaatatatgggtgatctagtttctctgcatctttgccagcatttttcattattgtcattatttctttattttaaccattctcataagtacatagtaatatatcattgtggttttaatttgcattttctgatggctaacaatggagaatatgttttttgtgcttatctgccatcggtgtatcctctttggtaaaatgtctatttgtgtcttttgccaattttatatttagatttttttgcttttcttactgttgaattttgacagttctttatattttctagatacaacttatttgctgaatatgtggtttgtaaatattttctcaaagtctgttgcttctctcttcatcctcttaatagggtctttcccaaagcatttttccttccatggatcatgcattgcatgtcaagtctaagaagtctttgcctagctatagacaccaaatactttctcctgtgtttttttttccctaaagcttttatagttttacattttacatttaagtccatgattcatgtcgagcaaatttttgaataagaaaatttaggtcaagctttatttttgcccatggatatctaatagttcccacacaatttgtgaaaggactatttttctacattgaattgcttgtgcacctttgtcaataatcaattgggtatagttgtgtgaatctatttctggattcccctttttgttccactcttctaagtatcaatctcttcatcagtaccacactctcataactacaactatacagtaaatcttaatattgggttgaataattctttccactttatttttttggaattgttttacatattttaggggctgtgcattttcatatatattttagaagaagcttatttatgtcaacaaaatccctgatgggatcttgttaaaaattgcatcaaatctacagatcagtttgggggaaaatgatatctttactttcttgagtcttccaatggcatgtatgtatgaacatgatgtctctttactaatttagaacttttctttctttcattgacattttataatttacagcataaagattctgtatatgattctgtgcatattattctgtaaccttgcttcactcacttattagttctaggagagtttttttttaattcttagaattttttcatatagacaattatgtcatctgcaaatagaaatgattttatttcttcctttccaattggtatgctttttactacactcaatttttagatttctagagaaatatacatttcttaatgaagactaaatttattcaatgctattttcctccctgaatgataagatgatgtcacrctttaactgcctcatgttattgtttcttagagtttttgttctacctgctttaaacacacacactaattttggttratctttttaataaaatcaatagttcattaaaattattgacacatcttatcagtttctgtgtttgttatcttttcttgtaacaggtactttcctctaggttcatttttcttgttgctgaagtagtacctttactaagtgttttgtttattaattgaaggcctaaggcctcattcttctccacagtgatatccaattttcctggcaccatttattaaaaagggtgtgtcctttcccattaaatgttcttggctccttttttgaaaatcagttggatgtaaatacaaggatttatttatttctgggttccctattcctttctattggtctatgtgtttttataccagtatcatgtgactttggttattatagctttgtagtatattttgaactctgttaatataacgcctgcaacattgtcctggcactcaggattgttttagctgttcagaatcttttgttattccatacaaattttaggattttttttatctctgtgaaaaagtcattggtattttggtgatgctattacattgtatctgtagactgctttcactttacgtctgtgtgtttcttcattggtcagtgagcttcttgtaggcagcatacagttgagtcttcctttttttttttttattaatccatttggccagtctgtatattttcattggggaatttaatccatttacatccacagttgtttttaatagatgaggacttccttctattactttgttggtagttttttggttgttttatatactctttgttcctttcttccactcttgtttgtgtttgtgatttggtgcttttcatagtgataacattttattcctttttcttacctcatgtattttctctaccagtaaacttcawaactkggcacgttttcatgagagtagacaatgtatttttgcttcctgatgtaggactcccttaagcatttattgcagggccagtctagtggtgatgagttccctcagtctttacttgtctgaaaaaggctttatttcttaaaaatagccttgctgtatataatattcttgactgacaggtttttcttttagtgctatgaatatatcatctcattctgtccaggtctgtaaggtttctgctgagaaatctgttgttagtctmataaggattcccttacatgtgacttgatgtttttctcttgctgttttcagattttttctctgtctttgacttttgatagtttgactatattgtgattctgagagaacttctttggattgaatttacgtaagaatcttttagcttcctatatctggatcttcatacctctcccaagacttggggagttttctgctattatcttgctatatgggtttttaatgcctttccccaccctcttcttctggaattttcataaggcaaacattctttcacttaattatgttctgtatgtctcataggctttttttttcattcttttaatgttctatttctttttaaacakwaacaatttggttatttcagacctaatagatatctacagaactctccaccccaaatcaacagaatatacatttttttcagcaccatgccacacctattccaaaatcgaccacatagttggaagtaaagctctcctcagcaaatgtaaaagaacagaaatgataacaaactgtctctcagaccacagtgcaatcaaactagaactcaggattaagaaactcactcaaaaccactcaaatacatggaaactgaacaacctgctcctgaatgactactgggtacataaagaaatgaaggcagaaataaagacgttctttgaaaccaacgagaacaaagacacaacataccagaatctctgggacacattcaaagcagtgtgtagagggaaatttatagcactaaatgcccacaagagaaagcgggaaagatccaaaattgacaccctaacatcacaattaaaagaactagaaaagcaagagcaaacacattcaaaagctcgcagaagacaagaaataactaaaatcagagcagaacagaaggaaatagagacacaaaaacccttcaaaaaattaatgaatccaggagctggttttttgaaaggatcaacaaaattgatagactgctagcaagactaatagagaagaatcaaatagatgcaataaaaaatgataaaggggatatcaccaccgatcccacagaaatacaaactacccatcagagaatactataaatacctctacacaaataaactagaaaatctagaagaaatggataaattccttgacacatacaccctcccaagactaaaccaggaagaagttgaatctctgaatagaccaataacaggctctgaaattgaggcaataatcaatagcttaccaaccaaaaagagtccaggaccagatggattcacagccgaattctaccagaggtacaaggaggaactggtaccattccttctgaaactattccaatcaataggaaaagagggaatcctccctaactcattttatgaggccagcatcatcytgacaccaaagcctggcagagacacaaccaaaaaagagaattttagaccaatatccttgatgaacattgatgcaaaaatcctcaataaaatactggcaaactgaatccagcagcacattaaaaagcttatccaccatgatcaagtgggcttcatccctgggatgcaagtctggttcaatatacacaaatcaataaatgtaatccagcatataaacagaaccaaagacaaaaaccacatgattatctcaatagatgcagaaaaggcctttgacaacattcaaaaaccttcatgctaaaaactctcaataaattaggtattgatgggacctatstcaaaataataagagctatctatgacaaacccacagccaatatcatactgaatggataaattcataaattctttatcctgcttgatctagtctattgtggaagttttcaattgcattcttattccactcattgaatctgctgttccaatatttcaatatttctgtttgattctgttttatatctatctctttgttgaatttttcattgagatcatagttttcaagattttgttgaattatctatctgtactccctygtttctcactgaatgtccttaagattgtcattttgaattccttttcaggaatttcatagatttccttttctattactgaagagttattgtgttcctttgagagtgtcatgtttccttgctttttaatatttcctatgtccctacattgacgtttgtgcatctggtggaacagtcacttcttccaactttatggagtaactttctcaggaaatactttttcctgtagatgtgtcctatggagttgattgggtatggtgctttggcattggttctgggtaggtgcagtagtgtagtctttgtatgatttgttcagctgtaataaatgtcagtggtgtatacaattgtctccatggcctaggctgtgattgtttgtgaaggctgtggtatggctttgctaagttgtgctggttcttgggttcttggggagtgcataagcatgcagcaactctgccttgggagaaggtaggctcactgtggcaacagttgtccccaggagggttggttctcaggctactgggaggtatatacattggcagttctacctctggaggcagtttggccatggcagctcttggttctggggagtacatacattagctccttctgctctgggggaagcctccccactatgctggatcacttgtgcgatcagggtgtagagtgctatgtgggcttggtgctggggtcagcgctgtacaattgagttcagctggtatcaagacacttcagccctcagagtggatatgggggagtgtcagcaggacttcaattatgtggagatgcagggactaatgagccccacggcaggatgcattctggtggtggctccactctcaaaatggcaccatgctgtagcaactgtgtcagaaatyccacagaattttctccctggaaagatgtagacacatggattccaggcagctccctagtctgggctcaggacctgcaagagttgtggggcttttctgtaggtagggttgcaggcatccatggtaggaatatagacttctggggatctcctgattaccttctcctcacaatggggagcctcttttggctccaagccattctcccagccaggtgctttgcttccctctctgtgctgagtttctgtgcctcagagggtctttgtcacttatttgctgaattccagtgttctcccttagacatrctatttgatgtgtggttatctatttgttgttttgatctytttttgtggaggaggtgagtgctgcatgcctctagtcagccatcttgatgaccaattaaatgtgcacagtttaaagttcttgtcacaaccatcattttttaaaacttgaaataaatgtgtgttccagttgttgattttgttgactttcttactaagagagcttcatattgtgaactttccatatattttcaaattttagctgttaaatttgtttcgagtgggaagttttagtttttccctctttttcctcccagattcaccttcttctggtctggcattcttggcagcttccagtatccacccaccttcactgactctaggctttcagttgagaaccaggtcttacagtgatttttcagagctctctgcctctgatattgtggctatcacaaaccaatcaccgagccaacaggcatcttggttcagttctatggggatgaatgcttgttctatccccccagaacctctgagagcatcttgtgaagtcacaatttcaggaagcaaaaacagagccattctccccttttccacataagaaaagtgcctctacctcagttccaggcttcattgagcctgtccttagtattttttgtgaaagcactatccacatttctctctaaagattaaaactttcacakccactgctggctcacagaccagggtccagcaggtctgaggcttcattttcatttatcgtttttgtgtttctttcctgkttttgattgcatatataactcatcttttaaacccatcagtgcctttctgcatggcctcttttaatattttattgctgtatatttgaagtaaaagaagtatattagaatgtgaacggtactgcttgaaacaaaacctgaactagcactaatatcattttatctrtgtgactttatgatagagctttatcaaattgcctggatatacatacacacacaaacacaattagttaatgtaaaagctggagaaaactgcatgtgctccataataattaatagtattgtaccaatrtcaattccttgtttgatatttacaacagttatatatgatgttgcagaggggaaagccaaatgaagtgttcccaggattcaatgtactatgtttgcaactttctgtgagatcgtaattatttcaaaagaaaaagtttmaaaactaaggttatatagttatacaaatatcaaattgcttttatcatttttcattcaagaactaggcagttctgaggaaaaacaaatgatatgccatataaagtcatttggccctgtacatgatgcatggaaagcattaattaaattttattttatctcctttcctagtaatcatatttctatgccaacttttttttcccagtgtgatctaccttgtgtcttgtttgttcatttatttgttcacatarcaaattcttttgaagcaccaattatgtgtcaagcactacattaagccctggaatatcaaagattaataagatagaatttctttatccaaggttcttctaatctattggaaaggaaaaaacatgtaagcagctacaaaataatctgataattatatgaagtragtgctgccagaacacagaagagggaacatttgtctttgtgactcagttacagcatcccagagtatatacaggctagatcctaaagggtaaggagggatttttcagaatgtgaggaattttatgggataactggcctgatttcttacaaatgaatgatatgaataaaaagcatgctgggaagattgctacagattaaaagatacttaagaaggaaatcaaccaaatgatagtcatcatttgaataaaacaactgcaaaaagacattcatggtataatcaaagaaatttgaaaacaaattggatggatagtaagaaattattgttaatactgagtaatagtaatggcatgcccaaagatataatattgttaataatactgggagttacagaattatcgktatatatatatatatatatacatatatatatataattgttatttttgttaggcacaataacagtattgttatttaacttatatcctttatgtcagagttacaaactgaagtattcacaaataaaatgatatgatgactgggacttgccataaaatgctctagaaaacaacattgtggaagatagatgacatatgatgaataaaaagtgactaaatcttgaacttggtgtatgggtgaatggaaattcattaacactgttctccctgtgctaattctatgtttggaaattcccataataaaaagtaaaatttattccacaatcatcaacattttacgtagcagattcagattatttagcgcctaatcttcattttaatttattctgagtcatagatagcattgattaattgtctcagtcatggtagtaatattttcttctcagtcatagtctcttgtatttcagttaggtaccagccatgtcatcaggaattaaaaaaattttagtgaagttatttgtgtttcctctgtgcattggatgaagatgacatttttttcagagaaattactgggaaaaaaaaatcactctgccttctttaacattccatgtgtgagtgattttatcggctctgaaattgtaaacccacacttttgactctgagaataagctgataagattttaaaaccttctacccaaaagactgcacaataatttttttaaaaacttcaagtagtctcaataaatacattttgctttttaaaaataagcaaaatataaaatgtttggagctaaggatgctggatgaaggaagaaaagaaaaatcactccaggcagggaaagcagcaaattttttaacaaaaagcttatgttaggaaaatgttgaaatattgactggaaaactgggaaccaaggtggggacagtgaggatatgaagctgaaagatagttaggaaccacatgactaatagtatttccaaactaacaagttcttccccacaaagaattttactgtttaatccctataggcaagagataaccaatgcagatttgcaacgaaggaataacagagctgtgtttgttttgtatgtatctcaggtagtgatatggagtatggaataaaggaagaatgagctggcatcaggggaatcaatgaggaaccttttttaatagtataaacaatagacaatgagggctaaactacatcatggcattgagaatggaagtaaatgctttgtctgcaactaattcagttaagacttcgaggctcactgtaagaggtgggaagaagaggaacatattacttgatggtaacatcattaaccaagtgtgagaatatggaacttagagtaggcttggggagggaggacgtaatgagcacagtattagacatgttaatcatgaagctctataggacaaccaggcagagctcatggctggaggctagctgtcctttgctgaagcaaaatatattgtctattgtaraatgagaagaccgaaggcaaaactctggtgaaccgacaaactaatatgtgaaagaacttgtaggctgaaagagtaatgggcagagacgaggagaaccatagtaaaatattgtctagggtaatttcagaaaaacttcttggagtaagtgagatgaagcttgattatgttagaataccatattagggagctgtaagaatccatgaagaagaaactctaagtaaacaaacataaacatgaatgtgcatatttagctaagtaatttgaagcaatctgagtctacaaagcctttatttttgtttaattatctttgtgctatttgcttcctggtagtttatattctcccaaacttatcatgggcataattaaaagcaggagaattttaattaatgctgattgcattttattgtgagacagttgcaaaattcaaagcctttgcatcttataacaatgagctgcagggttttagctcttggtttttataaaatgayagttgaggtaagaatgataccaataattccctggtatcatgtctttcccttctttattgatagtaaatgtttccttttattttgtatctacaaagtcaattctcagatatctccctgccaaacgtgagaatctgtggcaaaattttacattattaaaatagaaacacaatggtgggttttattttatcctttgcttatttgtctgtttcctctttcactatatcaagacagaggtcttgtctccataccaaagttcagtttttatactcaaacacttaaatatcttttctattcttaacaaaagtttctgggaaatttttcttttaaggttatgatgtttcttttcagaagaaggagaaagagcagttgaatactggctggtgctttccattagtgttacaggtaatttcatgtgtaatgaggggaactctttgggcaagaaacagaatttggaagacaattctgcttccctttttgaattgtgtcattattttaaaagtgttcatcaatttctaaatcatatactgaaagtagaagacacatacctatgtgtcctgatctacatctttaacaaagaaacgtaagcattagttgagatgataaaatatgacatataagcttgctaaaatgacctttttcagctcctgtacccttctcttttggaggacacgacaggtgggtgttccctgagaaggtattcacaagcccatgagtgtgagttttactaaatgacattaaattattgaaaatgtaaaattgggaaaataatgaatttttatttgccaaataaaaattcggcgaatttttatttgccaacagagaccccccagaagctgtacttttygatgcaatgttcctatagccttgctacggaaaagcctttatagagggtgatgggcaaagccacagattagggctggaaaaaaatccctccaggatacaaatttgaagattcatttttctcattactggtttacaacccagtgtgaagcttaaattggattgatcaaggtggaaaaatctttctgttatcaaaatggagcatattgccaaaaggaaaaggcaccaactgacctatagtgattgttctattgctgattttatcttcttcatgctagggcataatttatttcctctcactggaatggaagagaatctttgaaggagtctgagtaaaaggcagcaaaaggaaaattctattgataaaaatacaaaamttgaaagcagttgaaatctttaatataagaagtgtttcaagaacattaatatgaggtaaattatgtactaatcaattttaaagcattttaccttaacagtctgacccgcatgtacataacatacatgctgattttgcatggcttcttaagtattagaatgaaagtatcccaaaatacctaaatacctaaattaactaatctaggaggatctaagtaaggacaatacaaggaacacttatgtttgaacccagtttggaacataattttcaactctttctcattttctgcactgatgtgggaggtcactgatgttatattatacttgtcattcttgggctaaatattcaacctgcactgttatgtgtaccttgaggagtcctaggagcagtccttaggggacttccttttgccgaaggtgtttgctagtgaataaatgcagtcgtgcatcacttaatgacaaggaaacatcctgagaagtgcattcttaggcaattttgtctctgtgtgaacatcacagaatgtacctccacacatctagatggcatagccttctacacacttaggttatgtggcatagcctattgttcctaggctacaaacmtgtacagcatgttattgtaggcaattgtaacacaatagtaattatgtagatatctaaacatagaacaggtacagtaaaaatgtaggtggtataaaagatttaaaatggtacatctgtacagagcacttagcatgagtggagcatgcaggactggaagttgctctgggtgagtcagtgggtgagtggtgagtgaatgtgaaggcctgggcgattactatatactactgaagactttataaacactgtacacttaggctacacaactatgttaaaacaataagtaattatactatgatgttatgacagctgcaatgtcactaggcgacaggattttttcagctccattataatcttatggtaccatttttatatattcagtccactattgaccaatatgtcatatgcagcagatgactatatacaaaagcaagggaaaccacagttttttcttccttgatatcataatgtttaatacagataaattacctgtaacactgaacagaaaatctcacaggatatagttcaataatgttatggagctgaagactgatagcaaagtcaaatacagtatttataaaatgaattttttgtgtaattagttttaaaacctagcatcatactaaggccctcagatttcaacaaaaagaagaatgttgctttgagacgattaaaacagactgattaagaaagcccttcgtaacctggcacaaatctacctttccacttcaagacagccactttctgttatgcagctcaagtgtaggagtaccttccacctttataatcgctggagatttgtatatttagggcaataattttctgacagatgactaagggcaaggctttctagttctcagaaaagtgtcatttgggctcaaggtagtgtcattcrggctcaaggtagtgtcattccaaccttattcgctatagtatctaaaatcaaactctcacaccagttgtcttacattggattccatgagaaacaagctcgctggtggaaagtttcatacaagaaatttaatggcatatgtgcttgcatgaatgaacacctggaggaagtacaggaagtaggattaagcagaggggagaactgaactgctatgcaatcttaacaaagacatcaggcaattccatgggaacacttgagctgtgatatcccttcaaaattgttcactttgagggaaggagattgagattttatacccctgyattgaccagccattggatatggactcttacaggatagaggacatgacattgggtcagacatttttcttcagctgagagtaattccgtgaaagtatctgagcagtaaactatcaaccaccaatattctcaatagctgagagaatgagtacttggtcccgtatggggaatttgagtggcatgccactacacctactacactagccctacctttgcagtattctcattgtttctcctatccattaatgtaacagatatttattaggtacccaacctactggatgccagacatctgctgggtcttggcaacataaatttgaatataaagtgattctgcagtctaagcggaaaaaataccacctcttcaacacacacacacacacacacacacacacacacaaatagtggtgagtgctctaaaaatgatagacacaacatgctttggaaatgcaaaggagaaaatgtttgacttcctggggaaatttagtcagwcttcatgggagaaacatgagcctaacatatgtatattgcaatttccatgctttctacttgccctgattgtcctctccactatwtttcacctatttagagcctcttctatatggctctgaccagtyctaactctaccacaagctttatatctaccactmtttaacccactttatgatctgagcaacctctgttgtgaactgcactagaattagcccctgatgccacatgccatttaccttctcctggaggtgtcatgtcactctatctaaatggcaaaaccagcaggacagggtcaacacaatacttaagtgaagattgtcatatcacagaatgyagaacccaaaragtatttagagatgatcttgaccaagcatgtcaaatgcaggggagtggggcaggcaagaaaggaaattgtgattttcttgaggtatttcagcaaagaaagcaaagatttaagcttaggaccaagtccatggaccccacccattgccttacactatctctgccaatgaatgaaaccattcacaggtttagtcttaaaaaaagtttaaggaaactttgaagtatgtgttagaaagtagacttttttcaccaaagtaatagacaaactttatcmagctgagtgatcttatttataactcccatggactattctgttttactagacacatttaggggaagatcaaaagtatcttttattggagattcaacaaatggttggggcaaatccataataaattgtgtatgtccaattgagctactatggagaaactgaaaatattgaaaatgtttttgttctctctaatctttatagtctgtttccaaaaatgtccaggtgatataatgagacaaaattcactagtttagataaactactggcttgaatggctttgacaatttgtgtatctgcatgtgtgtgtgtttgtcgtctttatgcatagctatatttaaaccagccaaacctactgagcgaaacaatggtccctaaacctgactgacaatcagaattacccagaggtattttcaaatattcctgagtcccagtctctggagatgtgcactgaccatgtatgatatgtggtctaaacagctacctatgagaggctccccagataatcttcagtgcagccaggcttagaaattgtattataaagtatggggtgacagagcttggctgctctgtggtgctgctacagagggcagagtggtcctgccctctggcttatggcccctgactgctggtcagcttcaggcagccccactagtcacagagaggtctggagtgagggaaggaagggcaccgcagcagccatgccgtgaaaactgacaaacatattttacatgccatgtcaatagcatccctgaaggtgagttctaacaagtgcctcactctaatataatacttgctcctggctcaggcctcctcctcccctaatcatcgagtcacgtactctacacccttctctgctcatctctgataatcatgttggaaattgcctaaagagatactgcactttaataacctatgttatcttagcctcatttcctaacttaaaagaacaatagatcgttggaaataccatgaaggcaatttgagccataaaggcataaacaaaaataggtattaccataagagtaacaagtggtgtgtgtgwgtgtttgtgtgtgtgtgtattcttaaaaatctagtccaagaaaatgaactttatttatttaaatttgcttgagtaaggccttatgcakttattatgatggcagatcaaaccctgctcaaaaatgtgatcatcatctctactgacttctatattctctttaattcagaattattaagttctcttaggcagtacatattaaaatttccttggagcaagagtctcttttctctaactgtgttaaataagatttcccacgtaaaatatttctatccattccatagtaacaaggctgattttaaatggatgaacgtagagaaattgagttccattccctaaacactccataattaccaaataacaggcactgattgctccaagacaaaaacctgatctcattagtacctgctgtttgggtagggagaagacaattacatgtgaagggtactaagcttttggaaatgctaattaattatacattatttattggaaatacaatgctctccttgtactgtagctaggaaaacagaggaagtgtaagaacttaaacagctgagacatgctgaattgtaatgaactatagtcattgtttcaaatctgggatcctttactggtttaaatacaatacctactctcaaagtctttttcttttatcagaacgggctatcaaggtctaagagtgtggaaaggaaattactcagttatttggcaggctttagccaaactaagctggtataggtggtttaattttcattttacaaaggtaaataatagataaataagtaacagtaaatagtaaataaacaatttcccagcccaaaccaaaaggctggtatcaataaagagataggagcttggcatgtgatggtttctgacaaagtaaattgctttgcatcattgytgtagaattgtacccatgctataaagtctttatacagtgctttcctgttagctggcattagtaacaaaagactaagagagcatgggatctctttacacacgaggcaaagaactggaagtaaggacttccatttctcacaagcctagcaatttgccttctctgcagtttatatgtcaagtgtgccagggaaaaaaatagccttacaggttaaaccgagcagygttaccttgatttgctctcataatgtgatttttaataattatccatcaattcttccaaatatgtggagagcaaatgctagaatgtgaagaatacatatagttaacttgaaatttttatgtaatttattatttcacctaaatcatctggctggcagcatgacacatgggcaagaggcagatgacctgtgtgtctctctgacacctgctcccaagtccattattatcctcaattstctatcacatgaatatggtagaccagatagaagtctacaaacttaaaaatatatatattgtgtaaattttaaaacaaataagagtagacaatacagtataatgaagctctatgtatccaccattcagcttcaaccattggcaatacaatttctaataattaacattaagaaacattaagttaataagtactcacacatggcttatatgtaaattataaacagttatgtttacatttatgagctacaccaaggtattatgcacattttagaacacagatcataagtataaaattttaaaacatggaataaaatataatgaagttctgcacatgaaagttcatagcagatttatatgtgacagctgggagctagaaaccatctagatgtccttcatcaggtgaaragaaaagccaacaggtatattcacacaatgcaatactactcagtagtaaaaaaaaaaaatttaaaaaaactattgctatctattgatatatgcaataacattgtaagcagccagtctgaaaagacaacatattttgttgttccactttttttcacattctagaaaagataaaactattgttacataaaattaatcagtgtttgccagaggttataggtggggtaagaatataattataaaagattatctgagacagttctttgaggtgataaaactgtcttgagcctagttgtaatatggctatacaaatctacacacatattaaaattcatagaactgcaaaatacatgccaaaaaagtccattttattgtatgataatatacaaaaaaagaattaaaaaataatcgaatttaaatgctttctctttacaatcacatggttcattactcacattaatttaagaaccagtagactagattacctctaagttctctgttagtgatgatcataatctgaaataatgaggttaatataataaactagctaaaaaaattttgacgcttctcccattgagacaggaggagtcaacacccactctgaatctgttagagctctgtgattgctttgacaaatggaacacagaggaaatgttactatgtctatttggggagccagatcttaagatactagaagcttctaccttgacatggaacacttactcttggaactcagccaccatgctgtgagaaaggccaascaagcagctccgtagataatctcatgaagaaagaaactaagactcctggctgagctcccagccagcagctaggaccaacttgccagacatgtgagtgagtgaggctgttggaagtaactatctagctccagtcaaaccacccctgctgacgctgcaaggatggagatgagacatcccaccaagcactttctaaatttcagaatcatgatcaaaataaatcactggggttgtttcaagctgctaagtttkgggaggtttattatatagtaatagtcaatttgtttgatagataatataataatagatatgtttgttatatagtaatagataatacagaacttaaaccattcttcaagaaaaagtaggcttcagagtcatgagttattgccttaatgcagaggttttttagtgtgtcaacctcagcaacctgaataagaatgatctgaagtgttgtgaaaaatgccaaacctaatgcatcagaatctcttgaattggggatccagaaactcagttttaacaagcttcccacatggttcttctgcatcctaatgtttgacgcccagcatttcagtcacactgaaaagattaattgaaagtaactggaccccaggatgatgtcacacgtcactaccacaaaaggtaaagaaacttagtgaagaaaaaaataccgtaagcaaaccaggtagagaggtccctgaagtgggcttgttctacaagacaaaatagagcccagcaaaggataaattctaaatgggcatgaaaagtaagagataataagatcaggtatattgccgaaaatagatatgacataaacagacatatcatattaataggatatttaagtcctgtgattttatgatttttgacaaattaaataagaatgataacatgaaggcaagattaacaaggctaaatttattttgttgtttgttaactagatagatagatagatagatagatagatagatagatagatctatttaaaaggaaagccatttaaaagctataaccacctttctttctttatgtaaatacaaacttttaaattcattagcaatattaatggctaaactagactcccataaggtattcttttcactttcatcccaaaatgaaagagagaaagagagaaaaggaaaaaaaataattgctacatctgcttcaaattaactttgaaataaagtgggaaatgaacaaattgaagacataaacattgtgttctagttactaaaaaagcaaaagcatgcatcaaaggagaagccagaatcctattgtagatatacatatttcaaactcaagaagctcaaagtagtctctgaaaggtagaaatgaaagggatctaagagtcatgatagaacatagaaaatttctaggtacattttcagaaacctatattttctggttttgttttcattttttaccagggctaaaagtcacctggctcaacattttctatagactttttgtagccacttayacagtatctatgattcatatttaattattactgttttctcccactaagaaacaaaaatccagacttttccctttatactcaatatgcagaagtgtactaggattaaacctgggttgtagtagtaaactcaagagttgatataaatggtaaatagcattaaccaagggactgaataataagataatacatgtaaacatacttaatatagactcctgcacattataagggcccaattaacataatttgccttaaatttttctaaagctaaattaattccttttgctttatgttatctctataaaagtagttatatttctgaaaacctgtcagaaattaagcataaaacttccactgagcagcagggccctctccactccaagcccaggcacttggacagctcaatcagcagcctgagctgcccaacccttcctgtgcagagactgtggtrcaacagggtcctctatgctccacacccaggattaggagtttacctccccaccacccatgcagagaacttccagcagaagagaattctcasctccatgcctagacacacgtctcagtgcttagtgccttctcactggacatcccttcagcactgatgcttgtgcctgccattggtggacctgcaagcaggcctgcctgtttcagtcccacccatcttggaccctccccacagggatgagcaagaagctcagactgccctatatactccacgtatcagcccattgcttgaggcagcagagagagtttctctcaataaataataatcaactatcagacccacctgcagttaactcttacccatatgcgccatcagttggcctgtagtttgagttacacagcccaatataagacctgctgacagaattgcgtagaagaaaagccaaagaccctaccccagcattctctacagtcacacctcctaggaaagtagggaaaggaaaatgaaaaaataaataaatacaagggaaaaatgaaaaaaattacaaaatttaaaagtgccagcatccccagatgagacggaaccagcacaagaattatggctccatgaaaaacctgaatgtggtgacaccaaagaatcacactagctctccagaaatcctccctaaacaaaatggaatttcagaaatgacatgaataattcaaagcatggattgtaaggatgctcaaatgagatccaagacaagtttgaaatcaaaacaaagaaacttctaaagcaatccagaaaataaggaacagatacatagctttaaaataatcaatcagagcttttggaattgacaaacttacttaagaaatttcaaaatacaaatgaaagttttatcaatagactagaccaagcagaagaaagaatttcagagcttgaagactagtctttcaaactaacccagttagctaaaaataaagaaaaaaaaattttaatgagcaagaccttcaagaaatatgggattatgtaaagtgaccaaatctatgaattattagaattcctgagagaggagaataacttggaaaacatatttgagacaataattcaataaaatttccttaactctgctagatggtcagacatccagatataagaaatccagagaacatctgtgagatgttatacaaagcaagtattgtcaaggcatatagtcaccagactgtccaaggccaacgataaagaacaatcttaaaggcagcttaaaaaaagaaatatcagaccatgtacaaagagaagcccatcaggctaaaagcagacatctcagtaaaaaatatacaaaccagaagagataagaggcctattttcagcattcttagagaaattccaaccaagaattttatatctcaccaaattaagcttcataagtgagagagaaataaaatcttttccataaaagccatcactaaggaaattcattatcactttaccagcattataggaaatccctaaggaagttctaaacagaaacaaaagaacaatacctggtatgaccaaacagacacacacacacacacacacacacacacacacacacacacacactcttaagtacatatcccacagactctataaagttactaatatatagaaactacaaacagtgaacaacttcacaataggatcaaaacctcacatatcaatattaaccctgaatgtaaactgcctaacaccccacttaaaaggcacagagtggccaggtggataaaaagcgaaaacccatctgtctgctatattcaagagacccaactcacatgtaacaacactcataggctcaaagtaaaaggttggagtaaacattatcattataatgatattttatcattatgtaataaaacattattacataatgataaagaatccaattcaacaagatgacttaactatcctaaatatatatgcacccaatattggagcacccagatacataaaacaagtacttctagagctatgaaaagacttaggcagccaaacaatcatagtgagggacttcaacacctcaccatcagctttagacagatcactaaggcagataactggcaaagatattctggacttaaactcgacacttggccaattggacttaagagagatctacagaatatttcacccatcaaccacagaatatacattcttctcatctacacacaaaacatactccataatagaccacatgctcagccataaagcaagtctcaataaattcaacaaaacttaacatacgaaccattgttttggaccaaagtaaaataaaaatagcaatcaataccaagaaaatctctcaaaactacacaattacatggaaattaaacaacttgctcccgaataacttctgggtaaataataaaattaaggcagaaatgaaaaaattctttgaaataaatgaaaacagagacacagcataccaaaatctttgggatgcagcaaaagcagtgttaagaggaaagtttatagtgcaaaaaacctacatcaagaagttagaaagatctcaaattaatgatctaacatcacacaaatacaagaacaaaataaccccaaagctagcagaagaaaatgaataaccaaaatcagagcagaactgaacaaaattaagatgtacaaatccatacaaccratcaacaaaaccaaaaattggctctttcaaacaataaacaagattgaccactagctagattaacaaagaaaaaaagaaagaaggtcctaacaggcaaaatcagaaatgacaaagttgacattacaaccaatcccacagaaatatacaaaagatcatcaaagactattatgaacacctttatgcacacaaactagaaaatccagaggaaatggatcaactcctggaaacaaaacaacctcccaagattgtatcaggaagaaattgtaatgctgaacagaccaatatccaattccaaaattgaatcagtagtagaaaacctaccaacaaaaaaaaaagccccacatggattcacagccaagtcctgcaagatgtacaaagaagagctgatactagttttaatgaaactattcaaaaaaattgagggggagggactcctccctaactcattttataaagccagcattaccctgataccaaaatatggcaaagacaccacgaaaaaagaaaactacaggtcaatattactgaagaacatagayagaaaaatactcaacaaaatgctagcaaactgaagctagaaatcacatcaaaaagttaattcaccatgaccaagtgggctttatttctgggatgcaaggttggttcaacatatgcaagtcagtaaatgtgatttaccacataacagaatgaaaaacaaaaatcaaatgatgatctcaatagatgtagaacaggcttttggtaaaatccaaaatggctttatgataaaaacactcaacgaattaggcttagaaagaacatacctcaaaatagtaagaacggtctaagagaaacccacagccaacatcatactgaatgggcagaagttggaagcatgccccttaagaacaggaagaaaacaaaaatgcccactctcactactattattctacctggcactggaagtgctagccagagcaatcagtcaagagaaataaataaaatgtatccaaataggaaaagaagaattcaaactacttctctttgctgacaatatgattctatacctagaaaactttaaagactctacccaaagatgcctagaactgacaaatgagttcagtaaagttttaggatacaaaatcaatgtatgaaaaccagtagcacttctatacaccaataacattcaaactgagagccaaaacaaaaatgcaattccatttataataactacacacacacacaccacaaatacctaggaatacatctaaccaaggaagtgaaaagatctctacaaagagaactataaaacactgttgaaagaaaacataagtgacacaaacaaatggaaaaacattccatgctcatggattggaagaatcaacataaataaaaagaccatactgcccaaagcaatcaatagattcaatgttattcctatcaaattaccaatgtcatttttcacagaaccagaaaaaactactctaaaatagtttttagagtagttggctttaatagccaaggcaatcgtaagcaaaaagaacaaagcctgaagcatcacattacctgactttaaaatatacaataaggcagcagtaatcaaaacagcatggtactggtacaaaaacagacagaccaatggaactgaatagagaacccaaaactaaagccacacaagtgcaaccatctgactttgacaaagctaacaaaaataagcaatgggaaaaggactcccctattcaataaatgctgctggaatcactggctagccacattcagaagaataaatttgaatacctacctttcacayatacaatactgaaaatggattaaatatcttatatgtaagaccttaacctataaaaatcttagaagaaaacctaggaaataccattctggacattggctttagcaaataatttatgactaagtcctcgaaagcaattgmaacaaaaacaaaacttgacaaatgggacctaattaaactaaagagcttccgcacaacaaaagatactattgacggagtaaacagacaacctacagagcgggagaaaatattagcaaactatgcattcaacaaagatctaatatccagaatctatagggaacttcttcaattcaacaagcaaaaagcaattcaacaagcaaaaaaccagtaatcccattaaaaagtgggcaaaggatttgaacagacactttttgaaagaagacttaaaagcggccaacaaacatatgaaaaattgctcaatatcattattcatcagagaaatgcaaaccaaaaccacaatgagatacatcctaccctagtcgcaatggctattattaggaagtcaaaaaacaacagatgctggtgaggctgtgaagaaaaagaaacacttacaccctgctggtgggaatataaattagattaccttccatagaaagtggcttggaaatttctcacagaacttagaactaccatttgacccagcaatcccattactgggtatatacccaaaggaaaataaatcattctaccaaaaaaacacatgcactggtatgttcattgcagtgctattcacaatggcaaagacatggagtcaacctaggcacccatcagtggtggattggataaagacaatgtggtacatatacaccatgaaatactatgcaggcattaaaaaaaagcacaatcatgatctttggagcaacacagatgcagctggaggccattatcctaagcgaattaagactggaatagaaaaccaaatattgcatgttctcacaagtggaagctaaacattgggtacacatggacataaatatggaaacagtaaacactaacggaataccagagaggtgatcaagagctgaaaatctacctatttattgctctcctcactacctgggttatgagatcattcataccccaaacctcagcatcatgaaatatactcattcaacaaacctgcacatataccgcctcaatcttaataaaagttgaaattatttttaaaaaaatttccactcaaaccccacatctaacctaaatgttttagtataacatactaaaacatacccttttattttagattttgtatggtgtcctgtgacaataaaatgtatagggaagatttcataaatgtactaaatataatagtacatttcatctgcaaatttcagaacttttaaaatttcataatgtcagtctgaccttttctggttgtcttcaagattcccatttaacaaaaccagaagacaaagcagtagctcctcttgtcaagtaggtagaattacatggtttttctgatagcaatgacagtagataacaaagttgccagcatgagtcagcctggctggagctgagtggagggcttctcactgcatcatcctgttatgctttggctccaatgctctcaatatcttcttgaagtccatgctggagatgactttggcaagaacaagtgtccagagatgattaagaaacaggacttacaagaacttaagcagcattaggcctagtaaagagttaaagatgcaaatatctgtatgaagagttgagcagagtaaaacctaaaccttttattaaacaaaaaaaatgagttttcctggaaagttgaagtgtgataggtccatttattattaaagggagtaaatgcagtttctgccaagttcactcacagaggagactagactcagtgtcctgcctctgtttgacattctcacaagattccactatttgttttctaagaaaacattacctagtagtagtcagcttttccagtgttagaaccttgtaaatgacattgtgtataacgcactggcatttatttttaatgaatgttttcttctttctgtcttctcaaacttgcaatttatttaagatgtttgaagttgattgattctatgtatcttcatagatagggaaggtaacactctctccatttcagttaaagcattccttcatgattcttttaaatcagtgatgaatgatttaataatgatcacaactgctgaaccatagtttggaaattcagtaacatagaggcggaggaaacgcccttatagttggtatcgggaaacacaaagaattattttcctacatctgaaaattccagtaaggttttagagttatcttaaagtaatttttaattgttctgtgaaaactttttattcttcacrtgaaaacaatgtgtaaggcattgtattagagtgcccacacatcgtgccagttctgatgaccacagcatggtatttctatttcaactctgtagctgaatatttcccatttcccatctgtctgctgatttgtaacagaataattattttatagctagtagatttgacaaaatgagatgcaatgtcaaataattttcacacttttttctaaatgcaatatgctttggggttactgaggaacaaaagattctgaattaattcactttgtcgctgatgacaaaaacaactagaatttgcaaaggtgatttatcttaattaaacatgagttaacatatctccccaccaaaacaaatcctatcataggaagctgcaatatgcttgggggcttgatatccagagagacttcaaatttacttgaaattgcattagttgtatagtctgggtttattatgtgcaaggtacgtcctaatgctgataagaatgataaaagtaaggataaactcttttaatgcgtaaaaacttaggaaaacaaaatgtatagagaggaagtacttaagtcctaggacgtagaagtgtgcaaaggtgtgtgtgtgtgtgtatctcactctgaacaataccgctctgtgtgtgtgtgtgtgtgtgtgtgtgtatataaaatgagcatatcatgaaatatactcaagcatattgcagcttcctatgataggattccttttggtggggagatatattaactcatgtttaattaagagaaatcatgtttgcaaattctaattattttcatcatcagaggcaaagtgaattttatatatatacatatatatatacacacacacatatatacacacatacacacatatatattgttcaaagtgcttcactgaacrccagaggagttaggtgggacatttagaagagagatttgtacatttggtgaaactttaattaaaaatggaagatgcaaacaagtaaaattgtgtagctagaataactctcaaattatcttataattgtcttaattgatgtgtaaatgttattctgctcccatgtatgtctacataagtttctgccagagaaaattcatcttgcagatcaagcagatagggatattggttgatgagggacttattgactccatatacggaagccttttgtatttgtgagacacaattattaggcatcagcactaaaaacaccatttgcatatgtatcttaacttccacaaaataatcgaaaattatatccaaaagaataaactccttagcatttcagaagctgatttccaattatcccagtaaaatgtaaatgtgccagacaatatttttgtttctgggggatcaccagaaaaacttggactcktctaatggaaaataaaagagtgattttttattaacttttagctttggataactcgggtagaaattgtaatacacaccagcgtcatctcccatcttgctcctgagtacaaggattgtaggcatttaactccattccacagctctccagggtgtagacatttcagacataattttacctcccttcgtacacacacccaatcctatctcacacagctatctctctaataggcagaaatcagacagtgatgcagtttctctgttatgttgtttttgactctactactttcctccttctaaagacataacaacaagaattccttgtctattatcaactttttcttctttatttacgcacgcttaattttcttttttcaaccaacttaaaatctgctaagcctgacagactattctatttaaagattttagaggatttgcctacattaaaaaaaaaaaaacaaaaacgactttcacaccaagacagaataaaatagaaatcacctttgtctctatcaaacaaatttggatttcctaaaaagtctcttaaaaattggtagaaaaaaaacaaaacatacccgtatttgaagcggcattattttagctttttgaaatgcttagtaaaaggaagtaaatctgttgtagagacctcatgatttggtatgtatcaaataaatgaaatcagaagttggtttcaaactagaagatcaaataactttttttcttttaatttatttgtttatttttagaaatggtctccctctgtcacccaggctggagtgcagtagtgtgatcacagttcactgtaactgtgggctcctgggctcaataatcctcctggagcccaactcctgggctcaagcaatcctcctgcctcagcctcctgagtagctggtactacaggtgtgtgccaccattcctggaaaattttttacaaaaattttgttagggtctcactatgttgccctggctggtctcgaactccggcctcaagcaatattccctccttggcctcccaaagtgctgaaattgcaggcatgaaccaccacacccagyctgcctaagacatttataaaatgccttccccacattcaagaatcatacattagttctagaattttctctctagattgtaaacaagattgaggatagaagtaaattttcttttcatgcttatgtattcatatccacatacatcccctccaaagcactgctcttagtaggcattcaataaatatttttgaatgaataaatggcttttgtaaatacgagctcagccttactgttatcactaggagaaacaaatatatttctggcatacatctttcttaacctacattatcctcctactgctaattccacatgaaaaatagacatctcraaaggatattgacttatttagtgacctggtcatgtacttagtgtttacaatgcatataccattgttcaacatagtctgctcagttccactatagacatatccatcaagctttctaaaaaaaaaaaaattaacagtaaaacatattacctttccttttgagcttgatttatttaaacctggagggtcacaaaaaaaaaaaaacaatcagagagaaattgagtttccctttcttcttgttcctgtccttttacactgctctctacatttttgtgctaaaacttctttttatgaagagacttccagaagtccagattgcttgagaggctcagattgataatatctatgctgtattaatgctgattgaccttccgggataaaagggacttcacaaataaatattataattgcaagcaaagcaaatattaccagattgatttctccaaccattttaatagtattacatacctcttcagttcccagtttctatatttaaatgttggcaactcagcccacataaaggaaaaatataactatggcaaaggaaggggaaaatgtctctattgaatatatggcctactgagaacatctgagaaagagtcatcaaaccatgcctctgttgttcatgcacaggtatgaacagcagtgcatcatcatggcacctctggaacagctaggagtatgcttgctttttgcacacttttgcattttccccagggactttcaaattgaagaactcagctagagggttcacacatctactgcagccaggtytttgtggtaggtagcataatggacctccaaagatgggcttgtcctaatccccagacctgttaatatgttatcttacatagaacaaggtactttgcagctgtgattataattaaggaccctagaatgcggaaattttcctagattattcccaggagttcaatataatatttttaaattgataaattataataatcataattgtattacatttatggagtacaatgtgatgttttcatatatgtatataatayggagttattaaatcaaattaattaacatatatatcccttcccttgcttgacattttttgtgatgacatctttgaaatttactctcttattktgaaatacacagtacattattattggctatggtcaccctgctgtgcaacagatctctaaacctcctgtctagctaaaactgtgtatcctttaaacagtaactccacattctctcactcctccccacccaagccccccatccctggctctggtaaccaccattccattctccacttacatggatgaatcttttttagatttcacatataaatgagatcaagtagtatttatctttctgtgcatggcttatttcacttagcataacatctgctagattcatccatcttgtcccaaatgacagaatttcatctttttaaagaataagtaatatttcattttgtttactctattttctttatccaactgttgatggacaagttgattccatatcttgactactgcggataatgctgcaatgaacctgggagtgcagatatctctttggcatacttaataatttcccttgtaatacccagtagtgggattgctagatcatatgggagttctatttttagtttttggaggaaattccatactggtttccataatggctgaaccatttacattaccaccaatagtgtacaagcattcccttttctctacatcctctccagtggttgttatctttcatctttttggtaaaagccattctattgggtataaatagatatcttgttgtggtttttaaattgtgttttcctaatgattagttcatttgttaatgaaccttttggccgtttggatgagttcttttgagaagtgtttgttcaggtcctttgcccacttttaaatcggtttatttgtttgcttactattgagttatttcagttccttgtatattttgtacattaaacccttactagatatatgagctatctgaaaagaaagttaagaaaataatcccatttacaatagcaacagaaaaaaatttaaaacttagatgtaaatttaaatcagaaggtaaaagacttatatactgaagactataaaacactgatgaatgaaattgaagaaaacacaaataaattgaaaaatatcccatctctatggactgaaataattaatattattaaaattcccatactacaaaaaataatctacagattcaatgcaatccctataaaaatttcaaggtcatttttcaaaaatggaaaaatcaatcctaaaattctgtggaaccacaatacaccccagataaccaaagtaatcttgagcaaaaagaacaaagctacaggcatcatactacctgatttcaaaatgttttataaaagtgattataattaaaacagcataatactggcataaaaacagacacatcgacctatggaacaggacagaaagctcagtaataaactcatgccttcatggtcaattgattttttacaaaactgccaagaacccrtaatggaggaaaaacattctattcaataaattgttcaaggaaaaccagttatccacattcagaaaaaaatgaaattagacccttaccttacactatgctccaaaataaactcaaaatgattaaagacttaaagctgtaaaactactagaagaaaacataggaaaagctccatgacattggtttggacaaggatttttttagatgtaaccccaaaatctcaagtaacaaaagcacaaatagacaaawgggattgcatcaaattaagaagcttctgcacagcaaaagaaacgatgaacaaagtgaagagacaacccatgcaatgagaaaaatatttgcaaaccatgggtctttacaagtggaagagagaggcagtagaatgagtgggtcatacagaggagatagaattcagccagttgttggttgttgctggctttgtagtttaaaggggacccagatgcaaggaacacagattaagctggaaaaggcaaggaaatggattgtcccctagagactccagaaaaacagttccctgctaacgtcttttttctttttttaattaattaattaattaattaattaattttttatttatttattttttttgagacagagtctcattcggtcacctaggctagaatgctgtggtgctatgtcaactcactgcaacctccacctcactcattcaagtgattctcytgcctcagcttcccaagtagctgggactacaggcacatgccaccacacctagctgatttttatatttttagtaaagacggtttcaccatgttggccaggctggtctcaaacccctgacctcaagtgatcagcccacctcggcctcccaaagtgctagaattacaggcattagtcaccatggccggcccctgctgacatcttgattttagcccagggagattcatgttagacttttgacttctagaaatgtaaggtaataaatttgtgctttttaaatgactaagtttgtgatgatttgccacagcaacaatagggaactaatagagtgctttttcacgcatttttttctcatctatgataagagagctttctgtgtctccttctgaaaggaaagtctgctgtaagagggagtgcttttcactgcaacctcactcctctcctttgctggtgtatgtaccaatgtataacctttctgcacaaatgaaatgccatgcaagargtaaaaagtttgagaactagcccatttgtcagtaggagtccaaaactttatactaagaatcctaaatccgataactaagaagtgacttgaggcactcgcaacttcattattaaaggttatttgcatgacaaattaatactgtagtaacagtagttgccaatgcaaaagctaaaccaagaacttaaatgccacaaacatgcagattattggcccggttgatggaacagggcaactttggccttaaatattttttggcaacttaacatatttgcatttttgcctcaagctatttaaatattttaggattccattatttacagagagcataatgrgggaactctccagagttactgaaggttaaaccggataaaaagtgaaagtatccacagaataaaataactccctagatatcttgtgtacacatgtccaaccaaaaaggacaatttatttccacatatggtagggatttcagattccttcagaaaatttcagattaactccttatatttaggagtcttaattaagctgtaggttatcacttacaacaaaatgtgaagtcagagtaaatgaaaaatgttactttttacccaagaatagagtgggtcctcactccattgcytcacaagataaaattgtaattgtcttttacttcaacgttaacagatattsatagttgagccttaatgggaacactttgttttgttgttctatattagttgctttgatacaaaatgctgtacattagaatttaatgtgatctgcctgaagtccagatgaaaaaagattaaggcaaaagacaagaatgagaaagaattcctggtcaaaggagattgtttcattttggtggctgtccccatttgggctcccataaatgcactgccaggactatcgggggcagaaatattgagcctgggcagtcgactaaccacagcatcaccaacacgaatcatactcccattacccaacaaggaaatactgtctacgaaggggcccctagtgctctgcaccctcccgttcacttaccttcctgcttcacatttgaaaggcagtttagatgaaataatgcccgtttttcctaccaagtatattgtatgcaaccgtaaatcatcaaagaaccactgccccgacctagaacatatttggacatcactagaaataaaaaaaaggaatattagatcatgtgttggatttttttagggttaatataaaggcagatgtccaaagttagggatgctttcaatgctttcctatttccagttctcttgctcctacgttggctctgtgttttataaatcttctttttcataatgtagattcattgacctgctggatagtagattatatatatatatatatatatatatatatatatatatatatagtacctaatagagttggctccttgccttgtatttatcaaagattcttcccccaactctcatcagtccttccccaaacaagaagtttaacaaaagagactagggacttctttagctcacttgtcgccaccatcccacaggacctgaatatgagtcctgtccaggagcagtggtgaactggaacagagcaaatatagtatccacagtgaatgacgaaagaggattggatcaggattgaaaactctaaataactgatgtagcttacacatttattactttggcttatcacagttatcccagaagatgtgaaataaaatcagagaaaagagaattttaaacagacattcacataataggccatacagacatgcagactgctgaccaggcacaaaattctggcaggcaggactgggagctagaggaaactggcattacttaagcaaggactgaacagtgtattcggaaaagaaaaaaatgagtggcctagggaaaagacaggctttgttctgaccaatcctttttgttcaccacacacccaaactgctagcagattcaaagtaattttactaaatacaacattcaccctgctttctgtattctattgatttacttaataaaaacaaacctgctttgtgattctagctacacagaactaaccagagaccccagtctttttagaagatatagagtgaattcagaatgtcaagtttctaaaacttaattgctatccataagatagaaaaatctcaattagaacttgaattcttaaaaattcatctatgatcacacagctatcagagaggaataaagataaaaaaaacactaacataacatgtagagggcaggaaagaaagcccatgtgttttcagtccagtaaatgatgaatgtgcaagaaagaggcatgaactaaaagagctttgacagaagaattttcttttttcaaagttaaaagaaagtttagttcccttttaaataacagaatcttctttttccagttgattttttttatttccaacttttattttaagttcaggggtacatgtgcaggatgtgcaggtttgttacataggtaaacatgtgccatgatggtttactgtacagattattccatcacctaggtattaggcacagcatctattagctattcttcctgatgttctccttcctctcatcccccaccctccaacaggtcccatgtatgttattctgcccctcgtgaccatgtgttctcatcattcagctcccacttataagtcagaacatgtggtatttggttttcagttcctgcattagtttgctaaggataatgacctccagctccatccatgttcatgcaaagaacatgatctcattcctttttaaggctgcatattattctgtggtatacatttaccacatcttccttatttagtctatccttggtaggcattgtattaatctgttctcatgctgcgaataaagacccaaggctgggtaatttataaaggaaagaggtttaattgactcacagttccacatggctggggaggcctcacaatcatggtcgaaggtgaatgaggagcaaagtcatgtcttacacggtggcaggcaagagagcttgtgcagggtaactcccatatataaaaccataaaatcttgtgagacttattcactaccatgaaaacagtatggcagaaactgcccccgtgattcaattatctccatctgtccctgcccttgacatgtggggattattacaattcaaggtgagatttgggtggcaacacaaccaaaccatctcaggcatttaggttgattccatgtctttgccgttgtgaatggtgctgcaatgaacacacacaygcatgtatctttataacagaataatttatattcctttaggtatatatccagtaatgggattgctgggccaaatggtatttctgctgctaggtctttgtaaaatcaccacactgtcttccacaatggttgaactaatttacactcccactaaccgtgtaaaagtgttcctttttcttcacaacctcaccagcatttgttttttgactttttagtaatagcctttatgactgacattagatggtatttcattgcggttttgatttgcatttctctaatcatcagtgatagtgagctctttttcatatgattgttggccacatgtatgtcttcctttgagaagtctctgttcatgttctttgcccactttttaatggagttgtttggttttctcttgtaaatttaagttctttatagatgctggatatcagccctttgtcagatggatagagtgcaaaaaactgtctcccactctgtaggttgtatttgctctgttgatagtatgttttgctgtgcagaagctgtttagtttaattagaccccatcggtcaatttttgctttttttgcaattgcttctagcatcttggtcatgaaactttgcccgtgcttatgtcctgaatggcattgcttaggttttcttctatggtttttatagttttggggattacatttaagtctttaatgcatcttgagttgacttttgtatacaatgtaaggaaaggatccagttttaattttctgcatatggctaaccagttctcccagcatcatttatcatatagggaatcttttccccattgcttgtttttgtcaggtttgtcaaagatcagatagttgtaggtgtgtggccttatttctgggttctctattgtattccattggtctatgtgtctgctcttgtactagtacaatgccattttggttactgtagcctttagtatagtttgaagttgggtaacattatgcctccagctttgttctttctgcttaggattgccttggttattttggctcttttctggttttatgaattttaaaatagtttttctgattctgtgaagtatgtcaatggtagtttaatgggagtagcactgaatctataaattgctttgggcagtatggccgttttcacgatattgattctatccacgagcatggaatgtttttccatttatttgtgtcatctctgatttcttttcaatggtttgtagttcttcttaaaaatatccttcatttctcttgttagctgttttcctaggtattttatcctttttgtggcaattgtgaatgggagttcatttgtgatttggctctcagcttgactgttgttggtgtataggaatgctagcaatttttgctcattgattttgtatcctatgactttgctgaagttgcttatcagcttaagaagcttcttggccgagacgatgggatattctagacataggatcatgtcatctgcaaacagatagtttgacttcctctcttcctatttgaatcctctttatttctttctcttgcctgattgcctgggccagaacttccaatactatgttgaatagtagtggtgagagagggcaaacttgacttgagccagttttcaaggggaatgcttccaggttttgcccattcactatggactgtgggtttgtcatgtgtggctcttattattttgaggtatgtaccttcaatatctagtttattgagagttttcaatatgaagggatgttaaattttatcaaaggccttttctgcatctattgagataatcatgtggtttttgtccttagatctgtttatgtgatgaattacatttattgttttstgtatgttgaaccagcttgcatctcagagatgaagccaacttgattgtggtggataagctttttgatgtgctactggattcagtttgccagtgttttgttgaggatttttgcatcgatgttcatccaggatatggcctaaagttttccttttttgtcatatctctgccaggttttggtatcaggataatggtggcctcatagaataagttagggaggagtccctccttttcaattttttggaatagtttcagtcggagtggtaccagctattttctgtacctctgctagaattcagatgtgaattcatctggtcctgggctttttttttttttttttggttggtaggttatttattactgtctcaatttcagaactctctattggtctattcagggattcaatttcttcctgattcagtcttgggagggcatatgtgccaggaatgtatccatttcctctttttttatggaaattttttttattattatacttcaagttttagggtacatgtgcacaatgtgcaggtttgttacatatgtatacatgtgccatgttggtgtgctgcacccattaactcatcatttaacattaggtatatctcctaatgctatccctctcccctcccccccacccaccccacaacaggtccaagtgtgtgatattccccttcctgtgtccatgtgttctcattgttcacttcccacctatgagtgagaacatgcggtgtttggttttttgtccttccgatagtttgctgagagtgatggtttccagcttcatgcatgtccctacaaagaacatgaactcgtcattttttatggctgcatagtattccatggtgtatatgtgccacattttcttaatccagtctatcattggtggacatttggcttggttccaagtctttgctattgtgaatagtgctgcagtaaacatatgtgtgcatgtgtctttatagcagcatgatttataatcctttgggtatatacccagtaatgcgatagctgggtgaaatggtttttctagttctagatccctgaggaatcaccacactgacttccaaaatggttgaactagtttacagtctcaccaacagagtaaaagtgatcctatttctccagatcctctccagcacctgttgtttcctgactttttaatgatcgccattctaactggtgtgagatgctatctcattgtggttttgatttgcatttctctgatggccagtgatgatgagcattttttcatgtgtcttttggctgcataaatgtcttattttgagaagtgtctgttcaggtccttcacccactttttgatggggttgtttgtttttttcttgtaaatttgttkgagttcattgtagattctgcatattagccctttgtcagatgagtagattgcaaaaattttctcccattctgtaggctgcctgttcactctgatggtagtttcttttgctgtgcagaagctctttagtttaattagatcccatttgtcaattttggcttttgttgccattgcttttggtgttttagacatgaagtccttgcccatgcctatgtcctgaatggtattgactaggttttcttctagggtttttatggttttaggtctaacatttaagtctataatccatcttgaattaatttttgtataagrtgtaaggaagggatccagtttcagctttctacatatggctagccagttttcccagcaccatttattaaatagggaatcctttccccattgcttgtttttctcaggtttgtcaaagatcaaatggttgtagatatgcagcgttatttctgaggtgtctgttctgttccattggtctatatctctgttttggtaccagtatcatgctgttttggttactgtagccttgtagtatagtttgaagtcaggtagcgtgatgcctccagctttgttcttttggcttagcattgtcttggctatgtggggtcttttttggttccatatgaactttaaagtagttttttccaattctgtgaagaaagtcattggtagcttgatggggatggcattgaatctctaaattaccttgggcagtatggccattttcacaatattgattcttcctacccatgagcatggaatgttcttccatttgcttgtatcctcttttatttccttgagcagtggtttgtagttctccttgaagaggtccttcacatcccttgtaagttggattgctaggtattttattctctttgaagcaattgtgaatgggagttccctcatgatttggctctctgtttgtctgttattggtgtataagaatgcttctgatttttgcacattgattttgtatcctgagactttgctgaagttgcctatcagcttaaggagattttgggctgaggcgatggggttttctagatatacaatcatgtcctctgcaaacagggacaatttgacttcctcttttcctaattgaataccctttatttccttctcctgcctgattgccctggccagaacttccaacactatttttaataggagtggtgagagaggacatccctgtcttgtgccggttttcaaagggaatgcttccaggttttgcccattcagtatgatattggctgtgggtttgtcatagatagctcttattattttgaggtacatcccatcaatacctaatttattgagagtttttagcatgaagcattgttgaattttgtcaaaggccttttctgcatctattgagataattatatggttttttcattggttctgtttatatgctggattacatttattgttttgcatatgttgaaccagccttgcatcccaaggatgaagcccacttgatcatggtggataagctttttgatgtgctgctggattcggtttgccagtattttattgaggatttttgcagcaatgttcatcagggatattggtctaaaattctctttttttgttgtgtttctgccaggctttggtatcaggatgatgctggcctcataaaatgagttagggaggattccctctttttctattgataggaatagtttagaaggaaaggtaccagctcctccttctacctctggtagaattcagctgtgaatccatctggtcctggactttttttggttggtaagctattaattgttgcctcaatttcagagcctgttattggtctattcggagattcatctttttcctgatttagtcttgggagggtgtatgtgttgaggaatttatccatttcttctagattttctagtttatttgtgtagaggtgtttatagtatctctgatggtagtttatatttctgtgggatcggtggtgatatcccctttatcgttttttattgcatctatttgattcttctctcttttcttctttattagtcttgctagcgggctatcaattttgttgatcttttcaaaaaccagctcctggattcattgattttttgaagggttttttctgtctctatttccttcagttctgctctgatcttagttatttcttgtcttctgctagcttttgaatgtgtttgctcttgcttctctagttcttttaattgtgatattagggtatcaattttagatctttcctgttttctcttgtgggcattcagtgctataaatttccctctacacactgctttgaatgtgtcccaaagattctggtatgttgtgtctttgttctcgttggtttcaaagaacatctttatttctgccttcatttcgttatgtacccagtagtcattcaggagcaggttgttctgtttccatgtagttgagcagttctgagtgagtttcttaatcctgagttctagtttgattgctctgtggtctgagagacagtttgttatcatttctgttcttttacatttgctgacgagtgcttaacttccaagtatgtggtcagttttggaataagtgtggtgtggtgctgagaagaatgtatattctgttgatttgaggtggagagttctgtagatgcctattaggtccacttggtgcagagctgagttcaattcctgartatccttgttaacattctgtcttgttgacctgtctaatgttgacagtggggtaacaaagtctcccattattattgtatgggagtttaagtctctttctaggtctctaaggacttgctttatgaatctgggtgctcctgtatttggtgcatatatatgtagaatagttagctctgcttgttgaattgatccctttagcattatgtaatggccttctttgtctcttttgatctttgttggtttaaagtctgttttatcagagagtaagattgcaacccctgccttcttttgttttccatttgcttggtagatcttcctccatccctttattttgagcctatgtgtgtctctkcacgtgagatgggtttcttgaatacagcacactgatggatcttgactctttatccaatttgccagtctgtgtcttttaattggagcacttagcccatttagaatgtatccatttcttctagattttctaacttatgtgtacaaaggtgtttacagtattctctgatggttgtttgtatgtctgtggggtcagtggtaatgttccccttatcatttctaattgtgtttatttgaatcttctctatgtttagtttattagtctagctatcagtctatctattttattaattttctccaggaaaagcagctcctggatttgttgatttttgaagggtttttcatgtctctgtctccttcaattcagctctgatgttggttatttttgctagctttcaggtttgtgtgctcttggttctctggttcttttaactgtgatgttaagttgttaactcgagatctttctagctttttgatgtgggtatttagtgctgtagatttctctcttgacactgctttatctacatcccacacatgctggtacattgtatctttgctctcattagtttcaaagaacttcttgatttctgcaatgatttcattatttacccaaaagtcatccagaagcaggttgttcagtttcagtgtagtcatatggttttctgtgaatttcttaattttgagttctaatttgattgtgctgtggtccaagagatgatttgttaggatttcagctcttttgcatttgctgaggagtgttttacttctgattatgtgatcaattttagagtaagttccatgtggtaatgagaagaatatgtattctgttgttttggggtggagagttctgtagttatctatcaggtcaacttgatccagagctgagttcaggccctgaatatctttgttaatgttctgcctcaatgatctgcctaatattgtcagtgaggtgttaaaatctctcactattattgtgtgggagtctaagtctctgttaaagtctgtaagaacttgctttatgcatctgggtgcccctgtattgggtgcatatatatttaagatagttggcacttattgaattgaaacctttgccattatgtaatgcccttttctgtccttttgatctttgttagtttaaactctatcttatcagaaacttggattgcaactcctgctttcttctgttctccatttgctcagtaaattttcctctatcccttcattttgagcctctgtgtgtctttgcatgttagatagctctcttgaagacagcgtacagatggatcttgattctttatctggtttgccattctgtgtcttttaattggggcatgtagctcatttacatttaaggttagtattgttaggtgtggatttgatcctgtcatcatgatgctagctgattatttttgcagactagtttatgtggttacttcatagtgtcactagtctgtgcacttccatatgtttttgtamtggctggtaacgatttttcctttccatatttagtgcttccttcataygctcctgtaaggcagaggtttaacatcccactgacattattaggcagttcattgagacagcatttgcctgcctaagcatttgcctgtctgaaaaggatcttatttctccttcacttataatgcttagtttgtctggatatgaaattctgggctggaaattmttttcttttttttatttttattttttgtttttttktttgtttgtttgtgttcagtacaaacttagggctctttaggcaataaagtaaggaacagcaaagtgggaggactacaccttcaccgtggcaacagaaagcctcaaaaatgtaaagtccctcaacttctattgggcagactcttcctagctcagaagaaacacattttaactggctrggaacaaggccwgccagcctggccacagtgtggaagggcagctggtcacacagcctctggtcaggcctggaagtgctcagagagaacttccagcagctcctgcttcttcagcccatatgcctctttcagcatgggcacagtgaaattgcccagcatgcccttgctgatattggccttcagctcctcttctgaatacttcatcttgggtctttygcttccaaaatcttcattattttgttttctcttggtaaatttcccttcaggattgtaatctggtgggtaaacaagctccttaaactcaaccaccagggagtccaatcttttattcattgcttcaaccttgggcaatgtcaggtccactgcttgttcagtctccatcaaatccaaggccaaggcctccaggttcctgaagtgctgctgcagcccagggttctcaaagctgtcacttctgcatgtgaagcggagcttctgaacgatagccttcatcttgtccacctgctctggagttgccatgactttcagtaaagggcatcttccttttatcatcagcaaagagtaaaaagacaagctggaatcctggaggagtcaccagaaatttctggtcatccaactcctcttcctgtggcaccaaagccacaaaataaagagagatgttcctgcggggtgtgtatctgcgtgatgctacaacctccttgtccagacactttatgtgcagagcactaaacagggttgagctcccaatcaccagcaactcctcagggcacatgaacagggagggcctcagatgatggtgcttcttcagcattaccaagggcttacaccccatgagcatcaaacctggatcatcaaactgttttaactcttctgtttcccctttctccattataatctgagactcccatagatctcagacctcttggtatcactargcagaagcaaacttcctgtatttgtattaaatgtctgggtcttggttttcactggttcatttgtttcccaatagagctttattggagaaggcttgagagccctctggaccagattataaatgcccagagatcactatatctttgatgagcttcagctttaacctgcttagtgcttgcttcctggtctccttggagtgaaccttctagtttgctggattcctcaaagtgaaccctgaggtcctcatcctctgctatgctggtgatatctctatagaataaggatatgtcaaagcccccaggtttcttcaggtgcttcaagtcaaggaagatacctgtatctcagagatcaccagctttggtcctggctcagctggcttaggcactgtcattgccatggggttgtcttcattggtgaacagcatgatcttgttatgactcatcatgaactggacatcactaaagaggttggcacagatacacagcacttcactgagtgagtcatcagatctgtggcccatcaggtcttggaaacgtttttgttcctgctgccccttaaactggtcaagctctagaatttattttgcacctggcttatccaactcctgtaagatgtaaatatttcactgaatctttgtctttctctgcactatagagcatcactgccaagagatctcaaacactgtttatgatcttactgatgtacacactttggatacactggatgctcatgtcaaagggagtcaactcatctttactctgagattcaaacatagccctggaggcatcaacaaaaaaaaaacaaactatctcttcctgaatacttatagtctccacttgcttcaaggttctcttcttgttcttctttgcttcttcatcggcctcagttttgtaatacgactcccacctttacatgttggctacttctcactttggtgtagggaagtgaccaacttggaccagaaattctttcctttaagaatgttgaatatagggccccaatctcttctggctgtagagtttcttctgagaggatcactgttattctcatgggcttccctttgtaggtgaccttgcctttctcttaacattatttgctgcccttaacattatttgtttcatttcgaccttagagatctgatgattatgtatcttggggataatcttttcatggagtatcttactggagttctctgcatttcctgaatttgaatgttggcctgtgttgccaggttgaggaagttctcctggatgatatcctgaagtatgttttccaaattggttccattctccctgtctctttcacgtaccccaatcagtcatagatttgatctctttacataatcacatagttcttggaggttttgttcattcctttacattcttttttatctattcttttctgccagtcttatttcagaaaaacagtcttcaagctctgaaattctttcttccacttgatctattctgctattaatacttgtgattgcattgtgaagttcttatactgtgtttttcagttctatcatgytcctctctaaacttgctattttggctgtcagcttctgcattgttttattatgatttttagattctttgtgttgggttaaaacatattcctttagctcagcgaagttcatttttatccacattctgaagcctacttctgtcatttcagcatctcagccttagccctgttttaagcccttgctgcagaagcactgtagtcatttagaagaaagggggcactctggttttttgagtttttgacatttttgagttgattctttctcatctttgtgggcttatctacctttgatctttgaggttgccaacctttggatggggttctcacagggattttttcttgttgttgttgttgttttctgtgttttttttgttgttgttgtttttctttgaagagtctgatggctgttgcatagggctgctgtggtttgctgggagtctgctccagaccctagttacctccgtttttcctgtacctggaggtatcaccaccgaagtctgcgaaatagcaaagatggcagcctgccccttcctctggaagctccatcccggggggtacggacctgttgccaggccaaatgcagttgtaagaggtacctgaagactttgtttgggaggtctcacccagtcagaagaaaagtgatctagtacctgcttaaagaagcagtctggctgctttttgatagagcagcatgcgtgttggggatctcttcagcctctgatcagattgagcaccccaaagcccacaagctggactggctaagatgcttgaacagccaaggtagtgacatgccccacccccagggcacttcatcccagggaaagatcagaactgttcataccgtatgtgcaggttgaggtagctggaggcccagctgggaggtctcacccaatgagggggaatggtttgaggtccagcttacagaagcaatctggccacattctggcaaagcagctatgctgcactggggaaactcttcctcatccagaccatttggactcttcaaagtccacaggctggaacagctgagtcaaccaaacagcagagatggcagcctgcccctcccctcagggccccatttcttctcaggcaggcacccttttactgcaggctggctggaattccaagccagtgggtcttgtcttgtgaggtgccatggaagtgggacccacaggccaatgctgcttggctccttgggttcagcccccttcctaggggtatgtacagacaccgtgcattgcctgggctgcagacacctttgttggggatcccaggactggagtatgtaaagctcctgggtctcagtgcatgcctgagcagcttctctgccaagactccacatagctctgtgtgtcggacccaaggccctggtggtgtgggctcataaggggatctcctgatccgcaggttgcaaagatctgtgggagaagcgtggtttcccagggtcgcacaatcactcactgcttcctttaactggatatgggggttcccttggccctgtgtcacacccaggtgggccatcgccctaccctgcttttctttyttctccatgagttgggttatttccctgaccaatcccactgtggatagctggataattcagttgaagttgctgtatccactcaccccagttcataaccaagccttatcacttgttaatctcctgagtaacacagaggtatctactttattctactttgaccaccacaaccttaggccaagcttgtctggctcatcttgtctgggctcctgcaccagccatcctatctattcttagtaacccagataactttttctatactcttacttcaactaaaaaaaaaaaaaaaaaaaaaaaaaaaaaaaaaaaacttcatggaagtagcctagttacatttaaccaaattaaataaataacattttaaccaaaaccacataaatatatacatatatgcgtgtgtgtgtgtgcatgcgtgtgtgtgtgcttacattgcttcaaagataatgagctcttatgttgctatatttccctatattctttatagtaaatcctacaagatttacttactttttgctaccaacccccagtactaaataagctattcgkgggtctcactctgctagattctcatgtacaggagagtgtctgtgtcctaggtagkggtcatagatattgcttccaatgttgctgatttcagtaccataaagaagatatagcccagtaaatggaagagcaaagtagaatgaaatttttaatagctttgctctcttagtgctttgtctgtaagaatcactgttgcacttgacatttgttgccattttgctttttcattttgaattgtggagccagactgtgtctctatgttgaggggaggagaaggaatgacctcagaaatgtcagaattattactaatggcagcctttaagcttggataggtgggtaatagtgcttgaccaatctgcttaaatgctgactgtagagtagcgacctgaaacaatagtgggaagctatttaaaatttggaagaggcaaaatatgtgataggaaagatgtggcttattttcaagtacaggccacatggtatggtagcagcagatgccgtaaggaataagggcagcatctgagcagacctaaatgtaatctcacctctgtcattttcctacttgtgacactgggcagggtccacaatccctctgagccatcacctttcttgcatgtaaaatgaaatcataccactcactcaaggggctgttgaaaagattaatgacattgtgtatacaaaattccagccaccatagatgccagtttgcttttttctccctcgcttctgttttaacattgcagataatttacactaacaggtgatcaaggactaggcctaagccttcttctaagagactagcccagctcacagaccttgaagagacagtgtaattcactgcagagggctttctcccacttcttcctgctaaacaagttcctggagaggtttgaacaggcattagagatagtcggtggtacttgtccatatgcaatgctgtcagatgaatttttctatctgatgcagattggtccgaggccagcttcttgaccttaggttgcaagtggtgactaggagcagttgttcctgacaacttgtgttcttgcacatggctcataaccaaggataagacagcctccagaccatatatcctagaaataaatctagatatttctactcagactaatttttctctaaggggacagtgaagctcttctgggactgatccacctatctggcctcattccaggacaggcagaaggccttatgctgaatgcttactcaaggcctaagacagccaagacaaatagacttaacatgcttgacaactaatctactggtagtggctgcctagctagatatttgtagaattcccagtcctcttctgggcttagcataaattgtgtgcctcgatcagtgatgatgtctcccatagttactgcggagggttstcaaggcacacatgacagaattggaaacctcattatctggggatcctcaaagttccactttagttcaataaggatactggccattattcaagaactggtcttagtcacacacacawaccatagtgtcatgactgagtaactcctcgagctgggtgaaaacaccatgaamacaataaacaaagacaatctcaattttttatcaatgcctcaaaagcttccagacccacaaataatttcaaatgtcaccagggatatatgttctgcatactacctagtccctcacaaccttgtgattctgggaactcagggactttcctggcgtcacttgaaatcactgaaagccaaggctagccctggtgyttttatcatcacttccagcagcctcccttaggtaggaaaacactggagtacaaaagaaaacaaaatatactgttcctaacacagaaatcccaggactttgaaatatttagactttttcagcccaaagcccacctgtcttctagcctgctgcctgagctattgatcttctgccaggtacatgtattcatgatcagtcaaagatgtcatcccatggagaatttaatgaaagaaatctacggaagggctccatctacccatctctacccatctattgtctttcctccttgtcaagaggagaagcaaggatgcacatctgtgcaaagagcaccaggtgttaaataaaatcattacctaaaaccaataccttcccatggactccaggatttcagtattagcacaggtgaactatagtttacaccaaacgaggattcctgaaaacacataactagccagaatcatgaaaagttataaaatatctttttattatgaccacattgagtacatattagagctgctcagacttttccatttggctattacataatctgaatgttgggtgatatttttattcttgctctcctcactcattaaaaactatgcagtgccattataaaaacaatattaataaaactagacagcttcccctctgtattttaaagcagtaaaaacattatttggcttctcatttacatggcagatccgattcatcatgttgacatagttaaacagaagaagaaatatttcacatagatagcagtgtcaaagcagtcagttctagaaagaaagtagtaatttaaaaaaaaaagaaaatatggaatcaatgaatggaatcataacaaagacattttcaatatcacatagaaaatcatgattatttgtaggtaaaacaaagtgaaaactaaagtgcacttatatttaaaattaaaaagattaaagaaactggtttcttgaaaagagcatcatatatttaaaaactaaaataaagagtgcaattaaaaataattcaaaacattttcagggacaaaaaaaggaaatatttaacatttattataatacctgagttttccttccttcatgaaaagagtactgaaaatcattttaaaaaaatttagttctaaataaaatagattcaatagtttttaaagatcactgaaaattgctttggaattgaagaaaataacattgaatgatttayagcttttaggagagatgggatacaagtcaatgacctgaagaaatggaaagaatgaagactcaggaaataaaacagaatgaaaaagataagaatattccacagagaagttagataatataagtgtagctttgggggctcagattaggaaaaacggcattagcttttgttttttgcaaaaactctaaaaggagcttaaaaatggtttatttttccacagtgcaggagtgataagacacagttttcagtgttttaagtgtctgtgtgtatgcatatatgtgtgtgcatgtgtatgcatacatatgttggtatgtaaccacacgtgtacatgcaaggatgtgactatggagactccaggtgctttgatcctctgtatcatatatctctcaagttaagaaaagggtattccccatcctgctcattggaaggtgcagctgaggtgatgttttcttctattattttcctttcggcttcttgctccaattcttctatctcctgcaggcgtttttccaataactcagcctgcctcttctgtttatttttcagttttttctttttgtttttagatatttttcctataggtttctgctgtggagccgtactcactgcagaccctgaaggaggaggaatacctgctttctgcccctcagtggtctcagctgccgttcttctcacatatgcatcatccatacacatcaagatgttttgcggctttatgtcagtatgagtaatcttggtcttactgtgtagatattctaacccttgaaggaaatgtcaaatgatactcttcagacaacgtactgggtgggaggccttgatagttgaacttgatgatccagttgaggagatggtggccaagtactcccaagaccatgcagacatgtatcccattcatgcctgaaatcttgaagtcaacgagctggatcaccatgtctttgtttgggtcactgggataactttctcgaacacatttgagcaattttatttcatccaaggctgtgtctgtatcacgctgagcactttttacaactttcattgcaacaaatcttttcccctacatatcccagcacagccagacagtagagaagtgcccccatccaagctttctaataacatgataccggccattgaagaggtctgcaattttcactggatgatagccacctttgcagtagtccgcagggtcctcttgctcatcatctgatccaggatctcctcctttggctctggtggtgtggggtctgccaaaggtggcggtggtggtggtggaggtggaggaggaagaactaaaggagctttctgttgaggctccagctttgtagggtgtttctctcttttcggcctccgcttttgggcctgaatgggcaacactttcctggagctcattccgacgcggcgcaagcggggctacaggggcttcgcggaggtgayggcgacgcgagcgcggaaaccagccgggctgcggctttcacttgctcaaccgaccrggaggaggctctggcggatggcgaatactgcgcagaagtgaaactaaaaacagcaggattagaggaggcggccgaggcagacggcaaaggacaatgctgaagctgaggaccaggaagagaaagaagaccctgagaaagaaaacattgagaaagatgatgtagatcaggaacttgcgaacatagaccctacgtggatagaatcacctaaaaccaatggccatcttgaaaatggcccattcttactggagcagcaactggacgatgaagaggataatgaagaagaccgcccaaatactgaggaatataatyttgatgagccaaatgcagaaagtgattacacatataacagctcctatgaacaattcaatagtgaattgccaaatgtatggcataaaattcccgagtcacagtttccagagttttccacctcgttgttttctggatccttagaacctgtggcctgcagctctgtgctttctgagggatcaccacttactgacagaagcaggacggtttcagcctccagtactggggatttgccaaaagcaaaaacccgggaggctgacttgttgatgaatcccctggatacacggaatgcagataaaattagagtagaaattgctgacctgggaaatgcttgttgggcgcataaacacttcacggaagacatccagatgagtcaataccgttccatagaggttttaataggagagggatacagcacccctgcggacatctggagcacggcgtgtatggcatttgagctggcaatgggcgattatttgtttgaaccacattctggggaagactattccagagacgaagatcacatagcattgatcattgaactgctggggagagtccggtttactgaccgttttcttctggaaaaaaatacgctatgttggggaaatatttcgaggagtttttcaccagaaaaggagaactgcgacatcaccaagctgaaaccctggtgcccttttgatgtacttgtggagaagtatggctggccccatgaagatgctgcatagtttacagatttcctgatcccgatgttagaaatggttccagaaaaaacgatcctcagctggcgaatgccttcagcatccttggttgaattcttaccaaattctaccaatactgcattctgagctagcaagtgttcccagagcgttggacataaacggtgactctcattctttaacaggattacaagtgagctggcttcatcctcagacatttattttgctttgaagtactgttgtttgacattttgctttttgtgcactctgatcctggggaagagcagtcttttgacttcccttagtggtttactgaccgttttcttctggaaacaataacgtgtctctaagcattgtttcttgtgttgtgtgacatgcaaatgtcatttttttaatgagaaatactttcccctttgtgttttggcagggtttgtgactatctatttatgaaaaataaattttagctgagtactatattattgataaccttaagaaattatcaagttggaaccaagaaatagcaaggaaatatgcaatgttatcttctggcaaagggacatcattcctgtattatagtgtatgtaaacrcacactgtaaatgttactttccattaaacatgggaggggggctcaaatttcagaaaagctrccaagtcttgagttctatgtagcatatgttgcatgtagccgactttaactgcttctaggagttgtgcaagcttttcattccataacagtcctttcacattggatttttaaaaaagtggctccgggttgtaagatatcattctctatgtggcactttaaaggaagaaaaaatakgcttctcattctaaaatatgcataataatttagcagtcccatttgtatttttgcatatttttaaaagtatttttaaagaaaaagagggatttcactttaaaaatgtaaaggcttagtaccatgtcataatgcctcctctgggcactgtaacttaagctccacatagattaaattggaaaagagaaatgtgttcattgtgtcgaatgaaaaaatacatatattttcgaaaaagcatgatcatgcttgtctagaacacaaggtatggtatatacaatttgcagtgcagtgggcagaattctcctcacagctcaaaggtaacagtgatcatattcattccgtaggtagctttatgtgtggctacaacaaattttagcagcttttttattgtctttccatgaaatgaagttgagaaaatgattttccctttgcaagttgcacacagttttgtttatgcatttccttaaaattaattgtagaatccaagacacaaaccacaggtggcaatacaattttagaatgtaacatatagaggtrtatttagcctgttttagaagtcagtggattcaatgtctttttactttaaattttacattaattaaggtgcctcattttttactttgtccattaacatttatccatatgcctttgcaataactagattgtgaaaagctaacaagtgttgtaacaataatccattgtttgaggtgtttgcggttgtcttaaaaattaaagtattggccaggcgcagtggctcacgcctstaatcccagcactttgggaggccgaggcgggtggatcacgaggtcaggagatcgagaccatcctgactaacacagtgaaaccccgtctctactaaaaatacaaaaaaaaaaaaaaaaaaattrgccgggcttggtggcgggtgcctgtagacccagctactctggaggctgaggcaggagaatggcgtgaacgctggaggcagagcttgcagtgagccgagattgcgccactgcactccagactgggcgacagagcgagactccgtcttaaaaaaaaaaaaaaaattaaactgttttgttttgctttgtttccagaaaaaaaaaaaaaaagaaaagggtaaagagagtaaccatagggtctctatttttcgtattcaagaagcagtcagaacacccgaatgattaaaaacatgatctttagagtcatacgcatctgggttagaattctgacatttcactgctacatcatgtcatatcaggcaatttcattagtcttctcatgtctcaatttcttctttacgaattgaaaaatggtagcaacttcttcataagactgttttaaggattgaatgagatcatgtataaagccctcaacatagtgcctagcacagtgtataatcagtacatgatattcactgtaattattatttttactgataaatgtaccaagaatgaaactaaaaaaagacacaccagaaagtccagcaaaagaaaataggagataggaggagagaactgagaattgattgaccaatgtctgtcatagctcaaaagacttatgcaagaggaaccaaaagcctccactcatccatgactgctctcttctcagcaaggctgtgaccacacagtcaactcagaggatgggaatagtgaggttccacaataaatttcatactaaaaygcactgcccagtagcagaaacattagctgataatgatgaatccaatagcctagcgtttaaccgatacatttaaagcagcatatgacatatttttcataactacccttcactggcagtctaaaaacaaagaataaaaagcttctctttgatcaaaccatgttccaaaatgaaatagatccctttgttttatgtgtatgagtatatttacactgaaaatatatacatatattcacaaatacacgcacagagcaatgtagtacatgcagctgtgtaagaataaatggctttaaaacatatcagcaaatcaacaactgaatcattaaactgacaggaaaccttgttcaagattcccatgtcattttgcaaagagtgtactggatctgactagaatgcattaagagaccagggtgtttggagtttgaaaaacatctttaaaggaaaagaaagagaagtatgactgttagaaaaggaagcagatattctcaccagaataagaagtcaaattatgaacacttgagctttacaactgctttaaataaccctctatggtgaggcataagaactttaatgaaagcaaaaatcatttcatcatactgatggtatagagtatttctttttcttttcatggtttcttctttattcttagttcatttccttttttttttttccttgtgacctggtatttgcttctattataaactaagactatgctagcaaaagaaaatggaccaaggaggcatttatctgaataattcaggcagaaacaatttatacttgaagtagcaagaagttttagacaaaggagaatttttgcttggattaaccctmgacctggttcagcttcagactaaaataatgatgatacccgtggtgctgtaactttgattcagccagtgtactgaatagtcggccctgtgctttgggaccctgttgtgataatgccagcattttcatgcatgtgaatgcttacttttgaacaccgttactcagttcttatatcctgaaaaacttagtgagggaaaattgcatgcattcaacgtttataaaccctgataagctcagtttctaaacactggcatgagtgttgactggaagggctgtcatcggaggccctgccttatgagaacatcatgcctagtatttccataatctgccgatagactgcaagtgatggatctacagcaggatgaagacttctgaattagcattcaggcctttctcactgttgctcacagcagagacaggagagaaggggaaaaaaaaaaggattagatcttttctccttgcccctgtagttttcttctggcagtagactctattgatgggaatgggcctgataatcgcaactacgcagaataggagagtggggtatgcctttgttggcatgtcctctgaaatgacctcggcaaagaatgctgtggaaaagaaatggtgattctaaagaaaaggcatttgtaactttttttaataaattttcctttaagttttggaatacatgtgctcaacgtgcaggtttgttatataggtatgcatgtgccatggtggtttgctgcacctatcaacccgtcatctaggctttaagcccagcatgcattagatatttgtcctaatgctctccctccccttgccgccacccggcgccccccgccccctgacatgcgcaggtgtgtgatgttcccctcccggggtccatgtgttctcattgttcaactctcacttatgagtgagaacatgcggtgtttggttttctgttcctgtgttagtttgcttttaaaatatttgaaagatgaaatattagaagaaaagaaaattgttttatggaaatgtttctccaataggcaaattaggttagaatgaagattaatgatatctaaccagagaaatcaactcagtggactccaccaaatcggctctcagtgcggctaaaacaaagcaggcagaaaaaggcagagaagcagcttgctgggtctacttgcaccagcaaccccttgcggggggtaggtggggctcccaggcctttggcctcagactgagggcggcactgtcagccccgttttttttcctttgtttgtttctgtttttgtttttgtttttgttttgagacagagtctagctctgttgcccaggctggagtgcagtggcgcgatctcggctcactgcaagctccgcctcccgagttcacgccattctcctgcctcagcccccccgaagtggctgggactacaggcactcgccaccacgcccagctaatttttttgtatttttagtagagacggggtttcgccgtgttagccaagatggtctcgatctcctgacctcgtgatccacccgcgtcggcctcccaaagtgcttggattacaggtgtgagccaccgcgcccagccccagccccctttctttgaggcttttggatgtggactgagccactccaggcttctcttcttcaccagcttgcagacgacctattgtgtgactttgccttataatcctgtgagccaagtctccctaataaactctattttgtatatatatatctatatctatatatagatatctatagatatctatatatagatctatatatagatatctatagatatctatatctatatctatatatagatatctatagatatctatatctatatctatatatagatatctataaatatctatagatatatatacatctatatatagagagatatataaactattttgtatgtatatacacaaaatatatgcatatactaaatatatacactatatatgtacaatatacattgtacatatatacaatatatgtacatatatacaatatatacatattatattgtatattgtatatacatatatattgtatataatgtacaataagtacaatatatacaatatgtacgtatatatgtatatatgtacaatatgtacatatatatactatatatactatatatacaccatatatagtacatatatatacaacatatacatatacaatatatatacaaaataaactctattttgtatatatatctatatatagatatatatagatatctatatatctatatatctatatctctatatctatatatctatatctctatatctatatatctatatatatctatatatctagatatatagatatatatagagagatatatattgtattgggtctgtccctctggaatgccctggttaatataaggacttttaaagaaatagatgtgcattagagatgagaaagaatggaaatcactaaatgaagccgtctactcttactgtttagctttggaaaagtagttcgagggaaaagttttagatttctcttctttagcacaacaaagatcatactgggaaaaccagactcaaagacwgactgtttcagtcttattgaggtaacattgacaaacaaaaattgtatatattcaaggttataatgtgatgttttgatatatgtacacattatgaaatgactgacacactcaagctattaacacatccaggctgggtgcagtggctccgaactgtaatcccagcactttgggaggccaaagtgggtggatcacctgaggtcaagagtttgagaccagcctggccaacatggtgaaaccccatctctactaaaaatataaaaaaattagccagayctggtggtgtgcacctgtaatcccagctactcaggaggctgaggcaggagaattgctcgaactcagaagrcagaggttgcagttggccgagatcttgccactgcactccaacctgggtgacagagcgagactctgtctcaaaaaaaaaaaaaaaaaccaaaaacaaacaaacaaacaataaaagccattccctcacatagttaccattagtgtgtgtgtgtgatgagaacacttagtatctactttcttagcaaatttcaaatgaacaatattattaactgtagttaccatgctatacattaggtctccagaacttattcattttataactgcagaggggctgcaaacagctgaagtcagggcatgggatgcccttctgggggccaagcccaaggaagaatgtggcagaagaggaattcgggctttgggaagggagcagggcatggaacagttgaaggtagcagaagatgcctatggaatccctcctttaacttttcatatctccagtaaaattgccattttcaccacttgtggaaaatgatgaggaatcagtgatctgaccaatctagaatatctcagctatgctttattcaggaggcaaattaatttagaaaggaaattaawaatacttaactttccaaaaaatataaatggaatccacataggaatttgaaacatagtcatgcattgcataaggacattttggttaatgacaaaccacatatacaatggtggttccatgatattatactgctatattttacttttctatgtttagataagttttgatacacaaatacttaccattgtgttccatctgcccacagtattcagtacagtaacttgctgcacatgcttgtagcctagaaggaatagcttataccrtatagcctagatgtatagttggcaacaccatctagttttgtgtaagtacacttcatgttgcctacacagcgaaaagcacctgatgatgccattgtcagaaggkatccctgttgttaagcaatgcatgactagagcatatttgtatctgcaaactcaggacagagaactctgtggtgacatgtagtgcaaggaatttgctgaagtcttggggagtacttaggactaatattcattttgagccaagtattctaaacctctgagagataaggagatcccagtaacatctagggtatgtaaagctcatgcacaacagctgagatytcctcacagcagcacagctgaaagtgcaaatgcaggagcatccaactggactctcactgttcatgtcccctcctgcccaagcattagaatctagaactcacttcagtttttgagcattgtgttaccattgtgtgattttgtttttttaaatgaataagaaagacacaactctgccaaatggcattgtgaacagaagggttatttctcagagggtaaggagtgagtaagtccacatatgccctcagtcaagagagagtgaaaagaattttcaactcagaatttcatatccagccaaattaagcttcataagcaaaggagaaataaaatcctttacagacaagcaaatgctgagggatttcattaccaccaggcctgctcttcaagagctcctgaaagcactaaatacggaaaggaaaaactggtaccagccactgcaaaaacacaccaaaatatgaagatcaatgacactatgaagaaagtgcatcaactcatgtacaaaataactaaatagcatcataatgacaggatcaaattcacacataacaatactaaccttaaatgtaaaagacacagactggcaaattggataaggagttaagacaaatcagtgtattgtattcaagagacccatcctgtgtgcagacacacataggctcaaaataaagagatggaggaaaatttgccaagcagatggaaagcaaaaaagtggcagttgcaattgtagtctctgacaaaacagactttaaatcaacaaagaacaaaaaagacaaggaagggcattacataatggtaaagggaataattcaacaagaagagctaactattctaaatatacatgcacccaataaagaagcatccagattcacaaaacaagttcttagggacctacaaagagacttagactcccacactataatactgggagattttaacatcccactgtcagtatcagacagatcaaagagacagaaaattaacaaagacattcaggacttgaactcaactctggatcaaatggatctagtagacgtctgcagaattctctaccccaaaacaacagaatatacattcctctcagtaccacatggcacttattctaaaattgaccatataattggaagtaaaacattcctaagcaaatgtaaagaaactgaaatcataacagtatctcagaccacagtataatcaaattagaactcaggaataagaaactcactcaaaaccacacaattacatggaaactgaacaacctgctcctgaatgactcctgtgtaaataatgaaattaaggcagaaatcaagaagttctttgaaatgaacgagaacaaagaggcaatataccagaatctctgggttatggctaaagcagtgttaacagggaaatttatagcactaaatgcccacatcagaaagctagaaaaatctcaaattgacacctagacgtcacaattaaaagagctagcaaggcaagaacaaacaaaaccaaaagctagcagacaacaatcaataactaagatcagagaagaattgaaggagatagagacatgaaaaaccctccaaaaaatcaacgaattcaggagctggttttttgaaaaaaactaacaaaatagataaaccactagctagactaataaagaagagagaraagaatcaaatagacacaataaaaaatgataaagagatttcaccactgaccccaaagaaataaaaactaccatcagataatattataaacacctctacgcaaataaactagacaatctagaagaaatgataaattcctggatgcatacacactaccaagactaaaccaagaggaagttgaawccctgagtagaccaataacaagccctgaaattgaagcagtaattaatagcctaccaaccaaaaaaaccccaggaccagatggattcatagctgaattctaccagaaatataaaaaggagctgaaactactccaaacaattgaaaaggagggactcctccctaaatcattttatgaagccagtatcatgctgataccaaaacagggaagagacgcaacaaaaaaagaaaacttcaggcaaatatccctgatgaacatcaatgcaaaaatcctcaatgaaatactggcaaactgaatccagcagcacatcaaaaaacttatccaccaccatcaagttggcttcatccctgggatgcaaggctggttcaacatatgcaaatcaataaatataatccatcacataaacagaaccaaagacaaaaaccacatgattatctcaatagatgcagaaaaggcctttgataaaattcaacatcacttcatggtaaaaactctcaataaactaggtattgatggaatatatctcaaaataataggagctatttatgacagacctacagccaatatcctattgaatgggcaaaagctggaagcattccctttgaaaaccagcacaacacaaggatgccctctctcaccactcctattcaacatagtattrgaagttctggccagggcaatcaggcaagagaaagaaataaagcatattcaaataggaagggaggaagtcaggttgtctctgtttgcagacaacatgattttatatttagaaaaccccatcgtcgcagcccaaaaactcaaacactccttgaactgataagcaacttcaacaaagtctcaggatacaaaactaatgtgcaaaaatcacaaccattcctatacaccaacaataggcaagcagagagccaaatcatgagtgaactcccattcacaatggctacaaagagaataaaatacctaggaatacagctaacaagggaggtgaaggacctcttcaaggagaactacaaaccactgctcaaggaaataagagaggacacaaacaaatgaaaaaacattccatccttatggataggaggaatcaatatcgtgaaaatggccatactaccaaaagtaatctatagattcaatgccattcccatcaaaccacaattgacattcttcacagaattagaaaaaaaactattttaaatttcatatggaatcaaacacctcgtatagtcaagacaatcttcagcaaaaagaacaaagcttgaggcatcacgctacctgacttcaaactatactacaaggctacagaaaccaaagcatcatagtcctggtaccaaaacagacatataggccaacggagcagaacagagacctcagaaataacaacacaaatctacaaccatctgatcttcgacaaactygacaaaaacaagcaatggggaaaggatctcctcctattcaggaaatggtgcttggaaaacaggctagccatatgtagaaaactgaatctggacccatcccttacatcttatacaaaaattaactcaagatggtctaaagacttagatgtaaaattcaaaaccataaaaaccctagaagaaagcctaggcaataccattcaggacataggaatgggaaaagacttcatgaaaaaacagcaaaagcaattgcaacaaaagccaaaattgacaaatgagatctaattaaactaaagagctaatgtacagcaaaagaaactagcattagagtgaacaggcaacctacagattgggagaaaatttttgcaatctacccatctgacaagggtgtaatatccagaatttacaaggaatttaaacatatttacaagaaacaaacaaacccatcaaaaagcgggcaaaggatatgaacagacacttctcaaaagaagacatttatgcagccaacaaacacataaaaaaagttcaacatcaccgatcagcaaatcaaaaccacagtgagtcaccatctcacaccagtcagaatggtgattatcaaaaagtcaggaaacaatagatactggtgagggtgtggaggaataggaatgcttttaccctcttggtgtgaatgtaaattagttcaaccattgtagaagacagtgtggtgattcctcaatgatctagaatcagaaataccayttgacccagcaatcccattactgggtatatacccaaagtaatataagtcattctactataaagacacatgcacacrtatgtttattgcagcactatttacaatagcaaagacatggaaacaaacaaaatgcccatcgatgatagactggataaagaaaatgtggtaaatatacaccatagaatgctatgcagccakaaaaaggaatgagatcatgtcctttgcagggacatagatgaagctggaacccatcagcctcagcaaactaactcaggaacagaaaaccaaacaccccatgttctcactcataaatgtgagttgaacattgagaactcatggacacagagagggtaacaatacaccagggcctattgaggggtgggggtgaggcaaggaacttagaggatgggtcaataggtgcagcaaaccatcatggcacacgtatacctatgtaacaaaactgcacgttctgcacatgtatcccgtgtttgtttgtttggaagaaataaagaaaaaattttcaataaaagtttggggtttttaactctcaaaaaaaaaaaagaaaaggagagagaragagtgaaagccaagctaccctgccttgaaggggtcaattaggaagaaccaaactgaaagtaaccagcaatcctttattcattgttgtagtgcaggccaggatgaaggtgccagctcccacagtgttgcacatggccagggtggtctcacggccaaaggagctctgaaccaaaggctcctcctatcttatggacccagagaggaagaggaaaggactagtagtgaaaaaaatacaaaatacccattcaaagttaagaaaattttcttcaagtctcccccaataaggtgttctcagcagatgcacccaaagctaggggcagcccaattaggcggcctcggaatggaggcacttaaggtagaaatgcaaatacacgagacagggtcagctgtagagttgaggggagtgggkgtcaggatctgagtccttgactgcacttcccttcagggatggcagagcactagctgatgtggggagggcagcttcccccatgagcctgccagataatgacttkgaaacctcctatggtttgacatgaaaggtcacacataggatcttggcctggagccagacacctcatttcctggttgaaatttgtaatgctaaaattttaagttacgcagtcctacccaaatctgatatttttattttcacaacacagtttccttcattttcctaatggataaatggacggcttattttcatatgaattgatagtatcaacaaagagaaagaaacaaagagatcaggccaggcgcagtggctcacacctgtaatcccagcactttgggaggctgaggcgggcagatcacctgaggttcggagttcaagaccagcctgaccaacatgaagaaaccctgtctctactaaaaatgcaaaattagccgggcatggtggcacatgcctgtaatctcagctactcaggagactgatgcaggagaatcacttgaacccgagaggcagaggttgtggtgagtggagattatgccattgcactccagcctgggcaacaagaatgaaactccatctcaaaaaaaaaaaaaaaaaagacacaaagagatcaaatacgggactttgcatttcagccaataataaaatatgtgcaataatttgctttgtttcaatcttctcattttcttcaggtgttttagaatactaagaggaatttttagtaaggaaatatgtagattagatgtttgaagagaatatattgatttgacaattctaaattttttttctgaagaatctgaccttttacaaaatcccaatgaagaccatactccactgaatcaaataatccttttcttatccattactatgtcccctcagagaaggcaaaacataagtatgtaattttgctgctatgacagacagaagagtcttgctggaggccactggcaaacacattaatcactgaagcacctcaactcctcggaccctcaataaatacctctaccccctaagagagatttactgttgttgtgttctgttgttgtgtttttwttattattattattattatactttaagttttagggtacatgtgcaacgtgcaggtttgttacatgtgtatacatgtgccatgttggtgtgctgctcccattaactcttcatttaacattaggtatatctcctaatgttatcattttcccctccccccaccccacaacaggccccagtgtgtgatgttccccttcctgtgtcctgtgttctcattgttcaattcccacctatgagtgagaacatgcggtgtttggttttttgtccttgtgatagtttgctgagaatgatggtttccagcttcatccatgtccctacaaagaacatgaactcatcattttttatggctgcatagtattccatggtgtatatgtgctacattttcttaatccagtctatcattggtggacatttggcttggttccaaatctttgctattgtgaatagtgctgcaataaacatacgtgtgcatgtgtctttatagcagcatgttttataatcctttgggtatatacccagtaatgggatggctgagtcaaatggtatttctagttctagatccctgaggaatcgccacactgacttccacaacggttgaactagtttacagtcccaccaacagtgtaaaagtgttcctatttctccacatcctctccagcatctgttgtttcctgactttttaatgatcgccattctaactggtgtgagatggtatctcattgtggttttgatttgcatttctttgatgggcagtgatgatgagcattttttcatgtgtattttagctgcataaatgtcttcttttgagaagtgtctgttcatatcctttgcccactttttgatggggttgtttgtttttttcttataaatttgtttgaggtcattgtagattctggatattagcccttttccagatgagtagattgcaaaaattttctcccattctgtaggttgcctgttcactctgatggtggtttcttttgctgtgcagaagctctttagctgttgtgtttttgttgctgctgtgttatactgttgtgtttttgttgttgcattatgctgttgtatttttgttgaacaggaggcatgcatgagcacagctgtctatgggtgggtccaaatgtgggagcttggtgtttggcttgcccctgtgaatagccccatcctgtctgcttgggccaatgctcccacctaacagagggactgttccccaggaaggtcagcagcctttcatgggagtacatgttggtttcaggtcaaatccatcccccagagaattgcaatatcatacacagagaatgtattgcagtgtctgaagagagttgcaccaaggactcagaatctgactcccaccccgtcaactggccatagtcttgtgcatgtctgcattcataccttacatgcctccattccaagtcctccatattaggctgcccttagccttgggtccatcttctgagatcaccttattaggaagcaatgaagaggtggcagaagctgcttaaactttacagcctcctccgagtaagagatcgccagtccctacattaagatgagcatgtaataccacatgccagacattaaccaatttatttataattcatttaaacataaattttgtgcatgagctaggtgttattattattatttatcttacttttagatgtggaaacaaagaggcagagagagggaaaaacttggccaaggaaacacatgtaataagtggtaacactgggatatggctccaagctgtctggacgttttaccaccatgccaaacccatctctcagtgaagccaggggactgaattcacacaggtgtttgatatcatccaatgcctccaatcagatgacttaacagaagacagatcctttctcaaaagcaccacagttacctacacaacaaaaagatttcatttaaaacctagcatcccatcctcctgccaagtctgggcccaaaacttagcatgaagtgaaggggcttacatctttttacaacaaagtgtgggatgagaagagatagaggaccacagttaaattgagaagatttcttcaaaattgcacactttaagtagattgatctttttcccttaaaaaaatggaattttaaaagatttacttacagctttgtgcacacttacatcctcctccagattcctctgttttatgacaaagacaacacaggacatagatggtttaggcatcttccctatggggactccagatagaagattcctattccacataactttatcctacttgtcaactatcagagtccaaaatctactaaatactgtaggagggtgggcatggccaagcatacacgtgctgaaactacatggttaattttaaatttgattaaagagcacatagaaaatcatttctgtatatttaatttacatgccatatacccactccccacatatgcacagctttccccaccatcagtatcccataccaaggggtttatggaaactctctgtactttctgctcaattttgctatgaccgtaaaactgttctaaaaaaataaaatgtttaattaataaaaattctgcatcagagtgttacatttattacaagtgtaatatattgaacatcatcattaccaaaagcccatcattttacattagggttcactctggcatttacattagggttcactcttgacactgtacattctatggatttggactaatgtataatgacctccatccatcattatagtatcatacagaatagtttcattgccctaaaaaatcccctgtcttccacctattcatctgttcctccctatagtccctgacaatcactgattcttttactatactcatatttttgccttttccagaatgttatgtagctgaaatcagtaagtagcctttttagactagctcctttcacttagtaatgtgcacttaagtttcctccatgtctttttactactcaactccaagatttggcataaaactacagtgataaaaggtgtgtggtactagcaaaagaatagacaaatagcacatcgctcaataggatagaatagagaacccagcaatagtcttcgtagctagtttctttttagaccgcatatttcattgtctagatataccacagtttatccattcacctgatgaaggacatcttggttgcttccaaattttggcaattatagataaagctgctataaacagccatgttcagatttttgtgcaaacatgttttaaactgttttgcatgaataccaaaaggcgtgattgctggatcatatggtaagaatatgtttagttttctaagaaactgccaaactgtcttccaaagcatctggaccattttgtattcccaccaggaataaattaaagtttctgttgaactcagaatcctcaacacatcctcaccagaatttggcgttgtcagcgtttttggaatttggccattctaataggtgtgtaatggtatcccatcgttgttttaatttgcaataccttagtgacatatgatgttgaacatcttgtatttgcctacttacctctgtatatcttgtttggtgagctgtgtattcagatctttgggccattttttaatagagttattcattttcttatagctgagttttaagagttatttgtatatttaggataacagtcctttatcagatgcctcttttgcatatgttttttcccagaatgtgacttatcttctccttctcttgaaactgtctcagagcagaactttttaattttaattaagttcagcttataaattatttctttcaaggaacatgtttttggtgttgtatttatttatttattatttaattttttagttttttgagacrgaagctcgctctgtcgcccaggctggagtacaatgacgcgatctctgctcaatgcaacctccgcctcccaggctcagtgattctcctgcctcaatccccctagtagctagcattataggcatccatcaccctgtctggctaatttttgtatttttagtagagacagggtttcaccatattggccaggctggtctcgaactctttgccttaagtgatctgcccacctcggtctcccagagtgctgagaatacaggtgtgagccactatgccckgcctggtgttgtatttaaaaagatattgccatacccaagatcacctagattttttttttacatattcaaggmattttatagttttgtgttttacatttaagtctataatgcattttgaattaatttttaaggagtgtattcatatttttgcatatggatgtcctatttttccaggatcatttgttgaagactatctttgctccattatgctacctttgctcctttatcaaagatcagttgactatacttatgtggggctgtttctgggctctctattctgttccattgagctatttgtctatttctgtgccaataccactctctctattactgtattactttattactaaagctttatactaagtcttgaagtttggtagtaacagtctgccaacttttttcttctttacatagtgttggctattctaggacgtattgctctccatataaactgtagatttggttgkttggcatccacaagataactttctgggattttgattggaattttgttgaatctatagattaagttgggaaagactgacatggtgatgatattgagtctccctatccacaaacatgaggtgtgtcttctattatttagtcttttgatttctttagtcagagctttgtaattttcctcataaatatcttgtgcatattttgttagatttatacctaagtatttcattttatggggttctaatgtaaatggtattgtgtttttaattgcaaatgccacttattcattgctagtatataggaaagtgattgacttttgtatgttaaccgcttatctgcaaccttggaataattgtttattatttccaggagttttatgggtttttttttttttttttcagattttctacatagaagatcatgtcatctgtgaaaaaagacagtttcagttctctgttcctaatacctcttatttatttttgttgtcatattacattagctaagaatttaagtacaatgttgaatagaagtggtaagaggaatatccttgccttgttcttgatcttagcagaaaaacttataggctgtcatcaaatatgatgttagctgtaggttttttgtagatgttttttgccaagttgattttgtttccaagttaattgatttttgctctaatttttattatttcttttcttctacttactttggatttaaattgctcttctttttctagtttcctaaagttgaaacttagattattaattttagatctttcttttttctaatacttgtattcaattcctagtttcttctcacttctagtttgctgaaagtttgtaattataaatgggtattggattttgtcaaatgctttctgtgtacctaygatcctgtgatttttcttctttagcatgctgatgtgatgaattacattagttgatattagaaaagtaaattagccttctataactgggataaatctcacttagtcatgatgcagaactctttttatacattgttgaattcaagttactaatattttgttgaagtttttgtgtctatggcctgcagttttcttctcttgtaatgtctttgtctggcttttgtattaggataatgctggcctcctaaaaygagttagatcacataccctctgcctctattttctggaacagattttagagaattttttttttttttgagatggagttttgctcttgttgtccaggatggagtgcaatggcgcaatctcggctcaccacaacctctgtctcccgggttcaagatattctcctgccttagcatcctgagtagctgagattacaggcatgcgccaccacacctagctaattttctatttttagtagagatgggtttctccatgttggtcaggctggtctcgaacccccracctcaagtgatctgcccacctcggcctcccaaagtgctgggattacaggcgtgagcccctgcgtcagcactaaagaatttatatcatttcttccttaaatgtttggtaggattcaccagtgaacccatttgagcttggtgctttttgtttgggaagattaattatagattccgtttctttaatagatatagccctgtttaaattatctatttcttcttgtgtgaattttggcagacatgtctttcaaggaattgatctggtttatctaggtggtccaatttgtttacaatattattctattgtctttttgatgcctatggatgtgtagtgatgtcccctctttcagttttgatgttagtaatttgtgtcttctccctttttttcttagcctggctacaggtgtatcaatgttattgattttttttatttctattcaatagcttcctattaaacttatggtttgttgattttctctactgattttttccaatttcattgatttttgctctaatttttattgtttcttttcttctacttactttggatttaaattgctcttctttttctagtttcctaaagtaggagcttagattatttattttatatgttgcttttatctaatgtttgtattcaatgctatacagttctctttaagcagtgctttctctgcatatcacaaattttgttgttttatttttattttcatttagtttgaaatatttttaaaacttcctttgaggcttcttctttgactcatgttatttcgaaggatgttgcttaatctgtaagtatttggagattttccagctatctttccatgatttatttctagtttaatcccactgtggtctgagagcagacattgtatgatttgtatgctttaaattgtgttaagttgtgttttatggcccagaatttgttctttcctgctgaatgttccatgtgagcttgagaagaatgtatattctactgttgctggatgaaatagtcaatagatgtcaattatatccatctgttgatggttgtgttgagttcaactacgttcttactgattttctgcctgctggatctgtccatttctgaacagggacattgaagtctccaagtacaatagtggatttttctatttctctttgctcttctatcagtttttgcctcacatatgttgatgctctttccttaggcccatacacattaaggattattatgttttcctggggaagtgatccctttgtgattatgtaatgtcgaactttatccctgataattttccttcttctgaagttggctctgtcaataattattatagctatttcctatttcttttgattaatgttaacatggaatatttttttccaccccattactttttatctgtatgtgtttttacatttaaagagggtttcttatagacaacatgtagttgggtcttgttttcagatccactctgacaacctctgtcttttaattggtatacttagatcattggcatttaaagtaattactgatatagttggattaatgtctaccatattcattgctgttttctatttgttacctttgttctttgtttctatttttgtcttccacccttttcttccttttgtggttttaattgagcattttatataagtttattctcctttcttatcagatcaattatactttctttaacttttttttttagtgattgccctagactttgtaatatacattcacaacaatttcatgtccactttcaaataacactataccagttcccaggtagagtgagtgcctcataatagtaaaatagtcctagtttatcttcccatgccttgtatcactacttatttattttactcatacagaarcatatgtaaacatatataatcaaatatattattattatgaataagctattgtctattagatcagttaagaataagcaaaactaaaatgtttattttatcttcacttactccttctctgatgctctttctttctttatgtggatacaagtttctctaacctatattactttacagctctctaaagaatttcttgtcaacaaattatctcaattttttattttataataaaatctttatttcttcttcagtttaaagggataatttcacagggtgcagaattttaggttggtgaaggtcttttcttaacagtaaatacttctctctttttaattttactttaagttctgggatacatgtgcagaacttgcaagtttgttacacaggtataccatagtggtttgctgtacccatcaacctatcatctaggttttaagccctgcatgcattaagtatttgtcctaatgctctctccctccttggcctccacccccgacagaccccagtgtgtgatgttctcctccctgggtccctgtgttctcattgttcaactcccacttaggagtgagaacatgcagtgtttggttttctgttctgtgttagtttgctraggatgatggcctccagcttcatccacrtctctacaaaggacatgaactcactcttttttatggctgcatagtattccatggtgtctatgtgtcacattttctttatcctgtctattattgatggacatttgggttggttccaagtctttgctattgtaaatagtgctgcaataaacatatgtgtgtactgaacactaaatatttcacttctctctcttcttgctttcatggtttccaaggataagtcagttgtaattcttttctcctctgtaagtaaagtgttgtgttttttttctgcctctggtttttttcagaacttttttccttatctttgattttctgattttaagttatgaatctctgtatctacctgcttctcttctatgataggcctgtatgtagtttttttggcatttatcctgttcttggagcttcttggatctgtgggttgatatctgatattaatttaagaaactcttcagtcattgttactgcaagtattacttctgctcctttctctcttttttctccttctgctcttcttattacacatattttataccttttgtagttgtcccactgtttttaaataacctgttcttgttttttaaataactgttattgtttcttagtttttttatttgctttttcattttgaaggtttctgttgatatatgcgcaagctcagagattttcctcagctgtgtctagtctagtaatgagcccaacaaaagcatcctttatttcttatacaatgttttttatctctagcatttccttttacttttttcttagaattccatttctctgcttacattgtccttgtgttttgcatgctgaccaattttttcattaaaccccttagcatattaataatagttgtttcaaatttttattccagtaattccaacattcatgccatttctgagtctggctctgatacttcctttgtctcttcaaactaagaagtttgaagttctcttttagtatgccttgtaattgttttctgatagctggacrtaagtgcagagcagaaggaaacatgataaatgtgcctttaacgatgtggtggtaaggtgtagggggaagtgatgcattttacagccttgcgattaagtctcagtttttgagcctctgaattgtgaccttcacaaataagtcttagttttttgctctcccacttagatgagaaaggattagtaaagcaggctagagttgggtatttctctttccccaggtcattaggttctgataaaatcctaatagtttaggtcatgtttaaaataaaagtttctcttgagagcagggcttgttaagaacagaatgctctgacatatttcaaaacggtttcttttcccctagccctgctgagggcacaaggggatttttctctaatactcactgtgagaacttggtggagctcctgtaaataaaacttacaaaaatgtgtggggtcctcattttttaactttcaaatggtccactgtaagcctccaacaattcatcaattacggtccaaagttttctacccggtttaggtttctgttccattaagttgtgattctctgtacctacgtgcatatctccaattttgggagsagtggtttgccctgcaaccttacttctctgagtatctaagaagagttgttgatttttcagtttttctagcttttattgttggagcatggactgacgacttctaagctttttcccttccagaccagaaatgtaacctttaaaaacaaaattgctaactttaggcatctttaaaagtgaatatgttttgtgatttagctttttgccatctatttcaacccttcctatctgaagttttgtattagtccactagaacaattttyagttgtcttgcttcttagcttrtatcagtctttcttacttttagagcaatgagttatgtatttatgtgttattctgtgttgtttattcaacaaacaggtttttaatgagaccttcttaccttttgttgaactgatttgagaggttccaaagaattattttcaatttttagcaaaagtttcttagacaaatgctgtgtgtcagcaatggactagatgcaaagttacaaagaaaaataaaataaagtaacagtacaataaaaattcaaaattttattgaacagtccaggcacggtgactcacgcctgtaaacccagcactttgggagtctgaggcgggtggattacctgagatcaggagttcgagaccgccctggccaacatggtgaaaccctgtctctactaaaaatgcaaaaaattagctgggcatggtggcaggtgcctgtaatcccagctactcaggaggctgaggcaggagaattgcttgaacctgggaggcggaggttacagtgagccgagatcatgccattgcactccagcctgggcaacaagagtgaaactccatctcgaaaaaaataataataataataaaataaaataaaacaaaacttgttgaacatcataagaggtccctcagaagaccaccaaaataatgtaatatagtattgctgataagctcaggatgagagatagtaaatagtagattctcccaaggagggagccatcacttctcactgataaaatctaaccattattgaacaactgatatgccacttttggataagtatgtttttagtgattaaaaagtacctaaggaagtgaagaaatattttttctggttcttgtaagttgagaaaaactagttaggtaatgtttcatttagaaatgcagaatagacacaacatagaattccagagaagatcgaggtgatctcaggaagccttcatgacagagcacctaggatagaccttgagcaacggccaggattcggagaggagaatttggtgagcaaaggtctgacattgggatgagcgtggcataacttttaattaggtttgggtttgaaaagaaagaaaatatatcttattaatatttctggttccatgttgagaggccacagtggaatggtataaaaaaaaacaaagtttctcaatatgattttggttggtttcaagacagagaaaatatatattaatacaagctctatattcaccttcccaattagagtgtggtgtgtagaaaaggctgtaaaaataatttatcttgaacatgttctttagttgaataggtgatagtttcagctgttggaatccacaactacccttcttcaatcagttgatctgaagcagcattaaaatgttctgataagctcccttggaaggatagtaagccaacatttactaaacatttaaaaacactgcccttccaaggggattatggaagcatttttatgctctctgatarcaaataagtatactcaataccaaatagatgtttagcaaataagcattgatagctctgtctttgtttgtaattgtccttttgttagctaatttgagcaacaatgaaaggatatgtcatacaggtactttcctcattcaagcccactgcctacatgsaggatgcaggtcacaattctctgttcaggccagttcttcctttcaactaacttatgtttcatgaagttattttctaatttattgaaaagtagtttctctgcccacaatgaaagtactttattttcctctgtgctccttatacaatagtgtagaaagagcatccaggtatgaaatgtatataaacaaagaattagcattccatacttgagttttcatctcttccacctggagcaccattagatgttgatgctcttggaatgaacctgcttgcacactcaccagcagcctctcatcaataggagagggacaggattgaggtaccctctctgcaggcttgcctgtctacccaaaagggaagtggtaaccaaaaagaaagggtgtggcatttgtttttcattccaccctctcatcaccaaagtccttccgcaccatttgctaatgtggtatttccaaaattttatccctttatgattgttaaatggctttgtccctttaattttctatcctttgaagactaccagatgtctgtagtttgctgcatctgagaatatctgaaagagagcaaggtgggagggtaccatgatgctggacccttctgaaggccaatgggcagaggcaagtatgatagttaatattgtcaacttgattggattgaaggatgcaaagtattgttcctgggtatgtctgtgagggtgttgccaagggacattaacatttgagtcagtgaactgggagaggcagacccaccgtcaatgtgggtgggcaccatccaatcaactgctagcacggctgcaataaagcagacagaaaaaggtgggagaaacttacttgctgagtcttctggccttcatctttctcctgtgctggatgtttcctgcctttgaacatcagactccaagttcttcagcttttggactcttggacttacaagagtgatttgccagggacactctggcctttggccacagactaaaggctgcactatcagcttctctactttwgaggttttgggactcagactggcttccttgctcctcagcttgcagacagcctattgtgggacttcacattgtgatcatgtgagtcaattctcgtaataaactccccttcatatatacacctatcctattagttgtgtccctctagagaaccctgactaatacagcaagtgtcgctgcgtggtggaaaaatcgagccagcttgacttcactattaactattaaaatgctacatctagttagccttttgaacagagacaaaattccttccatatttaccaattcacatggtaattttactatttctaagatgtagataaaaatccttcaaaagccacaagatatagtttcagccttaagaatgtggcttcttccctctttctccttcttttctcttcatcacactcttcatcctctttctcttcttccttgccttcccccmgctttctctttttcatcttcacacaataaatactagctgaatgatgagactaaagtagggatgtcaggaaagaccctgctgaaaactatttgagaatccatgaccagtggaataaggcttaaactcctgctatttgtaggattagaattggtagcaatggcacaaacaacaaaactagggctgatgaagatgggtgacataggagatacaatagattcctaaggctgccttaattcattttagcaaggattagatatacttaatagttcctttttatacaaccatttaattactttcctgagtagaggtatctgtatgtattatataatgtaaaatctttccaaattagaaaaaaataataaacagaaataaaaaggaaaggaaggagcattgtcctttagacaatattatttcatagtcagatcctaayataggttaacatttcaaatgacatctgcaaaatctctttctaaatctgcttccatcatagtgttaaatacttcacattarcaccatgtggagaaaaaggcagacatttttaaaattgtygtcttattaactratgtgagaaaatgtttctgaatctaatgaagtatgaattagttatatccttatattttccaggctgtgattattagtaccctagtgaaatgctgaaatcacatgtttgaaaatacagatacaaacatatttctgaagaaaataaataaaccaaatcaggcttgttactctggttcaayaataaattcaaatatgaagaacaggaactcttaaatataaagattagaaagaaaggtactctcatgtcaaaatctcagttgttttatttggtaaaaaaaaaatagttgtttaatttggtaacaaattatttaggtcattgtttattcagacagtcttctattagcttctcacaaacaaatagaagaaggtgatactccttcctctgagaatctgtcattaatttggaaaggtcagacacaccaacataaaagagttaaaaaatggcaatgagatttgttggtggtgataactagttctgtgggtcaatttcatgacctaagaaataaagggatggggagggatcctttaactcaataggctttattccatctcaaaagtgtatatcagtataaaaaggtggtttaataagaggaaaataaattgtataattttttcacatagctatcgagagtggacagctctgtaccaagaagtgcagcatggttctaaatgtcactgaatcaacttctccagataaatgcagagacctacaaatttgtgcataaaaggttgagctcagggcaacttgctcacctcacctcccatccatgcttttccctctgggtcaaggctcctccatgtccatacgttaaggagaaacactcaaatggctcagtggcctgcaaatagggtgtgaggactccaaaaaatgtgattgcactgtttcaaggagtagcagccactcagtttgagtggactgctgatatacagaatttaggtccaatttttcctctaattttttaagagaaatgaaaaacttgaatttttatgtgaaatcttccaaaatgaccttctaaaataatatttcccttttgacaaccatcataacattttaaggaaacaacatatgaaccaaatgaaatatatctataagctatgggctatgggctggacatagactaaggacaccagtgtgttatatttgttccagtgattcagtgtgaactggagaagtgaggggaagccggtgatgtttactgcagggtttgagctactccttgaatgtgtgtgtgtgtgtgtgtgtgcatgcacacatatgcacatatgcacataactaactgtgtacacacaaggatatatataactgggaaggtaaaaatggaggccaatatccagaccctggaaatatccatgatcaaatggctggaatgataggaaagtatggaaagtttggtcatcacagtagaatgttttcctggctagaggagacagaagattgagtttgttgtaaaacagagccttgaaaggcagatgaagatgtttgtgctagcagaaaattcttaaacaatcttaattaattacatgttgatcatatataaagatgtgtgtctcccaggatacyggacataaaataatactaccaatgaaaacccaggactccatataatagattaaatgaattgtatcaagacccaacaaacaatgacactttcaaaaatatttcttcctcctcacttattatcaatcataaatatgaatttcaaatcttagttgatttcagtggcaaaaatgctggagttttgattatttgtatagtgatcctgatgtaaatttctccagtaggcaagacagaaaattagrgttgagctgaatgtcaattattcatgctaatttccattcatgtacaaatatctgatgaaactcatataatgaagctgggtccattttcacctttagtgaaaagaaaatatcactgaaaggatttgaaactaggaactgaaaattcaaaattatctttttcttgaacactcgaggaactcaagattttcacattacttttgttttggtttcactttttcggtcttttgtttgtgttttgttgttattgtttatttattattatttgtgtttgtttgttgatattatcttcttggaatgaaaattccaaactagagagaagggaatgctacaaaatttaaattttcctcccagcctttaaaccagggcatagttcacctctccagaggcagcagctgctatcagttctttggataaacttccagaaatattacatacatataagtatcacttagacactgaattaagcacataaaagagcccaaatagaagtcacttagaaggtatagatttgtttttctctcatgtcraagaggtctggaggcaggcacaccaagctagtaaatatcagagactcaggcacttttaatctttctttgtcattattctcaggttgtagtttttatccttaaagtcacctcatgagcacaacataattgctagagtgaaatctatcacatcaatattccaggcaagaagaaggaagaacaaaaggatatcactcccagcagtcagctccctttaaagagctttcttgaaaatcccacatcayatctaattgtttagccttttaggcttaagcctaaagtaggttttaaggttttaagtaggttttaagctggatactttgcaagtcccaaatacaggggttctgktggtaaagaataaaggaagaagggatattgaataggcaactagcaacccacaatatagaagcctacacrtatatgtattctcttccttcacattttttaaacaaatggtagcttactaacacagtcacattgcttttaactctatcctccacattcattagatttcagtggtaccaaaaccaaaggccaaaggccagggctgattcctctaaaagataggctctgccctccttcagctgctcataataacaattgcttcctgcactccttgctatgcaaagaggagcagtcacaaaccagcaacatcactgttacytaaaagcttccagagtctactagaaatgcagaatctcagctcttctccaartctactgaatcagaatttgtagtttaacaagatctcaggtagtgtggatgaggatttcagtttgagaagcagtatgcacatttagcccttctaaggttccagattagtgacagcaaagcttgagagtctgttaggagccttctcccaactagcttttggggtctggaagtaattccatatcctaggcggggtatctgtgagaaccctagagtaaaccagcaccagtttgagcatcaagctgtaaacttactaatctatttctgattgtgccagtagtcagaagttctggtccttcttccctaatgtcgtgggctgggtccttcctcctatccccactccctctctgcaaaacttgaaggaaagtagcattcaactccagctaaytccctggttttatcttcccttttcttacggagctgtccttgcttccagtttccttgactcttctcaaatgagcctcacttgtttctaatcattaaaaccaaaaactctgagaatttatcaccatcctgaagcctagatcctggctttttttttctttttttgcttcattgagtcaggacaacgttgatgtctcagtcaatttgagctgctacaacacagcaccatagactgagtggcttaaacaayagaaatgtatttgtcgcagttctggaggacaggaagtccaagatcagggtgccagcatagtcaggctcgggtgagggcccccctcttgattcacagatggatgccttctgtctgtaacctcacrtggtagggaagagagacaaaaggagaccaggctctctcctgtctcttcttattggggcactagtctcatcatgggggctccaccctcatgacctaattaccttccaaaagsrtcacctcctaataccagcatgttaaggattagagtttgaacatgtacattctgaggggacacaagcattcagttcataacacttggctatttacagtagctaggctaagggctgagtttgacaccctctcaaagtctcttttagagtcagtcctgcctcccagatctcaggcagattttttccaccrtaagtttataccaagccttgagcgtccctgatggttctcttttacccaagggtaaaatcagcctaatgcccaaaagaccatgctgctaatgtcaaggtgtaacttgttgctttgtcccaccattttttaagtccactgttagcacagcaagaactgcttctaggtgctggggccaggctgaaatgcagaggttggttaagtggctctagctgggatggagataggcaagcttagcagaacctaataattgcagtctagttgggtcctaatgtcaacactatgtgaatttggatggataaaaaggccattagatttgacaaaatgtaggctattwacctttaagagagcaatctcagcagaaaagtagggccagaaggcagattgcaatgaattaagcaaggaatgaaaaacagaggagaagaggcarctgataacattcatttctgacatctgtgggtagaaggaagaagctataagatgtaacagaatcaaattayatttttgtaagataagggagaactacacatttttgaaggcagaagggaaagagtctgtgcaaaggacatactggagacaaactcaatagagcaacagaaaaatctttgagagtaaagataaygaaggaacactgcagaggggttgtctaaagaggaggaacttctcatatatagtaagaaagaatgaaggaataaatgtagacacaaaatacaatcaggtgtgtctgcacattggytcacctaaatagtcttacactcaacaaagtaatagaacaggcaatgttttttattacattgaggwcttwcatagaatcaaagatttgtattgtaagaaaagcttatggaaacaaatctgttggtgtaatttttttttttcatttaaagagatgggaaaccatgaatgaaaaaaataaactgatttgccaagactggtttaaagtaatctagtggccttcaggacttgacactatctaaagagtcccaatggggacatagacactctaagagtaagccctaatgagttaacctcacttcacttttggacatagttactaggctatgctgggattcaagtgtgctatgatccaaggtgctatggtttgttttgtccctgccaaaactcatgttgaaatttgttcctcaatatggcaatactgggaggtgactcccagtggaaggtgtttgagtcagtggggcagatccctcatgaatagactaatgctctcctttgggagtaagtgacttctcactctcatggtaatggattagtttctgagagaacaggttgttagagtctggtttccttggtttcattctccctccatgcgatcratttgcacatgccagcttccctctgctttctgacacaagttgacgcagcctaagacccccaccagatgcagatgcccaactctgaacattccagccatcagaattgtaagccaaattaatatattttctttataaactacctagtctcaggtattctgttatagcaacacaaaacaagccaagacacatgcacctcaaggtgcaaattcaagtgcacctgaatttcatcaaagcatttagcaatcaattacactccaaaaataatgaatctcctggaccaaaaccagatgcaagcaactgaagggaaatatcatgttaatatagttctggggcttttccaaagacatctcagaactcttagtttgggcaataagaaaatgggaatcaaaggaaaaaaaatcattatatmaaaaagacacaagcatgcatatttttatcacagcataattcacaattgcaaagatatgaaaccaacctaagtgtccatcaactgaagagtggataaagaaaattaggtatattcrcaccagggaatactacccagccacaaaaaagaatgaaataatgtcttctgcagcaacttggatggaacttgagaccattaytcaaagtaattcrggagtgaaaaaccaaatatcatgtgttctcacttataagtgggagctaagctatgggtacacraagggatacagagtggtatagtggatattggagactcagaagggaggagggwggaaagaggataaggtgatttttaaaaaactacatattgtctcaaactatgaaactactacaagaaaacattaggaaaactccccaggacatcagtctgggcaaaaatttcttgaacaataccccgcaagcacaggcaaacaaagcaaaaatggacaaatgggatcacataaagttaaaaaccttctccatagcaaatgaaacaatcaacaaggtgaagagatgatgtacagaatgggagaaaacatttgcaaattacccctctgtcaagggrttactaactagaatatataaggagctcaagcaactctataggaaaaactccaattatccagttagaaaatgggcaaaagatctgaatagatatttcttaaaagaaaacatacaaacgggaaatagaatatgaaaaagtgttcaacatcattgatcatcagagaaatgcaaatcaaaactacagtggaatatcatctcaatccagttaaaatggcttatatccaaaagaatagtaataacaaatgctggcaagtatttggagaaaagggaacccttgtatactgttgatgggaatgtaaattagtacagcaactatggagaacagtttrgaggtttctcaaaaaactgaaaagagagcttccatacaatccagcaatcgcactgctgggtaaatattcaaaagaaaggaaattggtatatcatagagatatctgcactgccatgtttgtttcagcactgtttacaataggcaaaatttggaagcaacataaatgtccatcaacaaatgaatggataaagaaaatgtggtacatatacacaatggagtactgttcagccataaaaaaagaatgagatcctgagatcttgtcatttgcaacaacatggatggaactggaggacattattctaagtgaaataagccaggcacagaaagacaaacatcatatgttctcacctatatgtgggatctaaaaatcaaactcatggagatagacagtagaaggatggttaccagaggctgggaagggtagcgggaggggttagaggagctggggatggttaataggtataaaaaaagaagttacaaagaatgaataagacctagtatttgatagcataacagggtgactatagtctataataacttaattgtacattttaaataactaaaacagtataatttggattgtttgtaacacaaaggataaaatgcttgaagggatggataccccattttacatgatgggattattatgcattccatgcctgtatcaaaacatctcatgtaccccacaaatacatacaccttcaatatacccacaaagagatataaaataatttttaaaattacatattgggtacaatgtacactactcaggtgacaggtacactaaaatttcagacttcactattatgcgattcatccatgtaaccaaaaccacttatacccctaaagctactgaaattaaaaaaaaaaaagaaataaagaaaatgggtaccattcatgaaaaaaagttctcatttctattgatttgaacatattattatgaaaaattgatggttgttkctcactgaattgaaaaagttacaataaggccaaacgtaaagtctaagaacyctagattattagacacaagcatcctggagctatgttgttcttttgactcatatcttgtaattcttgtgctgcagaaaaatgcttttaaaagcttaagccaccatttaaaaagtacatagcatatagtgagcaacgtgtggaggtggatagcacttaattctaagaaaggattactctgaagaattacaccatyatcctggggattacagtataaaagaccttgccactactttgctaagtaaatgcagctttggattgtgaaaggagaactgcatattgatcagcagtaagcagagaggttaacatcatgggctccaaagccagagygtccctacctaagtggtttggggacatgttaattaaactctgtgcctcaattttctcatacrtagaataaaatcaacaatacaacttagcacttggagatagaaggacttagtgaattaatgaacatacagtgttcaaaatagtatccaaytaaaccctgtgctaagcactagatatccattatcttgataatcttcacaataattggtgaagtagtatgattatatctatttgacagattacaaactgaggctcagtgaggttaaataccttacccaaggctcactctaatagtagtggcaaaggtaaaagttaaactgagatctctctgaccacaaagatggactcttgaccaccataaccatcaactgtgaggtgagtgttggawcccaggaacaaggctgaaacccatcctgagacctgggtatatcagagcaacgctgttggcaagagtggcctcatgttgatcccccaactgtcagatggaaccccttgaatccctgccacccaagaacagtaatggtcctgagaatagaggtgaattatttccagcggtcaggagagaaaagacacaaaatctcagatccaaggaggatgtaggagcacaatacaggaaaagtggtgatactcagtgtccattttgccaagaccataggggaggcccagtagtcaatgacatgagatcctctcccacccttgatcctggagtggatggtctgtgatctgttgcagcaatgacggaggatgagcagatccttggttacacaatgggcttcactcaaaggtctatcagtaacaaaagatggtactgaactgggagcagtggtgtgggcctccaatatgagctacttcccacatgggaagctgaggcaggagggtcacttgagtccaggagttcaaggttagcctggaaaacacagcaaaacactctatcttaagaaaaaagaagagagagagagtgagaaagctgatactgtggccagtttctcacacataacaccctggggccttctcagagctgggcctacagcatcatcagcctaatttygactcttgtgcaaggcagtggaattaggtgtcatgcactccatctgctgattcagccatacatatcacagcatctgccacatttcactaggtaggacttttacgtacrtcccgcaagttaggaaggccatgaaacaccattcaattacagaaaagcaggattccctactacgaaacatcccctctcaacttccacagacacatatggatagaggaatgcctgtctttctcttacattctcctgagaactataaactccatatttctacatgtggctttatctgcatcgaggggctraacagtctactgagtttaccatgactcactggatggcaggagcagcacctgcaacagaaagagctccagacattgccatttgtaaaaacataccctcaatggctccttattggctaagtcagctgctcagtgagaagcagacaggcagggrgtggacatgtcagtctgtatgcccagagggtggtgcctgactgcctaagcatggggatcagagcacagctgctctgccatccactgcctcccagtggctgctctggggacctcagctctcaatgcatacaacctggagatgaacacctactgctgggttatgtggttctgtggaaatctgtatttgaggatccattggcacaaatatgcttcctgaaatactgagggtgccccaaaatgaaaggggcacaaaaagagtccaaatgctctagtaagccagaaaccagattcaaaatgagtggtaagaacaagggttttaagtagctagaggttgaagtcaatagctcaagatgggaatgtgggacagaggttgaataagcaagtctgaggtcagcctgaatagatacaggccaagagctcctgcccaagcccaacttttactccagtttcttgggtctgactgcatttaaatgatcaggcatggaggaggcagagctcagtgtaacctagataatttataagtccccatagccacaaagacatgtatactcaacccaacccaagaccttgcctgtcacattctgacamgacaaaaaccactctctatcctcaaaatatactcgtagtcatgtgacacatttatgaattctcttttagtttacattttggattgtaaacgggtaaatattagatggaacttttccttgatagaagtatttttcttcaaatgacctcataacactcagatataatgatcctatcaaactagccacataataccattgaagaattattgaatttggcaatgtacacttagaaaagtcctacatgaaatgatctacttaaataggcccctttacaaaaaaatcttaggcaatgttcttattccttaatgacttgctaccagaaatgcattatcttagaacaaggttctttgtgagtcagggtaacatcgatgtcctccatgatattgctgagctggtgtgtgcagagtgtctgcatcacagaagtatgtcactgaaagtcttatctttcttggtagaggccagcgaatcatttgtttttcattttgaaactgtctccacaagtgcttcccatacacataagggcagtaaatccccagagcttgaataaatgtgatgctgtttctgttgtgcatttttatggtcatcgtggagaaaacaacttatttccatattcattgattcatttggagtccagggtgccagtgggactcttagaagagtgaaccaaatttcttcacataatttcaggcttcacttggcataagacacttccatagaagatgcagctctaattctggattcctgaaggaacagtaggagcagcttgattaaaaacaaacagattaggtattactgggagtcacactctccccagagtgatccaaataaataagaggaccgtctctcctaagacttcttcccctgaggatcctaagagcctagacttctgttctgctgggcgcacaagayagcacagataggcctgggtgacagttgcactaaaaggccctctcgggagccatagaaaaagaaatgtggccacaaagcatggggagatgaaactgtccacctgctgcctcttcttcagtctcagagtttcttgataagccctctagaataaggaaggataaatatgctgcctgtattaatctgttctcacgctgctatgaagaaatacccaagactgggtaatttataaaggaaagtggtttaattgactcacagttcatcatggttggggcagmctcaggaaacttacaatcatggcagaaggcaccttttcacagggtggcgggagagagaatgagtgccaagagaagggggaagtccctgataaaaccacaagatctcacgggaaytcactcactatcatgagaatggcatgggggaaaccacccccatgattcaattatctctacctggtcccacctttgacacatggggattattacaattcaaggtgagatttgggtggggaaacagagccaaaccatattgctgtccaatccactgagggtgaacccttggacaaagctgagccctcaaccccttagaagatggacttgaaagtttcccaaattagtagccacatgttatgtatctggacattccgttgtttatcatcctgacttaggacaagagggtatgctgaattcaggcttgctatgagggttggaacactgcctgcctgatgaaaactgctgtatcagttcaacagggtgactggaaaagtcttatcctatcatattatttctctctccccagtgaaggaagcagtatgcattctgaaatatccrtagcatttttgatatctttcaagtgtttggtttcatgtaaaatcaaccaaagttaacccataaatgaaaagactctactatcctttttctttccacatgtttatacttcatccatctgttgaagatggtattatataatcattggcttgttctcatctttagtgcatgatscacacaatatcaaagcaaggcagcaaaaatctggagaacttattgaatcatggcaatarctctgatgcacacaagcagagctggagtttacagtggctgagcaacatggtgacccacaagggaacttcagaattgctaccatgctggagttctgaaattcatccactgtatttcagacaccctggttttcytcccttacctcactttgcaatgcaattcttctcatttattcattcagaagcatttgatgaaacattcttcttagcaggcagtgctaagtgttagaaatgcaaagttgaattgagaaaaagctctcatcctgaaagagcttcatagtagagacaaacatgtaaataagtataatcaccatgcgaaatgtgccttattcaaggagtatgatgatgtgtcaaagtagaggaagaagcagattctctccctgatggagctggggcaggactctcagaggacacgatctttgcatcaggtctctcggagggtagttcctgccttccaggacctacttagaagataacgaatggacacaatgctgtgatacaaagcagtaccttgaagctgccattacagatataagaacaaagtgcagagactgttcagactagagatggatcaactaaaaaaatcaaagaaagtgacatttacaactgggcttaaagaatgagagggtttgtgcrtgcagagatgtgagaacagggtgagggggtcatgggaaagcaaagaatggggtgtactcagggagttggagtacagatgcatggcagaggagagtggaagataagccttggagccaggctgaagcaggatcataaagggactggaagtggatagcaagtgcatatgcatttgcaccagtgaaayaatctttgttactgagtacctacctcaaattgtgaataaagatttaagaagatgtgtattgccatcaaaattcaaacatgctataattgctataaaactcacctttaagaaaataaagaaacctcactgatttcatatttttctccagcgactatcctttttctcctcctctttcagtaaaactccttgaaagaactgttaatattctattttctcttgaacctgctctgatcggatttttgcccttctctccaccaaaatgaccataattaagaccactgatgtcttccactggtccagtccagtgttcaacgctcactcattgttcttaaccaatcagagacctttaacacagccaatagcctcaatttctgtacccctcatacttctctggtcagtcctttttggtctcttttgctggtttctagtcttctctccaattgctgaatgttgtgatgctccagaacttcatccatggaccccttctctgacttcactcacttccttagtcacatggctttaaataccatctacagatattctattaacctctacatgtgtcattgctctttacctgagaatttctcagcgttgtgctttcatcaagcaaccttcgtgcatgaggtaacttcttccccatctcacccccacagaaagtaggctggcttcaccttactgtgaaaacagcacagaatttccttccagtaacacaamccacaagtgtgcgagcatccatcaaggcccaagaggcatgataaatggagaaaagagatatgaaacttgtgttgccctctgcactgtgaataaaagtcctctgtttctgacccakcacccatggaacagtaatagactaatttgttaatttrtaagtagggtaaaatccctgcaaagtttctgacattaagtagctatgctttctcttagaagttacttaataccttaactgaaatacgttacatatagaagctttctattcacaaatgttcaacttaatgactttcattagaataaagctctgcacagagcagtgtgtcagtctctgtctgcctcccataggcagacttggtgaaggatttcagagagtcattttgaacttgaggataaaataactaacaagcagtattgtagaacctgtgtgatatggtttggctgtgtccccacccaaatctcatcttgaattgtagctccaataattctcacatgtcatgggagggacctgatgggagacaactgaatcatgggagtgggacttttccatgctgttcttgtgatagtgaataagtctcatgagatctgctggttttataaaggggagtttccctgcacatgatttcttgcatgccrccatgtaagacatgattttactcatcatttgccttctgccattattgtgaggcctccccagccatgtgcaactgtgagtcaattaaacctctttcctttataaattgcccagtattgggttgtatgtctttattagcagtgtgagaacagactaatacagtaaattggtgccaggagtggagtattgctgtaaagatacccaaagatgtataatcaactttgaaactaggtaacaggcagagagtggaacagttygaagggctcagaagacaggaaggtgtgaaaaagtttggaactccctagagacttattgaataactttgttcaaaatgctgatagtgatatggacaatgaagtcctggttgagtagtctcagatagagatgaggaacttgttggaaagtaaaataaaggtgactcttgctatgtttagcaggtggcattttgyccctgccctagagatctgtagatctttgaacttgagagagataatttagggtatcagacggaagaaatttctaagcaacaaagcatttaagaggtgatttggtgctgctaagtattaatatattaatgtatttatgtattaataaagatatggtttggaattggaacttatgtttaaaagggaagcagagcattaaagttcagaaaatgtgcaggctgatgatgcaattcaaaagcaaaacccattttctgaggagaaattcaagctggctgcaraaatttgtatagaagccaaatgttaattgctggracaatggggaaaatatctccagggcatttcagaggtcttcatggcagcgccccccataacaagctggtaggcctaggaggaaaaaatggtttcatgggctgggcccaggaccttgctgctttgtacagtccggagacttggtgccctgcatcccagttgtggctaaaaggggccaatgtacagctcaggctgttgtttcagagggtgcaagsccctagccttggcagcatacacgtggtattgggcttgcagaggcacagaaattaagaactgaggtttgagaacctccacctagatttcagaggatgtatggaaatacctggatgtccaggcagaggtgtgctgcaggagcacagccctcaaggagaatctctgctagtgcagtgcacaagggaaatgtgcagtgggaatccccacacagagtcaccactgggrcaatgcctagtggagctgtgagatgagggccactgtccttcagaccccagaatggtagatccactgacagcttgtaccttggacctggaaaagccacagacactcattgccagtctatgaaagcagccaggatgggggtgataccctgcaaagccacagctgtgtagctgctcaagaccatgggaaccccctcccttgcatcagtgtgacctggatgtgagacatggagtcaaaggagatcattttggcgcttactgccctgctggattttggacttccaaggggcctgtagctcctttgtttggccagtttctcccatttgcaataggtgtatttacccaatgcctgtacccccattgtatcttggaagtaattaacatgcttttgattttacaggctcataggtggaagggacttgctttatctcagatgagactttggactctggatttttgagttwatgctgaaatgtgttaagactttgggggacagttgggaaggcatgattcattttgaaatgtgaggacatgagatttggtaggggccaggagtggaatgttatggtttggctgtgtccccacccaaatctcatcttgaaktatagctccyataattcccacgtcatgggagggacccagtgggaggtagttgaatcttggctgtgggtttttcccatgmtgttctcatgatagtgaataagtctcacaatatctgatggttttataaaggggagttcccctgcacacactctcttgcctcccaccatgtaagacatgacttttccccacctttgccttctgccatgattgtgaggcctcctcagccatggagctgtgagtccattaaacctctttcctttataaattacccagtcttaggtatgtctttattagaagcatgagaacagactaatataccatatataaaatagagaaacatctatcattccttaaggattcttttaagctttaaggcttcaatgttggtgtgaatgtggggaaacttaggagagtgactggggagttatgttgttcaaggattcttctgcctttcttcaagcccagcaatcctctcattgaatgcctctcttctctgagttccctggaggaccttttttaatccctctatttcacataacagtggtcactaaagacacatgatttcagggatgactcaattttttaattcattcttaataagattcacaactagcaggacacacagcaaatggttatcctcctagtacctacaggtgtgaaacctaatctagtcaattcttatacaaggcctgcaggtcaaaacaaaccaatcccacatacaaatcctatttgcaaaaactaatcaatctcttaacaaaaagtggagttagaatgtagctttacgtcatttgcattaattaaatatatcaaagaagatggaatgtatgctatcagaatttacaatatagagaagaaagtcattttaarttatataactacagaaatggatacctttagtgaaagacaaaagttgtctttaaaatgaatgactctttccaaattttattaaaagcagagataatcaagactgttgtgctgatgttatttactttgcmtgtgtttgttattggcaagaatgcattttccatttcttgtagacaagcagaaagccacagagactatttaaattcaaattctgggaaatcaagaactacacaacagtcagccatctacaaattgatgatcaacatgatgtctagacagtttctcatgagggcaacattattaattaagcagcagtttggttaatcacaatagcaaaagtaatttttggagtaaatatttcatgagtatgcccatcaataaggcaaaagtaaaaggaaatgttttaattaattcatttataataatatagagattatggttggcaaattctgtttgaggacttgaagaatgatttaatatttctagtatggcatgtcattgtcttattgttttcrgctaatggtactgtctatctccattgcctggccaaaaattctttcatgtcatctatcaagacaatattaaggtccattagtgaatagttagatctgacaaattttttcttgctatacattgttctgttcttttaaaactgtgcattcctacatttatcagtaagaaaatattcactggatagggagacataacatgcttccatgttaagaaactaaccttactttctgtccatcaaaagacttgttatttggaaaaggaaaaataaataaattgaccagttctctttagcacatagacaatgaatcttttcagaaaatgcagttaaaccaatatttttataataatccatggtcttaaaattataagaaagaaatataagttacatagaacttaagtaaacacatatttctgaaaaaattatccaaagagcttactctcttttgccttcataaaagttcatctataaccatcttcacatacatagcttgcttcatgtctcatcctactcccaaacctctctttgaatttcaactgtatttacttgaaggataaaatgaagactaaaaagcttgcatttatttttcaatgttagtcatctggtcaacatcttcatttttagcctagaagaaagtgtgcattaaaatcacataaaaatttcctgcaacaagtacaattttattttatattatacagatttcttagagggtatttagatttttatccttaaatatatgaatatgtataacaaaataatatatggttcaactactaacagttaatactttccagtcctcttacaacagtggaaagataatttagtagagggtggtatacacttagtttcaggtcaagattcttccatcgggacaggatttttttttttttcaagggaaattggtctcctgttggatttccaggctcaactccatcaaattaactctacatattgatatgtgaaaacaatgtatcagcatgactgagtttgttctcaagagacgttctcatcaatcctcaggcctttcttccagtaaatgccaatggatgaaccagtaaatgctgatggaccaaccaataaatgctgatggactccagcatgacaaattgaatgagccaatattagaaaacaccaaaatacgtatttcctgtcaaagaggctaacaatatgttaacgtatactttaggcatcattctcatattgaaaaacatcaaaaaagacaaaataataattcgctttaagtcaatataaaggtgtgggtagaagtattatattttttccaaaaaagagggaggcaatgtattagaacattagaaaataatattcgttgtggcattaagctatcatgaagactttagctttacactggaaaagtcccatagtactcaatcaaaacattttgatatatctttgcttacctctcacctatatgcatgaaaaaataatgatttgtgggatttaacttacctgagtttgttgtggaggaataatcattggaatacaaaaactatcaagcaactatgggcttacgatccaataagcaacttccaagatagaattcgcaatgcatcatctaaatttctgtctataggcaaaacaacagaactcctcgttcggaaattttccattgcagcctgattcctccattctgttactatccttctccttccttgcagtgacactgaaagaaaatccagagtgtcagtcattttagtcacagtttataggaagagactcttgatctgcctggctgctgcttggkctagctctttaggtttcaaaagaaatctggtttatccatgtttatgacactagaactcatgttgcccaaacttactgaactatttttcaagctaaaggatcatctttgaagtaagttctccaaagtaatgaattcaaagaggtatacaaagtaacaacagaaaatgcatgtatcaaaaggtgtacacaggataatccgtggaagcatgggaagttgcagcttctttttctatttattttttatctaaaaacctaaggaacattagcttgtaacaatatctgacttatagtttaacactggtagcctcactaggcccacatgccagaaggtcatatgtcacttaactacagggatacattctgagaaatgcggccttaggcgatttcatcattgtgtgaacatcatagagtttacttacacagaactaggtggtgtagctgactacacacctaggctacaaacctctatagcactgttactgtactgaatactataggcaattgtaacacaatggtaagtatttatgtatctaaatatatctaaatatagaagaagtacagtaaaaatatggtataacacataaaagttaataagcctgtatattgataagcacttaccataaatggagcttgcaggactggaagttgctctcggtaagttggtgagggagcgatgggtgaatgtgaaggcctaggatgttactccacactgctgtagactataaacactgtacacttaggctrtactacatttaatttttaaatttactttcttcaataataaattcattttagcttactgtaacatttttactttataaaccttttaaagaaccttttgactcttaaaatatcacttagcttgtaacacaaacacatcgaccttctgcagctgtacaaaaatattttttctttacatccttatttataagcccttttctattaattttttttaactttttaaacttctttgttaaaaactaagatccagctgggtgcagtggctcacgcctctaatcccarcactttgggaggctgaggaggacggatcacctgaggtcrggagttcaagatcagcctgaccaacatagagaaaccccatctctactaaaaatacacaattcgccaggcatggtggtgcatgcctgtaatcccagcgactcgggaggctgaggcaggagaatcccctgaacccaggaggcagagrttctggtgagctgagattgcactattgcactccagcctgggcaacaagagcaaaactctgtctcaaaaaaaaaaggaaagaaaaaactgagatccaaacacacacattagcctcagcctaatcatcagtgtcactgggatcagtatcatcaatatcactgtcttctccatccacatcctctttcacgggaaggtgtttcaggggcaataacaggcatggagctgtcatctcctatgatctcctatgataacaatgccttctgaaacaccttctgaaggaactgcctgaggctgttttgcattgaacatttttttttagatagaaggactacactctacagtaagaagtatagtataaatacataaaccagtagcatcattgtttactatcaatatcaagtattatatactatatgtatttgtgtttgctatacttttatatgattggcagcacagtaggtttgtttacaacagcattagcacaaatatgtgagtgttgcatgtgctctgatgtcacaacagctacaatgtcaataggaattttcagccccattataatttcataagaccaccattatttatgtggttcatcactgacggaaatgctgttatgcgatgcgtgactatgctagcagcaacctgtgtggagcaaaactccatactataatgcagttagcagtgacgatcgtgttgggtgtattgagatgaattacaatctctgtgcaggatttagtagatttacagattatattatctgtttttaagaaaactaatgttcacaaaatttcaagtggcaaagacgttatcttggaagaatccatgcattaaagataaaactaattatggacacaaatgaattattttaatagcagagttgacaggtgtcctcctcttagtacaagctccctgtcaagtacaatgcaaaataaaaacaacaatgatctaatcaaagtgaaaagacaatacccccagaatttgaaattgtcaagaaaactgtttgaaatgtgctatttaaaataattacgatctgtttayacacttttggtgggagagtaaattaggtcaaccrtcgtgaaaatcggygtggcaattcctcaaagagcaaaaagcagaactaccatgaaacccagcaatcctgttactgggtatatacccaaaggaatataaatcactctattataaagagacatgcaygcctatgtttattgmtgcactattctcaatagtaaaaacacggaatcaacccaaatacccatcaatgatagactggataaagaaattgtggtacatatactccatggaatactatgcaaccataaaaaataacgaaatcgtatcttttgtgggaaaatggatggagctggaggctattttccttagcaaactaatgcaggaacaggaaaccaaatatcacatgttctcacttataaatgagagctaaatgataagaacttatgaacacaaagaaagaaacaatagacactggggcctacttgagggtagaggatgggaggaagaagaggagcagaaaagataactattgggtactggacttaatacctgcgtgatgaaataatctgtacaacaaacccctggcacatgtttgcctatgtaacaarccttcacatgtacccccaaacctaaaataaaagttaaataaataaataaaataattatgttctgcttttaggatatatatttgtaggtaggataaaacatggactagatgtacaaacaccagattgatgatcgtagttttctccccaatatcaaaagatggcatttgctgacaagaatggattgytatgaactgtgacttgtcaaatattcctctcatcattttttaaaattaggatgtcataatcatacttcatacattaaaacttaagtaattttctttttttaagttttttgagcagttactgtaatctttttttttttttttttttgctattatactttaagtactgggatacatgtgcagaacatgcaggtttcttacataggtatgcatgtgccatggtggcttgctgcacccatcaacctgtcatttaggttttaagccccacatgcattaggtatttgtcctaatgctctccctctccttgcccccccacaggccctggtgtgtgatgttgccctccctgtctccatgtgttcccattgttcaactcccacttatgagtgagaacatgagatgtttggttttctgttcctgtgtaagacttaagcaattttctcagtgtcatttctccatctccactgtggcctaaattgtgcagaacctgctgcgagtctaaatatgagttcacagatgtgataggcagaataacagttccctaaagatttccacgtcctcatctctggaacctgtgaataaatcattgcacatggcaaacgagaatgaataaaggttgcagataaaattgattgataatcatgtgaccttaacatggagggattgtcctaagttgtccaggtgtgtccagcatccttaacagtaggacaggaaggcaggggaggaaggaccagggagatggcagcctgagacagaatcagtagctaaggaacacaggcatcctctagtagctgaaaaaggcaaggaaacagagtttgccagatcttccaggagtacagccctgctgacaccttgattttagcctcgtaaggcccatttcagacacctggccttcagaactgtaagatttgtgttgttttaagtcactaagtttgcagcaatctcttacagcagcaaccgaaaactaatgcaagagagttcttgatttacatgtatgcatgcttgcaggtatacacatatacacacacacccctaagggagaacccacyaagaactagaaagttgtttgctggcaaaagccttctaacatatggtttagtaagaaaatgtcccgacgttatgaarccatcactatcacaggccaacataaagaaacaaaaatttgcaacaaatacagcaaaggctttttcccccataagacctcatataaattaatgaaagcaagatcaagttaataaatgagcaaaaaacctctgaggtaattcacaaaataaaaaacataaatggctaataaaatatgaaaatacatcagatgaaaaagaactattgcaaaaataaataaatgaagagatgccattttgtttattttcttggcatgtatctttaagtggaactctcctatggtatggaaaagcaggcattgtcagtcactgctgtgataggatagatgatacaaactttccaaaaaccaataatgtgtaaaaaatagtcataaaaatattcaatggcacttctgaaataataattttacctctgggaatcagatcatcaaaaattcaggaaaagcattaatatttttcacaatattatttataacttgaaaacaactttcaataatagaacattaatacatagcagtatatttaaataatacaaatttatgtagtcattaataattaagcttatgaagagtattaacttgggtcataagagtataagtgatatatagcaactgcaagagagaaagattggagagaaatctattgtaaagttattagtgatgggattagggaccatttctttcttgtgtatgtaactggtttactgaatgggttggtagaatacagttgaaaggcaattttgtttgttctctcactgtcccttcaagtacacattacggctttgttcartctcaccctttggatcrtatttcaagcagaatttatagctcttttagctcctcagagatattaaatatctagtccaggttactgcaaattctcatccacttaaaaactctcccgctcagcttgggcctgatttcaacttgcagatttgcagagaggaaggaacacaacactgcttcctcctcttctcaccccacttctctcactgttcctctgcgttatcgtggggatgaagtagaaggagaaatgatgggagaaaaggaggaaacaaggtgttagcatgacgggttccattgtaatctggcagggatactctctgagtgtgacagctcccacacgctcatgcttcttcttgtggggtgcttttaggggttcttcagaatcccaccccacccccctttaggatccctacctgtttctcggatgatcagcctccctggtttgccactttgcacccctacttggcttctatagccaaagtaccaccatccttcttctgaggtcacctgccctaccaggaagtcctctgggatggctccaactccagaacagcacaggaagatctctccagaggccttacccccaggctaagggcacacacacacatcctgccctaccaattccacccagtcctgtctccacacactgtaaccaaaagcccctctagacacagcctcttgccttctgactcttccaagtgtgagttgggtgccaagccccatgyttcccaaaatgtaagaaatgttaagctccccaagtgctttcgcagcaccccctcacctggcttgaggtgagaggaggtgcccgctgggtgggaggaaccatcagcaccctggcagatttctctgtaagtccttctcctaagacctcaccctaaacttttccctaacctctcaccctctcagggcttcttggcctttgtccagacagtccagagatggatgacaagctcagggtcctaattcacatgggcagtcaaaagccccagatatcttgttctctgcattggaaactttagcctttgacaccaggactatcagaaaaagtttcttttcccggtattattttataatgggggtaaagggtagaaacaaacgttaacaaagacaagaagataaactatagcagctatcaagtatctatttttcatacctattgaagtgcttatagtaagtatttttagactggactagattcatagacaattttgtcctctaggaactgcagtgtctttggctccatggaataaaaatcrtcctcttagcatcataaatgcagaggttaaattctactcctgcatttattctctgaattactagtatccaaagtacaaatcatctcttctgttttattttatcactactgaatcaccagcaagttaacgtgttttcttgtggtttgattaacaaagcaatttagtatccaaatatgatttacattcccagagcattttaaataattaagtagatgattggtatttaatttataagcaacatgatttgattccttctgtagcttttaaacwttaaaatagttatagttaattagtgctagtacaaaatgctcaatcatcagaaaaaaatcaaaactttaaaatggatttcttaataatctttgctgattataaaatacaggaactgtaagtcccaaatcaaaatctaagtgaaatatctagaaactggtttcttcccccatttctgtgtactttttagaaagctattaaggctgcatagaaatgaaaaggctcttttaaaatcacagctatcattttaaaagagtttttccactgcaaactcttaaaagttgctcataaatatttatctttattagattatattggctctttaagtatggaaacttggcatagattcttaaggtacacattttttcccttttgcagttggtgggttttgtgtatgcctgttatgtgatcagtatttccatggaagaagaagacacatgtaagtactgttttctctctccctgtgggttccttttgaatgagatacagcttccaaaactaatcattacagggctatgaaatgaaatcttttatatttggagtctaaaatgattgaactcagcacactaaagttacagtcaaaagttgacagactgaattgcacacaaataaggtgacactacatatagaaacactcaatttgtgagagcacgtgcagagacttagaaggacaaggactgctgtcatatcatatattagcaacttttcatcagacacctaaccattatgccgagtagacagtcagcggttgttttacctattaccaattttaggcatgttgrtggcagaattttgaagtctgagtaacagtaatgatatcaatacaataatacattacagaaagatctatatgtatataaaccatataaaatgcaatgaaaaaaactaaaatttacaaccttccagatgagatgcaaaaaaaaaaaaatttacgaggtgctaaaaaaaagttaatgggatgcttaaaagctaaatcatgttttaacagaacacccaaaggaaaaacatttattaatattatgacctgaagttatatgatagagctttagcaccataggtcaacaaatgactttcattgagtacctgctgatgtataagacacttcttggcacaactctgttagggactcacatttttttatttactttcaaaatttttttttttttttttttttttttttttttttttgagacggagtctccctctgtcgcccaggctggagtgcagtggcgtgatctcagytcactgcaagctccgcctcccaggttcacaccattctcctgcctcagcctcctgagtggctggaactacaggcacccgccaccatgtccggctaatttttttgtatttttagtagagaaggggtttcaccgtgttagccaggatggtctcgatctcctgacctcgtgatccacccgcctcggcctcccaaagtgctgggattacaggcgtcagccaccatgcccagcctactttcaaaattttaatttactttcaaaattttaatttactttcaaaaaataaattattttagataaagaaatcacacctaaccaaaccagagattgcattgcagtcattgtttgaatttgtaacaaaatgaagcaaagtagctagccattgtaacttccttccagaacacaacctcaaaggggtctgatgaaygcttcccatcaaacagatgagtggtgcatgatatatgagttggaatccagaatctgatggggtcttgtctyaatttatttgaccaaacctcagaccctgagattaaaagtatcaggcagtgaaagcatgcagacaaattgcatcatgtatttaatgcttacacagagtttttttttttttttaatgctagataagtcaaaaaatttctgtcacttgacaagtgcagttctaatgacaacacttttcattttgaggttaacttcaaatctctatttttaggagttttattagtagttctacaacctgatggagttaatatacagaaggttagcagcatgcttccaacccagagctaagacaggctgcacagccaaaaaacagttggttgagcatgaacaatattaactggaatttcaacctgaaagttattggaatttgagctgaataagtcaaaaaattaataaattgataagtcctagctgaatctcttacaaagtagatacctacttttgagtagttatcaaacaacaacaacatccaaaacaaacagtcctctttcttttcctcctmactaaactggtcaaagactctcaaaagacaccagtgctcagttgtacctaacagtgggagaaaaggcagattaatcaatagtcttattatgtagtgcaataaatatacaacagtcttttccttgagacttgtggtttaagcaaagctgggaaatgcaaaatggcatgtaaaataaaagactcatctaaatggatacttctgttaactttctattagccttcttttcagtgtatataaattgtattgttcactgccagatatcgtcgttccattgactttgatgtctttaattarcttaagtttctctatagaaatctctgaatcagctatttcagtgcccttcaaactgggattgaagcagctgctaggagactattctattagtggtttaattctagcatttgttattagggccatacattacattaccaagagacatctggatatagtacttgtattgtcatcaattcaaattgactcagagtcaaaacgaaacttgggtgctcaaagcaaagtatatatgccaaagactaacttaacatgataatctgctggaagagagatgataatggaaagcagtcacaaatatttgatagttctcaaatgagggtaattttatattttttattgaatgaggtaggaaacaaaagtgcagatgtaattaagttgtcccagggtcttcagaaggcagatgtgagcaaaaagtaatgtctgaarccaattgcaatgatctcatacactagtactatttgtgccaacacttagcttttaggtgcaamaatgaactgccccttggatatgacattaccaaccctcagtgaggaagacatgtcctttgaattatttttccaaaacttacacataaaataagtaaacaatactggtatctttccaatttgtctaagtacacttctggaaatcttattctaaaagagatctgcaaatataatataatgtcagttttttggcaggcaatacatcattcataaytttgattctattctaactaatgaaaatttctgcattattcaaaatgcaaagttaagccttgttcttgggctgaaaactgccagccagycttaaaaattaataacagctaccacttctctcctctgcactgttaaagtggatatatgggactaacatttcagacagatatttccgaagggtaataaatacttgaggaaacacttatttctagccacccgtcttcttagttacctctcagcctcttttattaactatttcttataaagattatgattgcaggtcaaagacaatgaaataaaaagctcacaaaaggcagagtgctaggtggggtcagagcttctcgtcattcattctaatgaaaaagcttagttatatctcttccttccatttttcattgcttttaaatatatatacataaatatatatcaatctccatgaacactttcatgagactagaatctctggaatcataatgatagaaatctgtcaacaccttgtttgggaatcatttgctgaaaatgaacttgaggatttgttactacttgttagactttccagaaataatgtttttaattcagagaagtgtggagataaggtgaaaaatagcattttacttgtatcaatactgccaggctttttcagagggtctgttgctagcactacttcttctgatattaggctgcaaattgcaactggcacatttatttgggctcacaaaggctagtctgggttgtatatgttgaatgatgagagacaaaagtayattgaaaaccctaacagtttttgaaaggaaatgaatccctcagatgtgggttcaatattttacattaaaaagctctaaatagttctttatataaacatttgacccttgctattatacttttgaggaactttttattggaaggaagcgtaactatcggaaaaacatttcatcgctctactgtcctgaagcttcctgctggctaatgttcatgtatttacctgtctgcccatgaactccttctaagaaaatgaggtgatatttccatagcattggtgtgagctgaaaactttttaaaatcctatctccacctaagaatttatgaaagaagcgaatgtggtaggaaaaaaaaagactagtttgaatgttaatttatgaatttccttttccaacttataatgtatggaagcctcagagaagtaaggtgaccacaaggccagacaccaggggagggaataagcagaggcctggaagatcttcagagtagaaaaccagtccattgttttgcacccctagcaatgtatgaacatttgaaggwgagagcagaggacagtgctgtgagtcaaasatggaaaaatgtgcaaaattggtaagggtgatcctgaagtcacagtgaacatttcaaaggagccaccacatttgcctaataagccattaagaatctactgattctcacrgtgcatatatttttttttttttggtaactatctasttggttgcatgtaactgtcctaaaggctgattctctctccttcagyctcactagagctcagatttagatcctgaaacattttcctaatttgctgagatggctctgccaaatagctacacaatgactagctaatcctcccactagcaagatctatgaaggtagaatctttgttttgctccccactgtaaccctatagttcaraaaaatgccttgtatgtagaattcaataaagaaatatttgttggctgggtgtggtggctcaaccctataatctcagcactttgcaaggctgaagcaggcaaatcacttgagctcagcaattcaagggcagcctgggcaacacggtgagacctcatctctaccaaaaatacaaaaacatagccgggtgtggtggtgtgtgcctgtggtcccagctactcgggaggctcaggtgggagtatcacttgagcttgggatcggaagtgggagttggtgggatggaggttccaggtttcagtgagctgagatcctgccactgcactccagcctggctgacagagggagacgctgtctcaaaaaaaaaataagaaaaagaaatatttgttgagtttatagtgttaaataaattttctgggcccaacaactcagttttacaaagtcatttttaaaactccaaggttctcaagtttgatactgctttatatttagaatttagtgagatgtccgatgcacttgcaaatgtttatgtgaggcaagtggaggtcctacatttttaatgcaattagatatatttttagtaattttgaaaatcaaggtatagggagataaagtaaacatccactgtaccacgtcagaacaagagcttaattttgtaaactcctggacaagacactgctgagaaaacagggacttacttgaaagggatgcactcacagagtaaggcaggcatttaggagtcgactcatctgcaacrtgtggtgaaggggacagagttactgtcaaagagtggggaccagcagggttgtaacctcggccaccccacacagaggaagttcaggcagcacagaacaggatcccagctacagtgctctggttgagtgacaagattccatcccttaaataggttactgagacagactctctctcaagaatatcataagcattcaaatgcccaaaccagcaaaccaactggagattccctacaggggaaagatagagaagcccctttacyagaaccagatccaaggttaccactaaactcacagtgaagtagagcctaaaagattgcctatctccttaagccaggattcctgattataattcagcctgactaagaatcatctacagcgatatatcctactctcctccctccccaacctccagccacatctgttttcctgaatccaccaagagctttcatacccaggcctttgagagaggcctcctccctctgttgacccactaacttatatacacccttcagatttcagcttagctgtctcttctgaaatttaaccatttttctcccaccctttccgggttagttgaagatacggatgatatattgtgagatgctttcaytgcacactgtgctttttccttggcaacatttaacacaactgtaattttttaaagtcatattattcaccaaggctgaccccatttcctaacataaagggaaccctacactattttcaatgaataaatattaaatgaatgagtcaatgtatgaacaaatggactcagtaagatgattagggtttccaatggcagagatcggggagaaggttcttccttttctcytctctatctccatttatataaatgacagctcttcacatcagctgaaaagcttgggcatattccttgtattccctgactcttccctgattgtccacacccagttaatcatcaaatgaaacatcttcacctcctgtcttagttcttctgggctgctatatcagaataccatagactgggtagcttataataacaggaagttatttcacagagttctgttgtgaaaagtttaagatcaaggtaccagcagacttggtgtctggtgagggcccacttctctcttcataaatgactgtcttcttcctgtgttccyacatgggcaagcaagcaaggcagctctctgaggtctcttttataagggcactaacccatccatgagtgacctaatcacttcccaaagrcttcacctactaacaccatcacgctggggattaggtttcaacatatgaattggtgggggtgggagggtaataaacattcagaccatagcatctcctttcaaataactaaaaactcctacatgttctttaacattcttctcacaaacaccctcttctccatgccgcagtagaccctgagtgtgtctctgaatctgcactcaacttactttttaattaattgcatcccccactcataaaaggtggagatcatatcttacctaccstagaatctcagaacctgcttcagtgtatggaacatcataggaaatcagtgcatatttgttatacaaaatacatagtggagaaaatgcttgtctttacgttatctctcatatctctttcctcactccctaagaaaatttaaacttcccattccctgtaccacaggaaaaaaaatgattaattcataataaggtatttgtgcacttatatcttttatcaattttccagagcaaaagcatggccctatattatgcacttacattatctggaaattttctggagagaaggtgtagcttgttttgccaaaaacttgagaccagcaagcagacaactcctgcaccccagagggggttctaattttctktgtttctacttgaaaccagatgttagaaatgatttcagtgatggtggtcctaactgccaatatctagctctgtgaccattgctgaatcacatcacctctttggggatccgcaagtcactgacagctctgacactgcagttctatagatgatgcttttgggtgggggtgatttcaacgtgtgatcaggcacgtcacatttccttcttcactgatttacaaatggtcaacatcaggagtggtttcaaaacaccctgacctctatgctccagagttacagtaacaaagtctgatgtatcagcctcagcactaaaacaggccctctacacgaatgcctgcccrctcagaaggargaatcacatctccctactccctgctttagacaggtcagagctctccagttctcaccattaccaacagtgccaggctgtgcagcacttctcaagcactttacttgagaaggaagaatgaagaatctgccattcaggtggtgccragtggaaaatgtgggatttgggatgcagatgtgataatgagggagcagagtaccaaatttaaaaatcacaccctcgtgacaccctggatgcacagcaaagaaaaaaatggactgtaaggatttcatgaggatcttgtgcaatagttttatcctggttattagtggtaaaatttargagcccagcagaagagcagttgacagcatcttgccagggcctctgtgtttccattttaaatctaaattcagtattctaatcccaacaaccccccttctcaacggtctcacaaagctggctctgccagcccccctgtgggtttactgaacctccacttctgcacgtctgtccctaagctgcttagtggtgcagagaggagcacatagcctgatgcaacctcacaacgtcacatgtgagccgcccaacccgctccaggggcctcccactcattcttcatcactgctttctccaaggcccctaaaagtgaattatttgagctgtcagtgccgcagatcaccctagcctcattttagagaacttagagtttctatcctcattttggggatgaataattgaggcccaaagaggcaatgtgaccgccggcggctttytcctcctctgccctgcacccttagcattaagactccatcactgagactctgtcacacaaaaaaataaaagcagtgggaatgatttcctcaagttcccaggctctctatctgtcagatctgtctgtatccatctgtgatcatcatcttcctgacagaaaaagcagacttcattttgtcccgtggcttttgtggctgctatgtccatcccacccacctatttaagcaccttgctctcttaattattttttctctctgtcccctcccccaactttactccctctgcccagcttcttcctccactaggtcttttcccttcagcttataaacaaagtcacatcaaccagaaaaagaaaatagaaatcacccttgactccaactggcatgaatttaactttcctgtctgtcatactcctttcctccacatcccaacttctctcatactccttccctccacatcccagcttctctgcaaagtggccgagactgacagcactcccttcctcacccccctcccactcactctcatgcctcctgagttatcactgaagatgctgtctcagaggccagsagggacttcctaattgtcaagttctcttggatcttatcaagattgattgacagctttggctgctgttgacttctccttccttgaacactttctcccctggatttccagaaaatcgcatctcttgaacagcacatattttgccaattaaaaattatttttaatatctagtgttcaatagtagagtgactataatttacagtatctattgcactttgggaaatagctagatgagaatattttgaatgtttctaccgtaaagaaaagacaaatatttaagtgatgtatatcccaagtacactgatttgatctttgcaaattataggcatktattaaattatcacatgtgcccccaaaactatgtacatctattatgcctcaatttttaaaggtactttaaatattcttaygcagattaagcagatttctgatgcagacacaggtaaccaattttgaacaacttgttcaagctgcttttggagtgatgagctgtcattatgtccttaaaatattaactaatcattcctactatagagtttatattaacattcacactgttatactaaagcattttcagtaaggtcagccaataaaacagaaatgtttttaaagtaagaccagacaataaaagagatgtttatcctyttaaataacaaaatggcatataatatttttaagagctatagtcttggaccaattatttaagatttaatggagatctgattttacactaccttaaaaagaagtatcatacaagtaaccagcaataaagggcatatatggaacactcatcttcatgttctctagactatgtactttactaagaaaaaaataataatttagtgttctttctgggaacaatatttgaaactgccacctaaatgagatattagggagtattcatatgacttgaatgcaagtgtgaaaaaaaatagggaacatttggtaaaagcatttatctctccttctaaattgtataagacacaaagtaagttaattataaattatttctaagttataacaaactagtgtttccattttatccacatttttcctcatagaaggaaacagatctttctctttctctctcyctccctctctctctttctcgctgattttaagtacagaaaatctatattaaagttagtggtattttctgaagacatctttctttgtcacagttcaatcaactacaaaactcctactgtttcccaacccttattcatttaataccaccttcagcgatrtcatgacagctatgtacaagcttgtgtcagagactggctggctcttcacyaarcccgtttgtttgttctcctcccaagcacacaattgtaccatctatcccagcctccaggcagttagatgccccatgagattgtattctagacgagggttccagtcctggcccccaaattacttccacgtgtgattcttcatgttcttatcctttcttcctgctggacatagaccagcactgaagctttggaagccgcacgtttcaaatgctggagccacagtatcaaacgggcctgggtcattgagtgttgctcagagaaaggttgaccatataatttgagaagcaggtgataagtgcctttgaggcataaggcactgaggagcacctgagagagtctgtcagagaaaggttccctcscagacagggagaccccgagtagaaacaggcaggagttctcctgtcattcaagggagagttaggagtccagcgtatcaagcattcagcaaacagaagtgcctccagcatgcctgggaagctctctctgagaagaggacatgtaggctaacacctgaggatgaaaaggagctaagaggcaaaggccaggagaccattcctggcagaaggagcagtaagcatgcagggaatcacttactggaaagccttccagccaaaacaaagggcttgacttcagaagcagcttcataccaaatggtcgaagagatgatctgggcttccctgacctgctgactctcaaaaaagtagtgaattaaagggcagattgtcccagagactgcattgtaaatcccgtattgagcaggagggctctgtgaaaaggataaaaagtatactgtgttttcgtatgctgtgagaaaaaaatcacaggttgggcttaagttttattttcttttcctttgctctatatttgcctccttttctatttactcacccacgtgtttatttggaaaagtaaattaaatctgtttcttttttacttaaggaaaacaaacacttagttactagtcctaaagtcaaagccaaggtgtcatactgactgtgttttcctcctaactgagacaagaaagtttcagggaaacaggtgaagaccaaagtttctctatgactttgtacattttcatgagggaggcttttctgcccagaaaattctattaatatctactcagggttttaaaccattatgcaattttttaaagtaacaaattttttaaaaactgtggttttttgtttttttaagctctaaatcaagcttgtccaacccgcagcccatgggccacatgcagcccagggtgactttaaatgtggcccaacacaaatttgtaaactttcttaaaactttatgagattgttttgagatttttcttttagctcatcaactatcattagtgttagcttattttatgtgcggcccaagacaattcttccaatgtgtcccagggaagccaaaaaattagacaccactgctctagatgctacatagaactttaagtattctgcttataaatctagcaagtgttaagagtcactttaggggagagcttcttttcattgtgctaaaatacgtgacataatattaaccattttaatatttttaagtgtacaactcagtggcattaggtacattcagagtgttgtgcgaccatcactactatcatttccagaactttttcatcatcctaaacagtatctctgtacccattcaacaacaacttttcaacttttcatcctcccctccctccagcctctagtaacctccattctaccttttttttttggagacaaagtctcattcttgtcccccaggctggagtgtgatggtgcgatcttagctcactgcaacctccgcctctccggttcaaacaattctcctgcctcagcctcctgagtagctgggattacaggcgcctgacaccatgcccggctaatttttgtatttttagtagagatggggtttcaccatgttggccaggctggtctcgaactcctgaccacaggtgatccacccgcctcggcctcccaaagtgctgggattacaggcgtgagtcacagcgacctgccctctattctactttttatctctgtgcatttgtctattctaattacctcatgcaaatagaattacacaatatttkttcttttgtgtatggtttatttaatgtcccataaggttttcaagtttcatccatattgtagcatgtatcagaatttcatcctttttttttttttgagacggagtctcactctgtcacccaggctagagtgcagtggcgcgatctcggctcactgcatgctctgcctcccgggttcatgccattctcctgcctcagcctcccgagyagctgggactgcaggtgcccgccaccatgcctggctaattttgtttttgtatttttagtagagatggggtttcaccrtgttagccaggatgatctcaatctccttacctcatgatcctcccaccttggcctcccaaagtgctgggattacaggcgtaagccaccacactgaaacttcagttactattcaatctgtttaaattcaatagtctacattcctttaaataatctgttccatttrtaacttaaattcccttaaacatttaacatgaattcattgtaattatcatttttggaagtccttcatatatttgtcccaataaacaaaacattcgctggtttttaagctaatccagcaaatctaataaatctaataaaataagctcattcataaattaaatctcaagtttttataacattacacaaatttaataaaatattgtcatgtctttcaacctaaaatcacaagtataaaatcaatcactcaattaaaattttgaattggtttcagtgggttaatctaacaaatctaatataatccatctgattattttaagaactaaaaagattttatataccaagcagacacagattatcccaatgattataaaattctaacctgtactttctgaaatagtattaacactatatgggattagcttactttgttttctctatagttaatttcatgtgttagaaatacacttctccaataaataagcatctcagacaacttaagatttctatatgttcaggaattttcggcagggaagcggtacccaaattctaagaagattctatagcttaccactaatgaatttaaagagcttttctttaatagttgttggaacaaaagaaaatctcattccataaaataatctagcaggccacagctacgggactcaaaggacattagatttgaatacagaagactttactcctactaagagtctcattttggttggtttaataattgttagccctttaaaacattttaacatcttttcatatggcttgacagacactttgttgatattccatttgcttcttttaatcatattacctgatggaatcctgtattctttccatattttaagtaggctgctaactcctgtacgcattgaaatgtttgattggctgtatttctctcatatcttttcttgttctgaggtcwctaaactgttcatattcaaaagcatttatagtccagaggcaaaatattattgtttaattttagacttttaagtcccttaaatacttaaactgcaaacatgaattcactgtaatgattaatatcattttttagtccttaaaatattgtcctaataaamaaaacaagcataaataaacaaacttaaatagctaatttttcacttattaattrattcactcattcaagaagcaattattgggagacttctgtgagttaggccatgccacaaggatacagagatgaataaaactcgatctgccagaagatcttacattctaataaggaagtgaggtaggcaaataattacagaagagtgaaatgcagatactggtttgtgtaaagtgagtcagatgtgcagaaaacgtaagcagaggctaactgtgtctcaaggcatcaaatgtggctgctcagaacatatagtatggtctcatgtgcaaaatacacatcatcaggaagagaacaaaggaaagacattttagataccagggaaaataagctataatagcacagaaacmccataaaatatttaggaatgtttgtggaaaatctggatcaatcaggaagtcataagttactgggtacattcagttcacgaaatgaatggtgaatcagtccttgagggaccttggattccattttacactagtgattttcaacytatttcatacttggcactcatggagaatgcctcttttttaaatttgtttttttagagacagggtctctctctgtcaccaatgctggagtgctgtggcacaatcatagctcatgcagcctcgaactcctgagctcaagtgattctcccacctcagcttcccaaagcactgggattacaagcacccggctggagaattccaacatttataggcatccagtggtagataaactagccatctccgaggaagaaatgtctgccctagaaggctaactaccccaagcctcactcaatgaacacacacacacacacacacacacacacacacaccagggaatgagagaattgataccttgtcacatctgtacccactcaggtcacaccacttcagatgctctgctggatgatgtggagcagtgaatggatttaatcttgggaatatgatcaaattcagttttctttgaacagcaattcatagaaagggaaaaggatttataaaagagatctcagtgagcaaatggcattttcatggagattgtcctaggaaagagagaaacaaaagtaataataggagctataaaaaaagaaagtatttcaaaacggaaatgtccaaaattgtgaaagcggacagtaaaaaggaattatgaagagacttcaatgccagcaagcatttgttacttgatttaaagagcaaagtaaaacattggctacacttaaataagaatgattaaaaaatatattgcrggaaaaaactggataactaagaaaaaatgtattacataggaaaagaatttgtctaaaactatttaggcaaactctcaggattgttttaagcctcttaccttttggaccatgattttttctctcagccattctattctgcttcattgactccaaagagtttagaaattcattatcctattatttaaatatcatacactattagaaaattttaaaatgggaaaaaattgtcagcactgagtatgagaaacatctaattccaaagatctggactcacagtgggagcaaaagccagaagtacagtcaaataaaaatgttgaatagctccaaaaatagaaaaggtaggtgttttcaagaattttttccaatcttattttctcctgaataaaaggttcctccaaatgagcccaacaatactgacacaaaggcctcagccaccagtgaaactgaacagacagtaattgaaaaattacaaaaactttgagagggacttcagtaaggccaaggcagtcactccatctaattactgagctcttgacaaagattaaggaatgattgagggcatatctactatagagaaagagagcacaatttgtgtgtctttaaaaagaactgagtgactcttaaaataagagaaaatgtactattaaagatactgataaagtcttgtgtggtgacacgcacctgtaatcccagcagtttgggaagccaaggtggaaagatctcttgaggccagaagcttgagaccagtctgggcgacatggtgagaccttmtctytaaaaaaaaggaaagaaagaaaagtagcagggtgtgctggtgcttgctgcttggaaggctgaggtgggaggatctcttgggcctaggagattaaggctgcagtgagctgtgatgatgccactgcagtccagcctggacaacaaagcaggaccctgtctcttaaaaaaaaaatgcagactaaagtaagaaaaataacttattttttccaaatgtgagaaaatcaacacaaaaaagtttttatctgttaggggagggctggaatggtgagagctggtgtgttacagacatctttattaagacagtacaactcttgcaacaaaaagcaatgacagaagctgcagcagtagtaaatgcacccctgtaaggactctacagcctggttccctgactcaagaatcaaaaactaaatactaaagcaagcacagtccaggagatcctcacagaataaccagaataagcgtatcagtgaatctaaaggaataacactgaaaacaattggaaaaagccactttgagcaccttactcaaaggagatattattttcaaagactctytggagtgacttgaaatgacacgacaggagagagatcttatctcatggtttgtgctactggggaaaaaacggggtagaaaatgaaagcaatgccagtcaaaagctaaaggaaaggtgagcaggattgtcctgagcaccaggcattgacctgcccatggactattcagcagccctggagagggggaaggagagcacttccacatgacactcaaattcacaaattctgcctccacggagttttcttttctttcctaagagacctttatgcagacaagcttcctttccagaataaaaacaagtcatagaagataaaaccattattcctcaaaatgtggcacactaatgaattttcccttccaaactagctgttcattttaaatatgaagaaatccaaccaaacacaagtacaagttcgtgaaagttccacagggacacaacwctgttcgggggacagcaaggacagaatgttggaattcttacaratcattatgtaatcctacattagacagagcctttgaaattttggaaataacagttaatgagagtgtatcctcaaaataagataaatgtttaaataagtcagcaacagcttgttgtttactgcatgctttctgtgtgctggcactccatcgccattaccttgtataaggtaatgacaccctgtgaggcagccattgtcctcattttacagatgagtaaactacaatttttttttcccaactcacatagcgtgtaagaactgcaattaatatttaatccagatattttgggtgccaaaatccaaatgcattccaaaatgcagtagtacctttctttccagaattttgttaacaataaagttcttaataaataggctaaaaaagatmgatatacatagagagaaagagagacgttagtcactcactagattaaaactagaatattcatatttaaatattgagtgataatacaaagtactggcacaatrtagggaaaataatggattagcccactaaaatttaagtgratatgaggaggcacatgtaaaagaacacactcaataatcttctctcaaatcaactgtctcagcacagactatttaatatgtgaagcttatcattagaaaaacagaatttcagaatccagttcaaatactgaaaaaatctaaaaacaaaaaaatttaaaaacaaaaactgtgtttcattttaatagctgcaaaattctatatggctatccagtgaaattrtgaaatagaagaatacaccattgttaaagtctgacttgatacaatgtaagagaatatgacatgacagatgttgtgggtatgattttaaaaagcaaaaatgtaaccaccgctatttcccaaagaccggacttaatgcttcttcctcatggtagtggcttgcagaagaacttggccatcttcgtgatttcgcagctacatcaagtgcaagcacagggactgattctgaagtcagggttgatgtggtggtgtgggctgtgaggagtgggagtagacatccgcttcctttcccatctttcctgttggcatccactgagctgtgtaagtgacccactcccactgtggtctcagttgtcaagcatgtcctgctcttagctgtcagcactccgcatgtgaattacagtggagcctgggactccataccaacttcctgagcatcagaactgctgtttcacttgtcttccataatctcacaaatgtctatataaccaaccctaactcagaaccatatacagaaggaaattccaggacacataactccagcttagataaattaacaccatacaaaatcactacaatttttaataataaaaatgaaagcattactgttctgaaattatcccatggaatctaaatgctatagtgatttaatattcatcattatccatctttaatgtccctaaacaaactttagtagttacaattttaaaccattccatcttatttttggacattttctacattccacttcccccataaaattctgtcctaatgtcatatgtttattctgctaaaaatgttttcttaactcgttatatatttctgcagtaaaaaatcttgcagattgtaattccattctcaatgttatcttttcatgaacaaaagtttttaatttgtatagttcagttattaagcttaaagtaagaaattctgtggttagtacttyttcatactttttaggactttgcctaaactatgtcccatgaagatattcttctatattatatcatattatattatatattaagcatcttacattgtgatctattgatttttacatatcatgtgaggtagaaatcaacattctttatttcctccatatgtgtattcagttgaccaaaaacccttcacataaaaaactattcttgaccacattgcaaagaaaatggcagacaggagacagaactaacttgcggctcccactcagatagacagaacagcatgtggagactcacatcatgaacttttgttccaagaactactgcaggaacatatcaggaaaactgaaagaattcgtagagcctttgaaagaagtggcttgccactgcstactccgtgaaacagccgaaaactgtgagtgcccaaagtgtgagagggggaatgtctgtttccaaccacacatcctcactgggaaacttgaaaattcacatcacgggagaagaatttaaccttacctagagctgaaatgaatttagagagctgagtgaaatataaaagtagaagcagcagctggaagagccctgtaaggactcctsgcccccaaggaagaccagggaagctatttattactttatttcacaggggaccttggggagggctgccagcggaattggggaaaaactacgaggagaaagaaactccctactaaactttgtaataatttaaacataatgtgaattttcctggacagaatctgtagtgggggggcaaaagggaagtacagatacaaccacagaagcctcagcaggcagggaggggtgaagtctgaaagccatgcttgctttctcagcagggaggtttgtagcctggggcaagttctcagccttgcttactggttgcgtggaaataaatttggtgctattgggggtgacatagtgagagtgagactggcctttctggctgcatgagaactgactgaagcctatcattgccggctttctcccactaccctggcaacctgtatgacacagcagaggcagccataattcccctgggaacataactcccttggcctgagaaccacaactccataccccacagcagccatggaaaggcctgtccaaagagaggctgagctcagacacgcctaaccctgccaccacctaatggtctttctctacccaccctggtagccaaagacaaaagayataatatcttgggagctctaacggccctgccctcaacctgagaaagctgagtgctcctccaggtgaccgtaggggaagtttgtatcctccctatactactacagctgatgccgtcttgaaagcatcacctcctggctggaggctaaccaactcaaaccataaaagaacaactcataaaagaacatcacygccccaagaaaggagaaaacaacagcyaatttcaccacctgtaacatcctggctaaccagaggtcctgagtctttccatgtgacaactttactgccagcacaaccagcattcaagaaaagcagtgcactaaacaaaaccataaccaaagtctcacacagagtccacttcactcccctgctaccttcactggagcagttgctagtaaccatggctaagtgacctgaagacagttcacaccataggactctttgcagacacaccccagtaccagcccagagcccggtagctctgctggatggctagacccaaagagaaataacaatcactgtagtcaggctcttaggaagccccacccctacgggaagaggggagagcaccacatcaaggcagcaccccatgaaacaaaagaatctgaacagcagaccttgagccccagatcttccctctgacatagtctacccaaatgagaaggaaccagaagaataattctggtaatatgacaaaacaaggttctttaacaccaccaaaagatcacactagctcaccagcaatggaccgaaaccaacaagaaatatctgtatgccagaaaaataattcagaaggtcgattattaggctgttcaaagaggcatcagagagaggtgaagtccaacttaaagaaattttttcaatgttactggatatggatggaaaaatctccagagaaatagaaagcacaaattttaaaacartcacaatttctggaaatgaaggacacacttagagaaatgcaaaatacactgggaaatctcagcaataaaatcaaacaagtagaagaaagaacttcagagctcaaaaacaaggcttttgcattaatccaatctaacaaaaacaaagaaaaaaatcagaaaaaaatgagtaaascctctacgaagtttgggattatgttaaacagccaaaygtaagaataattggtgttcctggggaagaggagaattctaaaagtttggaaaacacatttgagggaataagtgaggaaaacttttctggccttactacagatctagacatccaaatacaaaaaactcaaagaatgcccaggaaattcactgcagaaagataattgcctaggcacatagtcatcacgttatctaaagtcaacacaaaggaaagaatcttaagagctgtgaggcaaaagcatcaggtaacctataaaggaaaacctatcagattaagagcagatttctcagcagaaaccctacaagctagaaggaagtggggtcctatctttagcctccttaaacaaaacgattatcagccaagaattttgtatccaacaaaaccaagcttcataaatgaaaaaaaagatatagtcttttcagacaaaaaaatgctgagagaatttgccactacccagccagcactacaagaactgttcaaaggagctctacatcttgaaacaaaacctcaaaatacatcaaaatagaaacttctgaacacataaatctaacaggacctataaaacaataatacaatgaaaaaaaaagcaaggtattcaggcaacaactagcatgatgaatagaatagtaccttacatctcaatattaatgttgaatgtaaatggcttgaatgctccacttaaaagatacagaatggcagaatggataagaattcaccaaccaagtctcttctgtcttcaagaaattcgcctaacacataaggactcacataaacttaaggtaaagaggtgggaaaagatattccatgtaaatggacaccaaaagagagctggagtagctatttttatatcagacaaaacaaacttcaaagcaacaacagttaaaaaaaaaaaagacaaaaagggacattatattatgataaaaggactagtccaacaggaaaatattacaatcctaaatatatatgcatctaacacttgagctcccaaatttgtaaaataataactactagacctaagaaatkagataggcagcaacacaataatggcaggggacttcaatactccatggacagcactaggcaggtgatatagacagaaagtcaacaaagaaacaatgaacttaaactataccctgggaacaaatgaacttaacagatatttactaaacattctaagtaacaactgcagaatagacattctattcataagcacatggaacattctccaaggtggaccataagatagcccacaaaaccagtctcaacaaatttatgaaaattgaaattatatcaagtactctctcagaccacagaggaataaaactggatatcarttgcaaaaggaaacctcaaaaccctgcaaatatatagaaattaaataatctgctcctgaatrattgctgggtcaacaatgaaatcaagatggaaacttaaaaattgtttgaactgaacaataatagtaacacaacctatcaaagcctctgagatacagcaaaagcaattctaaaggaaaagttaaagcattaaatgcctacatcaaaaagtctcaaagagcacaaatagacaatctcaggtcacacctgaaggagctagagaaagaagaacaaaccgaatccaaaccctgcagaagaaataacaatgatcagagcagaaccaaatatattgaaaaaaaaaaatacaaaagataagtgaaacaaaaagctggttctttgaaagataaataagattgatggaccatttgcaatattaaccaagaaaagagagagaatccaaataagctcaattagaaacaaaatgagagatattacaaagaataacacagacaaagattattcaaggttactatgaacacatttatgtgtacaaactagaaaacctagagaagacggataaattcctggaaatatgcaaccctcctagattaaaccaggaagaaatagaaaccytgagcagaccaataacaagcagcaagattgaaatggtaatttttttaaaaaattaccaatagaaaagtccaggaccagatggattcatagctgaattctatcagacattcaaagaattggtaccaatactattgacactattccacaagacagagaaagaagaaattcttcctcaatcattctatgaagccactatcaccctaagaccaaaaccaggaaaggatacaacaacaataacaacaacaaaaactacagaccaatacccytgatgaacatagatgcaaaaatcctcaataaaatagtagctaaccaaatccaatagcatattaaaaagataatccaccataatcaagtgggtttcataccagggacacagggatggtttaacatatgcaagtcaataaatgtgatacaccacataaacagagttaattaaaaacacaaatcacatgatcgtatcgacagatgcagaaaaagcatttggcaaaatccagcatccttttatgattaaaactctcagcgaaattggcatagaagagacataccttaaggtcataaaagccatctatgacaaacccacagccaacactatacttactggggaaatgttgaaagcattccccatgagaactggaacaagacaaggatgcccactttcaccacttctattcaacacagtactggaagtcttagccagagcaatcagacaagagaaagaaatagagggcatccaaattagtaaagagaaagtcaaactgtcactgtttaccattgatatgatcatatacctagaaaagcctacagactaatccaaaaagaacctagaactgataaataaattcagtaaagtttcaggatacaaaattaatatacacaaatcagtagcagtgctgtacaccaacagcaacaaagctgtgaatcaaataagaactcaatccttttacaatagctgcaatatatatatatatatacacatatatatacacacatatatatacacatatatatacatatatatacacatatatatacatatatatatacacatatatatacatatatatatacacatatatatatacacacaatacttgacaatatacctaaccaaggaggtgaaagacctctacaaggaaaactgcaaaacattgctgaaagaaattatagatggcacagatggaaacaccccatgctcatggatgcatagaatcaatattgtgaaatgaccatacttccaaaagcaatctacaaattcaatgcaattcccatcacaataccatcatcattcttcacagaactaaaaaaaaaaaaaaaatcctaaaattcatgtggaaccaaaaaagagcccacatagccaagtcagactaagcaaaaagaacaaatctggaggcatcacattacctgacttcaaactatgctacaaggctatagtcactgaagcagcatggtactgatataaaaataggcacatagaccaatggaacaaaatagagaacacagaaacaaagccaaatacttacagccaactgatcttcgacaaagcaaacaaaaacattaagtggagaaaagacaccctattcgacaaatggtgctgggataatcggcaactcacatgtagaagaatgaaactggatcctcatctttcgccttatatgtataaaaagaaactcaagatgaatcaaagaattaaatccaagacctgaaaccatagaaattctagaggataatattggaaaaacccttctagacattggcttaggcaaagacttcattaccaagaacctaaaagcaagtgcaacaaaaactatgataaatagataggacttaattaaactaaaaagyttcttcacagcaaaagaaataattagcagagtaagcagacaacccacagagttggagaaaatctttgcgaattatgcatctgacaaacgactaatatccaatatctacaagaaactcaaactaatccgcaggaaaaaaacaaacaaacaatcccatcagaaagtgacctaagacatgaataggcaattctaaaaagaagatacgcaaattgtgaacaaacatatgaaaaaatgctcaacctcactgattatcagggaaatgcaaatcaaaactacaatgtgataccaccttactcttgcaagaatggtcataatttaaaaatcaaaaaagaatagatgttggcatggatgtggtgaaaagggaacacttttatactgctggtggaaatgtaaactagtacaaccactacggaaaaaaatgtgaagattccttaaagaagcaaaaatagatctgccatttgatccagcaatcccactactgggtatctacccagaggaaaagtcattatacgaaaaagacacttgcacgtgcatgtttatagcagcacaactcacaattgcaaaaatatggagccagcccaaatgcccatcagtcaacaagtgcataaagaaaatgtggcatatatttatatgtgtgtgtgtgtatatatataaagaaaattttttaaaatgtatatatttatatatttatatttatatgatatattatattatatatggtataatatatttttatttttatatggtatataaatatatatatatacaccatggactattactcagccattagagggaacaaaataactggataaaattggagattattattctaagtgaagtaactcaggaatggaaaaccaaacattgtatgttttcacttataaatgggagctaagctatgaggactcaaaggcataagaatgacataatggactttggggaatagggggaagggtgggagtgggtgagggataaacgactacacattgggcacagtgtatactgcttgggtgatgggtgcaccaaaatctcagaaatcatcactaaagaacttacccatgtaaccaaacgccacctgttctccaaaaacccattgaaacatatatatataactattatttccctgttgtcctatgatggcacctttttcataaatcaagtagatctattttctaactctattatgtttcatttatctattgtcctttcttatgtaatggcatactctgttaattactgtaatttacttgaaaaaaagtcttgatatctggtagtataagttcttcaacttggttcttcttcaagattgtcttaactaatcttgagtctttgccttttcacatacattttagaaatcagcatttttattaaactgctgaaatttttattgggctttctttgaattcatagattaattgctccacagatcaattggtagtttataatattgagtttcacaatccattaatgctttatattcttccattcatttagacatatttaatttctctcaattacattttactgaattcagtgtagtggcttgcaaatcttttcagatttattctccccaaaaaatgaattttccctgtaaactggaaatttttaagtgtttaatttctgctttggatgggaatataatttcaattattggccatcaacatgattgagtaaacataaattcaatataaatcttgatgrgtaagtcctaatcataaaatgaaatatttgttggaaaagcacctcttaatgaaatgaatgcagcagttttgtttcaatcagttcatgtcttcatggatgaatattagttattgctagaatgataggctacctcaaatacttccaatatttggtgctagtatttatttatagaaaccttgttcacagaraaaatacaagaatgggaagaaatttgctataacaatgtcactcaattttttaaaattccttccttccccaagtattttttaagacctgctttgtactagacactgttccaggtttgggggctatagcagggagcaaaacatataagagcagacaaaaatttttcccttataaagtttaacttgtaatgagggagtctgataacaaatgaattttttaagtaaaatatacaatatagcatagtaaatagtgataagtataaaagagaaaaaagtaaagcagrgaaggagatagaacatgtgcagaaggttgayctgtagataaagaggctgagatatgtgcccaaaaatacataatgacctatcatctaaagttatttttaaactactactactagctgatgaggttcttcttcaattgttttggaagcaaaagattgaaagccagctaccttkttattagtagctattactttattaacatcagsatacaaaattaaaactatcactttgtttggtgacccgsaggcttgttctgccaggatgatgcaccaagttaaggttccagatggctgagataaatgcctgtccttgcaaactggaaagaagatgattayagaagggaatgagagaagcaaggtccagaatggccatactttttcaaaggcacataaattttggaattgagtctcttgaaattgaacactctacatgcctacacaccayttaggaggtcttacattcacttggggcacaccttctccagtttgaagaccactggtctcttattgccgcccttctcactccccacaatgaggaagaatgaggatccgagacagagttggggagacttccagaccctccagactcttggggattgccctmagtgtttgtcaaaacaagttgccctcaaggacaattgaactatatcagttcttcacataagtacctgagactgagggggacaggacagagtgggaagcatccattttgcatagtattgctgagcagaaagaagtaaaaaatgttggtaaactctgatatggacaatgcaggctcttggactgcatactctattcttccagttggaactggcttaacattgagcatttcattggtcccatgtgcttctcttcaatttcacatgccttctgaaaggtggaggagattttaaacttcctgaagcataaagaaaacaaccataaatagtgataaagctggcacttgggcatcatctccctgcttggacatctcttcgggatcacaaagttatttcargaagggggtagcacarccccaaccacccccgggacataagcaacggtttaaggcactgtcaagtccactgtgcccagcagacccatcatggtgccttggtggccactaggtatgccataagcagccccaactgtggcctgtgttttggcacagcaggccgtgcctactgaatgctcagattcttcagacaggagacagcaacagatcagtgacactgcagagtagctcattctctcgtaacagcagcagggtttagttgccagctacctctgaaataactagtctctcctaaaagccttcattatggtggggtgctgcgaactcctctctgcagtctttgaagggcctctctgtgtgaactaagttgatgtcaagcctcttccccagctttatccttatgaatttatatcacggaacaagaaaatcacagtgtaatagcccccatatttgagttcttcaaatgtttctttaagatgttattgctggacttggcaacttgtaaaataaatgctgattagaaaagcctaatacctacatagcaggaacaatgatggaacagaaagcaagctcagaataaatgtgttaagtgcctctcagcttcctgagtcttttcttttctctgacctaaacacaatgttataggggatctgtgctcctaaactcagtgacgaggcagtgtgcaatatagctgkaacaaaacaaaacgcctacgttctggttaattatttgctgaatatagttaaacctgggacataaatgacagcttgagctcactggaaatggcaggttttcactttaagtgtatcaaaggcaaaggcaaaagtctcaatctgaggctcttaacctggagtctataaatgcaatgggctgtgaaccccatgaaataaagtcatttaatggatatagaagtgtgcactttcttacaaaggggttcctcaagttttataagattataaaagaggtctgtgatcctaaagataataagartgatgactaaatattctcaaaatcttataattattaaccccttcccctccttcactgaggcagcaaacacttgctcagtgcctaggacttccgcactcccgtgacatctgctttggggaaacaaacatgaattaaagttctagtgaagaagaagaattaaattgatatatttgagctccttccaagggctggcaaggcactgtcctgtatataatatacatttttcttgtcaatcttcatagtaaacccattggaagttactattagtgttagccattgtagaagaatttaatttctaataatggtcacaacagtatttcctgtctaacttccccatcaagaagtggggagttgctgttcttgcctcttaagcccaggctggatgggcagctgtcctgactaatcaagtttggtggaagtggctctgagtgacttttcaggccagatcatagaaggcgacacagcttctgcctggctatatttggttgctagcccttgaactcatctaccattttgcaaggaagctcaggccacatgtagagccccttgtggagagcaacaaggtctccagccctcagccccagctaagcaaacagccaacagcctgtcttgacttgcctgccatgtgaatgcaccacctcagaagctgctcctgcagcctcccgtgccccagctaacattgcatggagcaaaaataaacctttcctgctaggctctgctcagacgtgccaatacatgagcaaaacaaatggtgattattgttttaagacactgttatgtggttgggtgctatatagcaatagataactagagcaagcagcttgcccatatgagcaactgccgcttagaggttaaataatttgcccacagttacacaactagtaagtgtagagctggaattcaaaacaagatctgcctgatacataaaatcaagtcaagaggatgaaagagagagttttacctatatctgtgacttggtatttccttttttttttttctttttttgagacagagtctctcactctgtcgcccaggctggagtgcagtggggtgatctcggatcactgcaacctcctcctcgagggttcaagcaattttcctgcctcagcctcccgagtagctgagattacaggcacgcgccaccacgcccagttaatttttgtatttttagtatagatggtgtttcaccatgttggccaggatggtctccatctcttgacatcatgatctgcctgcctcggcctcccaaagtgctgggattacaggcgtgagccaccgcacctggccagtatttcttaaaataaaaagaaatttgaagaaaatatagcaaaaaatatttatcttaaagtggaaacacaggcatctattattttatattctacatttttctgtgtattaaaagtgttttacaactttaaagtatcttttcaaagatgaaagcaaagtccttatcaaatttcaaaatatgtttaagatcagacatgaaaaataagttaaactttaaattgtgttaagttgccatatttataaaaccagaggcattactaatgtaatgtctagatgataaaagaagatcttgcttcaatttgcccagttccaacctctctttcttcatctaacggtgttaattcacgtcttcgtgccaatgttctgagcttttagctcagcagaatcttgaaaaatccaaagagatatgcataaacgtacaggaaaatagactccagtccacagaggaggatccaagtatctattctggatttaccataagcagcaagcatttccataagagaagggaaacattagcacttagactgcctctgaggagcacagtaaatttctcagagctgagggtgactctccccatagcccctggagggctacatcttcaacttcatgtgacatgtagtgaattatttctcataggaagctgccaggttgaaagccagccaccttgcacatgttgtctcctgaacagcagcacgagacgaaggagagtcaattgccttgagttcccctttgattctgcataaagtcaatcaggtttgccatggctgagtggggacctgaatcagtagcactgaattatctaatggaaacttcatttgtgtgtcccataaacaaatagaaaagttgctattggttgtgtatttttttacaagtagaatacaagtctgtatttgcacagtcagatgctgctataaatctaaagtagctctgtaattccttcagttctgtgagaatccttgtcaggaattggtggtggctagagcgagtaaccacaaagatattctgttacaagtaatattatttcttccaagaagttgctcggctgtgctcctggaagttggcacaggaagaagatttgaaaggactgcaaaagggtttcctggctgcaggctctctccaggggatctttgatggtaacacctcaggttctgagaatgggtgtagagagcagcccactgtgtggctggcttttctggatagttgatgccaacccttaattgtgttgctttttttttttctaaaatatatttttcacttccaggatctaataatcaaagtacatggaactcaatttcactgtactgcaggctcccagcaagctgtgccctgatgcttccttcagttgctccatctcttctgctcaatagtgttcttgctgttataactacagatttccttggatgtttttattccaaccttccttttctaatacttttgaaaacctgtccataccttttctatttcttttygtgtttcattgaaattcacaccctgatttccactgaagaaagtacttaattcagcatcttctcttctcttatctttctcaaaaaagtgaatttaaaaatgcagttgctttactttcttatmagtgtaatatgactgcctttccccaaacataattaaaaactgaaggtctttcctaatgagttatttttaagtcttttgttaagtgttctatttcttaattttcttcattttttaaagcacttgatgtcattttaaaaaagctttmagaatctgtaaactcgccctctgtgtacactttaatttgcccctttacttgagctctcatcccactctagcaaatggaaggtattgatgcatgcatgacaaactgttttttaatatgaaaacatcctcaccttgaggacttggtggcttctgtggccaaaaagactcattgctctatcccatccatgaagaattcttgatatttcagtttctttattacttacttttcaaagattcctccttaatagttaaattttttgtagtcttgtctagttctagaatcttgataatttaagttttacctatatgtgatatattatttctagagtttacaacatttacatcatgctaggtttctgatatgcagagaaggtrtagccaaaaaacaagtaacagtttaaaaagaaagaagaaaacaaatagcaatttaaaaaaaaagaaaagaaaaaacacatagaaggtgtggctgatttatagtgccatcaactgcaggaaccagatgtcctaatttggttaaaacagtccttgcttacacaagttgccctggcactttatctggtttagactttgtcctacattttttagttttcaaatgaaatattactattaatagttgtattaggcaaatctagaatggccacgtagacaactctttccatttctaccatagtcttatcaaggtatgcgagatgcatgagcaataaacagaatcctttttttttttttttttttttttttagaattctcttttaactgtatggttaaatctgtaagaaaaccaacaataccactctcttttctccaaaacttmaaagacacaatataactagcaccttcctttcaagggcagtatgcaacctggtcactgataaagatatgtacttggataggagtagtggagatggctaacaccttccagtctcaggtgggtgtgtgagaggcactgaaatctacagctcctaccagcacctcttcccaccatatccagctggtagggtcagtggagagcacctggaagtgtaagttaatgcactgacacattaggagaagaagaatttctcagagttaaaataatgatatcagtcttatataccagtttataatactggaattacattagtttatcaaatgctttcaacagaacaccaattaaattatttaaataattttaattttttaatccagttcatagaattagcataagccttttaaatttgtttgtttgtttgctttgttttgcggaaaggatctgagtttgtttcccaagctggagtgcagtggcacaatctgggctcactgcaacctctgcctctgccctgtgggctcaaactatccttccacttcagcttcccaagtaactgggactacaggcacatgccaccacgtccagctaatttttgaatttttttttaatggggacggtgtttccccattgttgcccagctggcctcaaactcctgagcccaagcaattcacccaccttggcctcccaaagtgctggaattacaggcataagccactgcacctggcttagcataagcctttattttatttcattttttatttattttatttttattatttttggaaacagagtctccctctgtcacccagactggagtgcagtggcatgatctcagctcactgcaacctccatctcccaggttctagcaattctcctgcctcagcctccgagtagctgggattagaggtgtgtgccaccatgcccagctaattttttaatttttaatagggacagggtttcaccatgttggccaggctggtctcaaacccctgacttcaaataatcttcccaacttggcatcccaaattgctagcaatataggcatgaaccaccatgcccagcaagcataagccttttagatgttcattctgtccaaggtaaaactctgatattattttaaatcctgtcataatctaattaagtagtaaatattaaagataaatatatttattttgtggaaataatacaatacaatttttgtgaagtacaacatatgggttaaaaaaaacaaaaaatattcttactaagttaaaaaatacatgaagcagaactgtatttggaattcaagtgcacaggaaacttacaactgcatcctaataaagccacactattttaccaatgaaaacagaaattcaaagtgttttcaaaatctatatatttagagtaaataaaatagaatatttttgtgatgaggctaatgttgaaaacaaaaagaaattcatcatgaaagaatgtacattttctctcttcccttcccttcatcaatctgagttctgactatttcgacctttgaagaactgctttgtaaatcaacctaagtttcttacaatgtctgtgagtatttttataaatgaatcttctacattttagttgcgttacattcaagatcaattgaaaaacttaaattgattattcaacaaaccaaagcacctccaaaaaaactttcaaaactcttcataaattgcaataattgaaaggttacagaaaacattgacatatctcctcacaaaagcaaaggaagacaaatgagaactcaaaatgttgcacaagaattgattttttaattttataatttccctttgagatatcttgacttgagaaaagacattttagaatggagccccagtttttaattggaaaactgtattttctgcaccagaaggaatagaagttgatttgagaagtcttacaattttgtagtgtctatatttggtgaaaagaatcataaatagatactatttatgggttttgtcttatgaattttttgccaaaaaaatgctactctgtatggaggcaaaattacagtatctgggaaaatatttgggctaaaatatactacacatatcctccatttagcaaacttgcttggcatttacacacaaacacacacacacacactcctgagagttcagttttcctacatgcctgtatgcctgttaatgttagagtgctataatgcaaccaaagcttggtttaaagtaattagtatctttaatggactatgaaacaggagaaacaaacatcatacgtgtacattagaattgggagaagaaaagattgaggctttgatcaaaaccaaaagaaactggaaagaatattacaaaaatgagaagtctatacagacagccagttactctgccattagggaggaaacaaaatctttgcaaaaggcagatgccgatttttggggagtggcttggggacagaaggcattggagatagattgtgtggcttctcaaatgcctttctaatgatgcaatacatattcttaaggaaaaaaaaggattctagcagcaagaggagacagtatatcttttgatatatagggagaaagggcatgtctgtatgcctaaggacaaacacattatttaaaatctcatgctatttaatattacttcattttttactgaaaccaataacaacttatttttcagaccctatgaatccaggttatttctgtattttttaaatttcctctttttggctcattgacaatatttttagtagtcctttttactaaacattttttcattttatggtgaacggatatttttgttaactttgctcttatgcattctattttaaacattagtattatgtgtattttttacacacttattcatatggcctatgttatattttcagttgatttcataggtggacttgatacacactcctactaccaggatcatgttgagttaaagcctgttaaaccagtaagtaaaggtgtgatgatatggaaaatattaatccttctaactcagccaaaactaaccaaaagtgaaataatttgaacctactactactaatcattggtttaattttccactcatatttaaaacacacctttcacatgtaacccaacatcatcattattattattcattccaaaaaggatttgaagctggtgacatgatttatatttcaaaaacaatagttctgtcttattccccttatcaatagttggtaactacattttttaatgagattatttaatctgcagaagtaaagaatgaatatgtgtcctggggcagcacagcaaagtaaaaaggggagaaagacctgcagtgaatccaggtcctccatgtgacatccaggtgccttcctcagtgtctctgagacttgttctatcaccatactatggtttcacaggggggaaatagattaaattggataatgtgtgtatgatatatgkaaagctgcctattactcttcccagtactcaaacatttgactaacaagttcaggaacaagttttctatgttcttagaggacatgaaaggaagtcagcaacaacaaaaccacctaaaactggtgagatttcagttgagtaaaagaaagaaatcttaagtcacctaattaataaaatactaggaaacatggaaatagatagggtgactccattcctagaaaattccaagtagcacatataaaactgtataaattaataatagctatcatacactaaccactttgcatatattatctcactaaatcttcatgaaaacactgcaatgtgctaattaatattcccactttataaataagaaaactgaggttcatagaggttaggcaactttctcaaagtcccactattagtaagttgtggagctgagatctttcctgggtagcaaaccatcacccaacctgatatgatggacttgctcagatgatctttttttctttcagctcagtgttctgtaatttgatggcgatagaagaaattatgtaaaatagtcgcttgtataataaacacatatgaaaagtttcacctgctgcctctttgccacagtggttcttacccaaatatgcagctccctcacccagcatatgtgaggattgaagatctgagaaggctacactgattcctctacctccccaggttgaattaactttattctggcagaatgatctaaagtaaacatagctcacaggaaacacaaatcagcactgtgcctgtcacatgatagatgtttaaataaattttggtttcttaaagcaaatccaatttggaaagaacattcaccctatataacactccagaaccaagcagtcaccacctcattactcatatcactaagtgctcataaaggatatgttccaaaagttgatgtttgtagatatggggaacttgtcagggattgtgacaataatcaagatgatcagtgcattgggagtgagaaaagaactaagacaatgcctagtggtgacttaaagagtcttcatatatttgttatgtgataagaggatgatgaagggtttctttcatctccactgtgaaaaaaaaaactcagcagagaaattgcaatatgaaaaatgctgcaatttaagagagatccttctattagggaaagttattaaaaactccatttgataaatgttgataatgaaattttcttcttgaatgatttgcaaaaacttgacgcccatgtacctatgtacctcaaaagggtgttctgtggcatggcccagaggcaagtgacttccacttatgttctctaaagtcacttccatctctgtgaatcaaaaacacccaaaacatacttttaagatcacctaaaaggctttgatcaactccactgtctgctccaagggttttctcagcacccctgttcactkctgacctagcagtggatagctgaatatagcataaactacaagctattctctacagaaagcaatagaacaagcttctgctttgacagattatgcatattatcatgtcagatgaatatggaatgcctttcaaccatgaaggaagcaaaaatctaaaaatcaaactaagactgaattgaaatcattgtgcatgaaacaatttaagaggtcagtatctgtactcttcaccagtatgcaaatatttcagcatttatccagtctgcctctgtcaatctacttgatttcttttaataagcccgttatattgaattccattgaatccaatgatgccatatcactacccagcaacagcttggagaaaaagccaaccttctgtgcgaaattgttagagaggggaatgaatgctggctttgactttcattaagcctcttttatcacagtgaagtagaaagccaggttttgtgaggaagccactttaataaggggatcagaagaatccttagcatattcccaggtacatgtatgtgaacaggtagctttgaactccatatgcagagtttccagccaacagctcattcctaggtaatactgcagaattgtacaggaagccttaattctcatgtttgagtgtgtcactgctcataaccacaaagtgcacctttcaagtgtccacagtcaaattgtatgggaatgtgtataggggaagtggggttgggataggggtaaggtggttcacatatggatttggtctctcatgttttgtttctttctttttaaagtaatgatatcaagctaaaaaaaagcccactgattacatcaatcagtttaattcactttactatcactgattgattgcctacactgtgcacaacaggcacagcctaagtgctagagatataaagataaatgatacttgagatttgacccttagcagccaatgatctaggaggggagatctacatagaaagggtagatgcaaaacaatatttatccccaaggaaattttatgcgggagggggaatggttaactctcgcttagcgaggaaaggcttccctgagaaataacaattgagctactttgaaaagatgacacaatttatcaaaagcagaataaatataactatattggaagatactttggcagtttcttacaaaactaagcatacttttaccatgagatctagcaatcgagctccttggtatttacccaaagaagctaaaaagttttgttcacacaaaaacttacacaccgatatttatagcagccttttttttttttaagacggagtcttgctctttcacccagtggggagtgcagtggcactatctcggctcactgcaagctccgcctcctgagttcacgccattctcctgcctcagcctcctgagtagctgggactataggcgcccsccaccacgcctggctaatttttttgtatttttagtagagacggggtttcaccrtgttagccaggttggtctcgatctcctgaccttgtgatccgcccccttcggcctcccaaagtgttgggattacaggcgtgagccaccgcgcccggcctatagcagctttattcataattaccaaaacttgataaagaacaaagatgtcctccgtaggtgaatggatgaactctgggacatccataccatggattatttaatgctaaaaagaaatgagctatggcatcatgaaatgacatggaggagcattaaatgcatgttatgaaatgaaggaagtcaaactgaaaaggctacatgctatataattccaattatatggctttttgggaaaggcaaaactatggagacagtacacagatcaagggttgcgggaggggagacacgaataggcaaagacagaggatttttagaacagtagaactactctgtatgacattggaatgatggacatatttcagcatacatttgtccaaacccatggaatgtacaacaccaagagtgaatcctaatgtaaacgataggcttcgagtgactatatcagtgtagattcatcaattgtaacacatgtaacacactggtagggaatgctgataatggaaaaggctgtgtgagggcaggaacaggggcagggagcatttgggaaatctctgtaccttcctctcaattttgctgtgaacctaaaactgctcttaaaatattaagtctttaaggggaaaaaaaagcagcacaagaaaacgggtatccccagcatggaggctgattggcttggccgttctacagaagacaaagttgaagctcatgactccctaatctcatgtttgccatagttctcgtataaagtgagtgaacggataggaagcagaggcttaagcagagcaggtgtcttgacagctctcggtgaggaccctaagagacctgcagcagccagggctccaccattatgcctaaagctatcgagatgctttcagtggtggttatctgggtctggcctggggacatgtgatacacaggtcaggagtcatccgtgttgggtttcaatatcttaccacaactgccatcgagggaggtataagtctcaccataactgccatggagtctccaccgggatctactccatcaccacccccactcactgacagcaccaccaatgaaaggaaagagtaaagactgctcttatcatcagaacccagaacccagtggtcagcagcagtggctctgaaaaggatacctacacatcagcttacagtaggggcagcagtaacaccaggagaagagggttagcaaaagcagatttacccctcaggaagaaaaatagcatggcataaacatatacagctatcaaagagatatggaatttcagagaacaacatagtgagcaactaaattgaagtttgtcaaaatcatgactggtgtatttccatccaaatggttagcaactgagtaccgggaagattaagctccatgtagcagtaattcttcacataaaaataattagagcaaggcagtttatcaaagaaggacagcagctggaattccagaactgacttctacagcaaaggtagagctagatctgattatgttagaaatttccatgaggatgatgcctatgactgcagttaagaaagacttgatgagaaaagctgacctgagattcccccataactttcagcaaatctttttctaaggcttccaaaggaaaacttgttttctttggtatcttaacttgtctgattgcctttgctggaggctaatttttcttcacaaaaattgctacatgctaggtggccactgctgattgagtggctgctattgcaactaggtactagaagacagccaaggccaatccctatttcagggtagccctgcagcgagctctgcaggtactttcactgcctsctttctgtctctgacaatccgggtacacaggaaacccacctctgatgatcaggctgtaggacagatgcagaggtggtcacgtctctctgcactttcctgagaacagctgttttgcattagtacccctatatgtaagttgatgtcaggccattttgcatttatagcatcaacattaagtaccagctagtaggacaaatcagggtgtgtgtgtgtgtgtgtgtgtgtgtgtgtgtgtgtaggagttgggaaggtggagtaatgtgctttcaaaccttgatttaaaaaccagcaatcaccagccatgtgttagtaaactgcagctggaggcacctaaagaggaatagaataactctgtcttgatactgttttcatttgtccttaattagccttcacatcttatatttatccagatagagcacgcactgagctatgtcaaattctgcatgctgtttctcttctgtggcatgtgactataaggtgactgtgatccgctcctatcagtggctgtctcactgttcccactactaagggtggagccccgttccctgaggcttaccatcagtccctggaaatggaaaggacttcatgaggcgttaactttcctgggctgtctcaagagcactgcagctgtaaagcactcagcaccttcttagttgtcccgaaggagagatgggcttccttgtgtgcctgccttacttagcaccaatgcagtggcactcaggactcgttgctttctctagctttggacctctttccctttgtcactgacattaataactttttgatgcatcataagaatggttgtaccatgtcatggactactgtaagaacacatcctgatatatacttatttgactatgtagcagtgaaatggctgtgtgtatatagcttacgcagttcagacttatcaccgtagtatccagttagtgcacctctgtttttattaggacggaatgatgccaagagtgcaactggcaacatgcaagagggtttgctgtgaccagtggccagtcacgtgtcaaaggaaacacagatcatttcctttgacatgtgacttcactctctgcccctaaaatttgtggagcctgattctcatgcttccttgtgaagcacataaagcctttttccaaaatcagaaagcccatatctgaacagtgtcctccagggagaatatcaattcctgactttctcagaactttgctgggtatttgccattgatttcaatggcaagaaaatagatttatgcagtgatgtggagatatagtccaccaccacccctgaaaaaaaaaatcaacaacataaaaaaagtcattttgccctgtttccaagagaaagtatcctctgattttaaaattaaagccaatgatataaaccaaattttatgttaaatacacatattttgcacttaatattgacatcaaaaaaatttataatccccatattatgataagttctgggaagaaacaatatacaggaaagattacacaatacgcaggaaaaaagcacacacacacacacacacacaagtgattagaaaagcaatagaaaaagaaacatttacagttctatcagaagaaacacttgattccattctgccttgagggcagttacccttaagtaactactaacatatctacaaacgtctgcaaacagagagagagaaaaagagaaagaaagagggagatgatctcaaggatccccaaaatcgaagtattctatgcagacccattgatcaatcatagcatcattaaaagtgggacaaccaggccgggcatggtggctcatgcctgtaatcccagcactctgggagaccgaggcgggcagatcacttgaggtcaggagttcgacaccagcctgggcaacatgatgaagccttgtctccaccaaaaaataaaaaaattagccaggagttgtagtgcgtgactgtagtcccagctacttggaaggctgaggcaggagaaccacttgaacccggaggcagaggtttcagtgagccgagatagtgccactgcactccagcctaggtgacagagtgagactctgtctcaaaaaaaaaaaaaaagtgggtcaacgagacattttgtgtccacagatgtgctacaataagaagtgcacagcaccacctatagaatgccttgccataaagtcaagcctgaccttggactgatactatagaaatacaagaatagttaaatctcaccacaaggaagcaatcagccaaatctagcatgtgagaaatagtataaagcaaataaaaaaagaagaagaagaagaaaggaagggaaactgttattgatttaaagagacacaatagtcaaacacattgtgtatatgtggtttgcttggttttaaaactttttttaaaacagaactagattatatttcaaaacacaacttctgtataaccaaaaaataaaacaccacaataaaatgaatgagaaaaaaacatatttgcaattcttgacaaaatgttaacatctttagtcataaatgaactcttcagaaatcagtactaacagactcacattacaagggaagtgaaaacaaaaggaaaagaggaaaatggaatagcacaaatgagttataaggctatatgatcttcatcttgatatggttaacattactagatgagaaagaaatttcattataaattacattatcgatgcttacaaatattgatatctgatgtttgtacagctttaggaaatgaagaattctcaaatactggggcaagttactctagtcatggggagtttacccaaaaatgtagatttttgcataaatttggcccaggcagttctcaacgataggaatcactccaacaaatagttggatacacacccacacacatgcacatacatgtttactacatagaaaatgtgtaagtaatctattatcccccaagaaactacttatgtatccactggtttatgaaataatagactgggggtagaaatagaaagaaaaaagacacttaagtaaaaatactacatttcacaaaattctgtgtcctttgaattcttatgaaagatttttaattaatcagttttatatttaccttgttattagtgaaaattataaatatatgcacttcatagtgatgctgccagacatataaggcataatttcaacaaaccaattgtaatgagatatttccagatgattggagcaagtgattatgggytgagtattaaatgatattaagaaatttttgtcaattttgataggtatgctaatgaataggtaaaaagaagaaaagaaattcttaccaattgagcaggttctttcaayctctacacttttgactttggacaaggtaattctttgcagtgggtctgtgccactgtgggatatttaacagcattgttggcctgtaccgcctagatgccagtaacaccattccctaccaaactgtgacaaccactactgtctccagatactggcaagtgtcgactggttaagaatcactgagttagagacgcatggagatatgaatgaaaggatataatagttgagatttgattttaaatactctagccaaaaaaggctgtggggggtgctagttgataggtgaaactttaatagcataacttttattttagttgaagctgagtgatgaatgcgtagagattcataatactattctgtctatctttgtgtctgaatttttttttttgagatggagtttcgctcttgttgcccaggctggagtgcaatggcatgacctcagctcactgcaacgtccacctcccaggttcaagggattctcctgcctcagcctccctagtagctgggattacaggtgcctgctaccacgcctggctaatttttggtatttttagtagagacggggtttcaccattttggtcaggctgctctcaaactcctgacctcgggtgatccaccagactcagcctcccaaagtgctgaggttacaggcgtgagccactgtgcccaaccctgtttgattttttaaaattcaatctgttaataaaacctaacacaggtttgccaataggttttcctttgaatgccctctttcagagttgcctcactgtcttctgcaaaaactccccacagacatgtttcccagctcctgaagtaacacttccagaattcctacctgacatcataagaacaggctcagcctgtttcactgcttcaccaatccatgttgctaaagcccagaagcagaaaatattagctagaggcagagctggtgttaaagataaatgtaatggatacctacaagttcccccaaaccctcactgacactactgctaacaaagaaaaacaccttctcctgttgccttatcctcactcttgaagggattcatgtatyggatggataaataaaccttgaaaattccttctaacgtaaagattgcataaagctataaaattccaccattataatcccatccctttctcttttagtttaaatccctgttaacatgccaaggagtagaaagggtagacattgagattcagaatgtagagaatagatgagcagaggaaatgtgatggggcacagggagaggcctggaggattcccactcctggggcgtgcaggagggagttgttctctagatgagttctaggcgcttgggtgggtatttttttagtcgttttcttcatgctgtacagcragaagagtggcaaccaaaaagtaaaacttttgggaaatttttcagccattccaaattataaccaaagagttcactccaaggcacaaagtcatcaaactgaagtagaggaaaagaagttgctrgatgtggttatgaagtgagtgtgaaacgcagtctgttggaatgatgcttataatttagttgaaggaagaaaacttgcatgcctgggtaaagtaattaatcatgaggcctggatgccaccagctgacatggggaagagctgatagcctgagagttgctcttagcaggatgagaaagcaaaatggctgagggagaactggaagtcttcttcacagtagagaagaaatttcagccaacattcaaagttgagtagggtttggattagctaagacttttcataggagagaaactgtgagagcaaaagtgttcaacagatgtttatgaagtatcatctatgtagtaggtactgtgttgaggttgacattgtgcaaagatgcagaaactgatgccctaacattccaaaggcttacagcttaggatagaataagtagagtcattgtcaaaagtatggagacaacagtgattggagatggggatctgtatgagtcagggttctccagagaaacagaaccagtagagaaagagagagagagagagwgtgtgtgtgtgtgtgtgtgtgtgtgtgtgtgtgtgcttccccacacatgcgtgcatctgggggctggcagactggagacccaaggaagagatgcagctcaagtccaaagacagtctggaggcagactttcttctaactcaagagacctcagtcctttctcttaaggccttataccgattgcatgaggcccacccacattacagacggcaatctgctttactcaaagtctactgatttacgtgttaatcacttttcaaaataaaaaatttaaaaaaaaaaacacctttacagcgagaggtaaactgaagttttaccaaacatctggacaccatggcctggccatgctgacacataaaagtagccatcacaggatgggatgtgtgtaaggaacataagtcaatgattgggtgttatgaaagcaagagcaggatgatcttgagcacttaactacccagcatactgtagaaagaacaggctatgtgaatatctcatagtttgcgcacacaacactaccctgttatctttacccttaagaaaagcaatagtgactactccatatcacacaacaattactgtgtggttggcacttctctcccaggaaatcatcctgaactctgatgatgatgcccgattaccatgccctaatctgaaaagcaggaaggcccaagtctttaactttcttattgctacagtcagacagcaccaggtgcacccaggagctattttgcatttcaaaaggcctcaatgaatataaaagatatttagctgtcagctttgaagttcttgaaagcaattcgtattttctgttttaggtcgaaataagtaatgacattgaaccagaaatgcggctgctgaacttgacttagggagcaaaggaccattgactgcgcgcctcggtggatccgacccgcctgacattccttccagaggctagactgtgcttcctggctttcccacgaatcatggagcattttggtcacagcctttgtattattagcattgttctctagatgagttctaggtgcttgggtgggtatttttttagtcgttttcttcttatatgaacacttgtaagttgtaaaaaaaaaaaaaaaagaaaaaacagaatttggttttaaatttttaacaatatttaatgtgaggcatgcaaaatgaaaaagcaaatctgtgaaaaccttctacagtcaattctaagagaaatctcagtgtgtgctgtggagatgttaagtcagcactgctgactgttgaagttattctaggcctgatgaatttgttttagcagacattacctgtggttatcagccaccaaggtagaccctgtgacagctgataaataggtacaaataatggatccagcttttggattgaatatgggtcattttttcaacagcataaaacaaaacatggagtcctcctttgttcctgacttcttaaaacccagaacgatattatggcaatctaaattttcagattcgtgcatatcttgtttttcctgatatatatatatatgtaggcacatggaagagtaaaaggattagtagaacccctttcccctttggagggaatatgggtgtctctgaggtccatattttctactcattattccattcctgacactgctgtcagacctaaacatacagctcatgggcttgtgggacagaaatcacaaacatagacctgcagtcaggaacttttctcttaggatattcaaaagaagcctgaaaatgctgtagcattctctataaatacttctaaaggagacattcacgtgtgagcaacatcagcttttctttctcctaccccttcccaataaccaagaaaatgatatgggaagcaattatctgtggaaaaaaggactgtcttgaaaacgcatcacagttgtatttttttaactggcataaaacttacatatggtaaaatgcacaaatattaatggtacgatttgattagttttgaaaaatgtacatacccatgtaaccaaggcctcaatcaaaatgcagaacatttccgtcactttaaaaaattcccttatgccctctttcaggcaatgcctacattctcacagacaaccactgtgctaattttcatcatcactgataatttggtctgttctcaatataaaatatatacacttttcacaycacttttgcccacacttctcaatcactattttttatatgaaaataagttttgctcactttgtgtaacgaccacagtgaagctccctataggccagaaagttgtgaatatgtggttattaactcagcccatgcatctctaagaagtccrtctattaaccacctaaaactgttacaaatatttgtatgtgtgtgaaagtcttttttcttcttgttcttctttcggagcctataggtktcatgagactctgttaagaatcagagtttaatgtgacaaagtttgccttcattcctccaagctcatcacaaccacagtgagccatttggrgacctaatttactcactagcctccagattttacccctttaatccattggtacccacaaactcccattacttttttttctgcttaataaatycaaattcaaataaagaaaagctggcagggaccttgaagatggtggaatccaagccactattctgcagatgagggggctgaagcctaagggatttggtgaacttgtccagagcctgtatctgtacacaggggcaagagccatagccagtggacagagaacatgggagcaaaagttggggtttgggtcccatccaccaccatgttcttggacagtgtttgccatctctgcactacagttttcctcatcaatgaagtggaactatgatccctacctcccaaaggtgaggtgagaatttaacgaaaaatgtaaaaaaattctcagtacacagtgaagcactccacaattaaaggaggtgattattattaataatgtcaaaacactcctctgtaccctgtctggagctcttgctttccactcaagcgctatgaagagcccacagaaacaacaaactctgttttttaaaaagcagctgggaaaaccttgcccaagtttaaatgatttgaaataaactaaaaaatgctttaatttaaaaataacrttaatattcaagttccaaaactaatgccaataattattgttagtattgttacgattattgaaaaagctgataaaacatcaaaactgtagagagtcagtaaaaaaggataaaatgagtattgacatattttaaactgtcacttaattacccccacacatacacatgcaaataaaaygtggtyaacawttcacaaaatagaaccatactaaattttgtttctattttatcttcacgtgaatttgtacatagttctagtaggcactgcagagtctgaacttagtctaagtgcagataacagctttgaggaaaaaatccttaccttagtgatttgtctatgaatattcaatgtaggcaactatttaatatggtgtatatgttttcatttttaatctttcttcacttaaatatgaagttataactgtttcaatctccaacctcagcaatccataaagattgtcctaacattctggatatttgccactcatcagaaacaagttagattgatctgccacctcctcttctctcttttcttctccctgcctttcatcttcctggtttctctttgagggctatgcttctgtaagacaaagggaaaaaaagaagtgcagagttgtacagtaataytyggcaattacccgttaatctgggtaattccaatgaagtactgtcacagttactgttccatggaaatgagcatttgcagttattgcttttgcctccagtcttatagaatgcactctgcattgtgcgtatccagtagggttttcagcaaagacatggtcactacatgcactgtatgttcttgccaaacctcagcttctccatatgcaattgtgtgtctggtcagagtaarggaaaatgaatgcatcccttagcttgcattcattggtcagaatcttaactatcttaagagatggtgcagctctagattcaayagctctcctcagaagtggccctggcaaaactgaagataggacatccactgctctttagcttctagtgctgactggaatggtgaacatttaaagccagtgtttttcctcttggagccaccttagcactgagtcttgtaaaccttggccagyccttcctcaggccgtgccttctatcttgtgtgaatgatgcatcctttcttaagcgtcttctgctgacctcgtgcagcaccgcaggaagctgggatgctttcgagcttactttttctttatttgagcttctggtcatgtttcaaagccatcaaaatctaagcaagggagttacagggagggttagagaattaccaaaggacacaaaatgtcttgggttgtggaatagcacacatcagagaaatctcaaacatctcttaggaaaatctctaaatgtgtatatccccaagtatcttagccttccacctaccacataaagtgagggtatgtgtccctcaaatgagaaaaatgaaaacacactttcttaccacttcaaatctgggaggtggttggctcatttgttttgaagatactcgacactttgccctagcaaaatattgacttctttgatttttccttcagaaaaataagccctgytattcctatagacctaaataagggaggcagccagtttcaagaggctggctctaacaaaatataccaaggctgtcatctgtctcacttaatgaatgggaaactcctgattgagaagaatttgtcttcattaaaactagctaaaatgtacattgcaaatctgargaaaacaatcatgactctgctaatttgagaagcaaaaaccaaaatttctcttttcaatctttgcaaattaaaaaggaatcttgccaagaataaacaaatcttcatttcrtacctaattttaaaacgaattgtgtccccaaatatggtctattctggctaatcattttttaagcaaatccycacttactttttctgagtcactttagtatgtaactaggataaatttcatagttgatcagaatgcaaatgttctaacttgacatttttgcccaagatacgttctttccaggtatagctgaattaagtaggaaaaatataaataattgctcttttaaaactataacaacttgaatgcctgcggttttatttccatctaatttaaaagttatctgtaacctttgtttgatagaaggtctgttgaagtgtctaagaaccatgttgaaatatttgtgataaataggccacaacttaaggatattatgcccaaaagtgaactgacagaggaaagtactcttcatataactgcacagtgaacaatttagaaagggaacagatgaccagacacagtggctcatgcctgtaatcccaaagctttgggaagttgagrtgaaagaatcacttgaggccaggagttcaagaccagcttgggcaaaatagtgagaccrtatctctacaaaaacaaacaaataaacaaaaaatacctaaaaaaaawtttaaattagccaagcatggtggcatgtacctatgaccccagccacttgagggactgagggaagggaagaagattacttgagcccaggaattagaggctgcagtgagtgcactactgcactccagcctaggcaatacagcaaragcctgtctctaaaaagagagagagataagtagatatgttttaattattagaagaaggtatttatcaataaagaattctcaaaaaaatggaattatcaaaaaattcaaaagttatgggtagcatctctttttcatctgaaaaagcttagtttcttattgaagactaaaaagaaaaatgccacttcttgaaggtggatacagcttcttaaatattggtatttgtagaaaaatttggtggcaggcaaaacttgaatcatctttcttgaacttgcattcaaataaagggtaaaaatcatgttaaatgctaaacatttttaaaaactgaaatatttaaagaatccaaaatatgctttagcttaaacttgagagctaagttaagtaaaaagaagaaaagaatagamggtagaaaggaagggagaggaaaatggagagaagatgaggaagagaaagagaaagaaagggaatggacaaggagacaggaaggaagaatccaaagttgaaagtcacctaattgggatttgaacagtcagtttttaactcagaattttgttcttgtttctttgattgactamaaacattgaatcattttccatgtaaggcatgtttttcctttcctcttcagagttatttagaaacagttcaaagaaaccaataatctatccatttcttctcatagaatttgctttggcagacaacttagtctatattagttaggattaggyttacctacaagtaacagaaaaagaaaaatgacaatggattaaataacatagaggtctatttctctttttatttcgaaattctggagacagtcagcaaagagccggatgtgatttccctagagacaaggaccgagactcctctcttattgcttcatcctctgtggccgccatttttaagaccataacatgactcaaaatggctgctgaagcttcagccattggttttgtattctggccttggaggtggagarggaacaaaaggartgtttctttcctttaaggatatgcctcagaaatacacacactacttctgtttacatctcattagccaaaacttggtccaccyccaactttgcagtgaagaaacctgggtattatagtctttattcttaatgactttatgcttaactaaaaaktaagagctttgctggacatggtggcttatgcctgtaatttcagcaatttggaaggccaaggcgtgcagatcacttgagcttacragttcgagaccagcctgagcaacatggcaaaaccccatacctacaaaaaatacaaaaaccagctgtggcggtgtgtgcctatagtcccagctacttgggaggttgaagtaggagggttgtttgaacctgggagacggaggttgcagttagccaagatcatgccactgcactccaacctgggagatggagccaaaccttgtctcaaaaaaaaagcggggggggcttcatttattagtaagaaggaaaaatatttataaaatcatacttagcagtttcaatcacacagttcaaactaattgacatgatttcttggaacagtgttttcatttgtagtactttataacacattctagaaaaaatgtacatatattcttcagtactgtgagagatttaatcatcaagtatgtgaaatgagaatttctgcctcatcttgtttccttatcttgtctttgtggttagaargaaatgaaaataaatcagtagcactacatccttctaggtttcccataattttgcagacagrtttagcttttcttctctagaattgagtttaaaattctagagccaatctaacattttgcttggtcctcattgtgctgccacartaaattaattcttctatggtcataacacttggctattttattttggtagggscttctcttctgaattgattggtagtgttgttattttcttgttattcagtttaacaagtacataatcaacatcagtgcttgggaagtcaggagtacgagagataaataagaagtatatgatcttttctcttattttctctcagtataagttggacctgtttttcccttcatctctttttcttcaagaacataatatcggctgaagtggaatgagtattcaaattgtccaaaaaaatatacaagtgagggaattaataaaattttttgtaattataaatatgtatatattggggggcaaaatatgactttttatttttatttttaaccaccagattgagtatgttgatacatcaaatgccagtcttttatcttcctagtttttcaaatagaaaagtgatactaacatcaataattaaacttcccaagatttttttgtctctctctgaatcaagttcgtcgtctatttacgtgcttctcagttgacatttgtgaaggcagattatacacatgagacagtggtgaataaatccaccccaaaattcctttgcagatcttgagtatttgccaatattctctatgatttatttacattcttttttcatatatatactttaagttctgggatacatgtgcagaatgtgcaggtttgttacataggtatacatgtgccatggtggtttgctgcacccatcaattcatcatctacattaggtatatctcctaatgttatccctccccttgtcccccactccccaacaggccctggtgtgtgatgttcccctccctgtgcccatrtgttctcattgttcarctcccacttaagagtaagaatatgcagtgtttgttttytgttcctgtgttagtttgctgagaatgatggtttccagcttcatccatgtccctgcaaaggacattaactcattttttatggctgcatagtattccatggtgtatatgtgccacattttctttatccrktctaacattgatgggcatttgggttggttccaagtctttgctattgtgaatagtgctgcaataaacataggagtgcatgtgtcattatagtagaatgatttataatcctttgggtatacacccagtaggggattgctggatcaaatggtatttctagttctagatccttgaggaattgccacactgtcatccacaatggttgaagtaaattacactcccaccaacagtgttaaaagcattcctatttctccacatcctctccagcctctgttgtatcctttttaatgatcgccattctaactggtgtgaggtggtatctcattgtcgttttgatttgcatttctctaatgaccagtgatgatgagatttttttttacgtttgttggctgcataaatgtcttcttttaagaagtgtctattcatatccttaacccactttttgatggagttgttttttttcttgtaaatttgtttaagttccttgtagattctggatattagccctttgtcagatggataggttgcaaaaattttctcccattctgtaggttgcctgttcactctgataatagtttcttttgctgcacagaagctccttagtttaattagatcccatttgtcaattttggcttttgttgacattgcttttggtgtttcagtcatgaagtctttgcccatgcctgtgtcctgaatggtattgcttaggttttcttctagggttttaatggctttgggttttacatttaagtttttaagccatcttgagttaatttttgtacaagatgtaaggaaggggtccagtttcagttttctgcgtatggctagctaattttcccagcaccatttattaaataggaaatcctttccccattgcttgtttttatcaggtttgtcaaagatcagatggttgtagatgtgtggtgttatttctgaggcctctgttctgttgcattggtctatatatctgttttagtaaaagtaccatgttgttttggttactgtagccttgtagtatagtttgaagttaggtagcatgatgcctccagctttgttctttttgcttaggattgttttggctatatgggctctttttggttccctatgaaatttaaagtagttttttctaattctgtgaagaaaatcaatgttagtttgatgggaatagcattgaatctataaattactttgggcagtatggccatttttacaatattgattcttcctatccatgagcatggaatgtttttccatttgtttgtgtcctctcttatttccttgagcagtggtttgtagttcttgaagaggtcattcacatcccttgtaagttgcattcctaggtattttattctctttgtagcaattgtgaatgggagtttgttcatgatttggctctctgtttgtctattattggtgtataggaatgcttgtgatttttgcacattgattttgtatcctgcaactttgctgaaattgcttatctctttaaggagttttggggttgagacaatggggttttctaaatgtacaaccatatcatctgcaaacagagataatttgactttctctcttcctattcgaatacgctttatttcattctcttgcctgtttgccctggccagaacttctaatactgtgttgaataggagtggtgagacaagccacccttgtcttgcgccagttttcaaagggagtgcttccagtttttgcccattcagtgtgatattggctgtgggtttgtcataacagctcttattattttgagatatgttccatcaatacctagtttattgagtgtttttagcatgaaggagggttgaattttgtcgaaggccttttccgcatctattgagataatcaygtggtttttgtcattggttctgtttatgtgatggattacattcattcatttgcatatgttgaaacagccttgcatcccagggatgaagctgacttgatcatggtgggtaagctttttaatgtactgctgcatttcttttgccagtgtttcattggggattttcacatagatgttcatcagggatattggcctgaaattttcattttttgttgtgtctctgcctgggattggtatcagaatgatgctggcctcaaaatatgagttagggaggagtctgtcttttctactgtttggaatagtttcagaaggaatggtaccagctcctctttgtaactctggtagagttcagctatgagtccatctggtcctgggcttttttttttagttggtcagctattaattactgcctcaatttcagaacttgttattggtctattcagggattcaacttcttcctgggttagtcatggtagggtgaatgtgtccaggaatttatccatttcttctaaattttttagtttatttggatagagttgtttgtaatattctctgacggtagtttgcatttctgtgggattagtggtgatctccactttatcactttttattgtgtctatttgattcttccctcttttcttctttattagcctggctagccatctaastattttgttaatcttttcaaaaaaccatctcctgtattcattgattttttgaagggtttttcgtatctctttcagttctgttctgatcttagttatttcttgtcttctgctagcttttgaaatagtctgctcttgtttctttaattcttttaattgtgatgttagcgtgttgattgtagatgtttagattttagatgtttagatgtttcccactttctcctgtgagcacttaggtctataaatttccttctaagcactccctctaagctctatcccagagattctggtacattgtgtctttgttcttgttggtttcaaagaacttatttatttctgctgtgatctcattattttcccaggagtcattcagaagcaggttgttcagtttccatgtagttgtgtggttttgagtgagtttcttaatcctgagttctaacttgattgcactgtggtctgagagactgtttgttatggttttcattcttttgcatttgctgatgagtgttttacttccagttatgtggtcgattttaggaaaatgtgctatgtgatgctgaggagaatgtatattctgttgatttggggtggagagttctgtagatatctattaggtctgcttggtcaagaggtgagttcaagtcctgaatatccttgttaattttctatctcggtgatctgtctaatacacacaatggagtgttaaagtctcccactattattgtgtggtagtctaagtctctttgtaggtctctaagaacttgctttatgaatctgggtgctccactattaggtgcatacatatttaggatagttagctcttcctgttgcattgatccttttactattatgtaatggccttctgtgtctgttttgatttttgttggcttaaagtctgttttaccagaggctaagattgcaacccctgcttttttttgctttccatttgcctggtaaatatctctccatccttttattttgagcctatgtgtgtctttgcacatgagatgggtctcgaatacaacacaccaatgggttttgactctttatccaatttgccagtctgtgccttttaattggggcatttagcccatttacatttaaggttaatattgttatgtgtgaatttgattctgtcattatgatgatagctggttattttgcccattagttgatgcagcttcttcatagtgtcgatggtctttacattttggaatgtttttgcagtggctggtactggttgttcctttccatatttagtacttctttcagaagctcttgtaaaggcaggcttggtgtgacaaaattcctcagcatttgcttgtctgtaaaggattttatttctccttcacttgtgaagctcagtttggctggatatgaaattctgggttgaaaattcttttctttaagaatgttgaatattagcccccaatctcttstggcttttagggtttctgcagagagatctgctgttagtatgatgggcttccctttgtaggtaacccaacytttctctctggctgcccttaacattttttctttcagttcaaccttggtgaatctgacgattatgtgtcttggggttgctcttctcaaagagtatctttgtggtgttctctgtatttcctgaatttgtattctgtatttcctaagcctgccttgcgaggttggggaagttctcctggattatatcctaaattgtgctttccaacttgattccattctccccatcacttttaggtacaccaatcaaacgttggcttggtcttttcacatagtcccatatttctgagaggttctgttcattccttttccatttttttcttctaatcttgtcttcatgctttatttccttaagttgatcttcagtctctgatatcctttcttctgcttgatcgattcagctattgatacttgtgtatgcttcatgaagttctcgtgctgtgtttttcagctccatcaggtcatttgtgttcttctctaaactggttattctctaaactggttattctagttagcaattcctctaaccttttatcaaggttcttagcttcctcgtattgggttactatatgttccattcgctctgaggagttcgttattacccatcttctgaagcytacttctgtcaatttgtcaaacacattctccattcagtattgttcccttgctggtaaggagttgtgatcctttggaggagaagaggcgttctggttttgggaattttcagccttattgsactggtttttcctcatctttgtggctttatctacctttggtctttggcattggtgacctttggaaggagtgtttacatggtcatgctctttgttgatgttgatgctattgctttctgtttgttaattttctttctaacagtcaggcccttcttctgctggtctgctggagttttctgggggtccactccataccctgtttgcatgggtatcaccagcagaggctgcagaacagcaaagattgctgcctcctcctacttctggaagctgtgtcccagaggggcacctgccagatgctagccagagctctcctgtatgaagtgtctgtcgacccctgytgggagatgtctccccatcaggaggcatgggggtcagggacccacttgtggaagcagtctgtcccttagcggagctccagtgctgtgctaggagatctgctgctctcttcagagctggcaggtgggaatgtttaagtctgctgaagctgcgcycacagctgccccttcccccaggtgctctgtccccrggagatgggagttttatctataagcccctgactagggctactggctttctttcagagatgccctgcccagagaggaggaatctagagaggcagtctggcttcagtggctttgcagcgctgcagtgggctccactcagactgaacttcctggcagctttgtttacactgtgaggggaaaactgcctactcaagcctcagtaatggcagatacctctcccccaaccaagcttgagcatcccaggtctacttcagactgctgtgctggaagtaagaatttcaatccagtggatcttagctttctgggctccatgggggtgggatctactgatcaagaccacttggctccctggtttcagccccctttccaggggagtgaatggttctgtctctctggcattccagacaactctggggtacgaaaaaaactcctacagctagctcagtgtctgcccaaatggccactcagttttgtgcttgaaatccagggcccttgtggtgtaggcacccaagggatctccttgtctgtggattgcgaagaccatgggaaaagcgtagtatctggaccggagtgcacccccactcacggcatggtccctcatggcttcccttggctaggggagggagttccccaaccccttgcacttcccaggtgaggcaatgccccaccctgcttctgcttgccctccgtgggctgcacccactgtctaaccagtcccagtgagatgaaccgagtacctcagttggaaatgcagaaatcacccactttctgtgttggtcttgctgggagctgcagacagctgttcctattcggccatcttgcctgggaatctgtaattatattttattgcatattcttcctaggctgggtgtgtgtgtgtgaaagagagagagaaacagaaacagagacaaggagacagagacagtgaaacagaaacagagtcatcttccaggttctacttattaagcaatatcccatgaagtcgctgaaaagtgttatattctcctaatacctagtgtttgcaaatctggcagctgtcactgatgatttaaacaagattgggtgacttatttatgtacacacacatccacaatcaaacttcaacagtcgagtgtacccttttctaaataatcacgttgctaaaatgtgccacatggcccatttctttaaacaataaatggtaaattattattttggggagtgaaagctaaaagaaataatatgtctaatacgatgtggcattttctctatacagtacagttttagcattgaaaaggacctcagcaattccatttgccccgttttcagatgaggagattgaggctggtagttacagtggttttgcttcatgtcccatcccactggggctgctatgcaagctctcagtctagtcttctttcctctgcacttggtggccatcagctgtaacaagtcctgactagacaagggctttgttgttgactacaattcaatgccttttttgcctgcgtttgtttggaccctgctaatcaaggctacagggcagctgcagaaagacacctgctattggcttacctgctcctcgccttccctctgcttgggtctgagcatcagaaagccaccttccagtgggtctttgcctagcttttgtcttgtctttgctttttattcatctttgcttttgtcttctcagggcaaataggaaatcctagacctcagatcactgttctttgcttcccaaaagacagaacagctcagtcctggctgccaccttctttctttactcttggtttaaatgtaatcccacatgccctagacaagcctcctgatgatttttcatcaaacatgaaaatagcttacttttaactgctgggtgtcagtctcttctaaaaattttgttcctaaggaattgattttgcaaatcagtgctaaagtcactttttaactgcctcacatactatcatttctttgacaattctttttaaaggggattgctcttttctccttctggtttctcaaatctacttttaacttcaaatagcaggcatgcaatgtagttttataagataatatactaggaccatctatcagatatgaaaccaagcataatcattgcaattatttctactgtattcagataatgataatacaaataagagtacgacatacgtaaatgttgattagctttctggttccttcatcaaaacttgcgttgtgttgtgcagccttttctttgcattgtccaggggttttgttattacaaaccataatatttaacccatttcttctactaatatcttttaatatttatgctattatatagctttttatttttgacatgtatctaaaccagaaaaaaatattccttgtacatgatatttttaggcaaaacataatgtctggagcaccaagtgaaataactgtggagaatggaatgttggacaatttgtgtggcatgcttagcttaatttgtttctatggcacaagcaaagctcattaattccatttattattttaagccacttgtttggtgttatggattttaagaatcagttggtgttagaatttttaataacacagagaaagccattgaatatggaactcaaattatctaaggtttacccagaagtcaaaatcacctggccctctgtaaatttctctttgtgttcctaggcccacaaagtctttggtctgaagactcagagcttaaattgcattggtcctgttaatctttgtcaaaaaggaagtttgggcggcagtttcagggtagtgttgagaagataactcctggtcccattttattctttcctcatttgttcagtgctcatggccatctacaaccttccttgattctattctgcctaagcctcttatttccacatctataagtatagtgctacataataattacaacctttaagaaaatggagagttttcattaaagggcccctgcaaatctatgatgctagatgacagattctaccagaaggccagagtattaatagcacccgtgataactgtaataagaatatgtctcrttttcttttaaagacatagatattccattttaatcctgtataactcaaagaaaatttgggtgttaacactttgaaatacctttacctcctttgggggaaatccaaactgaaaggaattaatatccacatcagttcctaaagcaaaatgcctgacacagactaacaaagctctttctcatcctgtggtaggaacttaggagtgataactcacattgagaacttgtgatctgaaagcactaaggaatttctgccattgcaggtaggaaaaaaaaagacaaaaatggtattctcaggtgagcttacctttcaaatttttctgagacttcctaaatgtgacaagaactctgctgtgtggcaaccttatgtatccacaacagaactaaggaccgaaaaaaaaaaaaaaaagatctctatcccaatagattttataaaatccatactctaaaactcctgagttttacatgtaccctaaaacttaaagtatagtaaaaaaaagaaaagaaagaaaaactctttaaccctttgtttaaatcckattaactcttaacgatacacagttcgaattatctaaatgaaataattttcaagcacataacagattagaaacagagaatgagaaaggtatagtagatattatgtaaataagcagaaataatggcaataattaaacacactatctctacctaaaagaacagagatagaaaactcatataaaaatctaaactacagttttatggggatagttaaggtaagagcctgcaggcagcactgtattgctttacaaaacagcatttcatttgtattatgatgatttcagactatcaatttaaaaattcattagtataaattaagaacaggtaccattttctccagatacttccccttcatctgtcctgaaattattaattattgacttctacttaaataagatcttattttcatctgctggaaaactttttctgataaccatacatatcttcaatgtctacaatttgaatggagagccctttcaatgtggcgtttctgtttcttccataacctcacaacgatatgtggtggccccgcagtcattatggtcttgttaaataattagatttgtgtaaactatattttagagtcttccaaaacgcctctccttccaaaatggctaaaagggcaaagcgtcagtaattctgtagacatgcttcatgcatgttctgaataggagctatggtataatgagatgctatctctggaaaaaaatgaatagattttcaagattgtgagtcctgacatgagttctctagaattttcccctttgataaattttcctttacctagctgttgccaaattgtctcttctagaagaatgcccagattttttttcagttccaaagttatcaaaatcccaggaatatttcacagaaaagagaagcatttatagcaagcatgggtgtggcatgctttctctgtgggaagttgtcatcctccacaagatcttgcccacactcaaaacaaacttgcttcccatcacattcttggtttgtcagcactctgtaaaaggaaatctcatctcctgtctgttgatagtagagcttatatcaaactgggacatgtttcttcttcattcatgaataagtctaattttctctccggtgtgtaaaactgacaatacccacaagatactactgacttggaagtttcactgcaggtagctaccataccagcatttggtaaactagctccctaggtgagacagcattagatgacctccttcgtgccacactacttgccagtatccactgggagacaaattatgattgttgcgtccttctttgaaaacacccctgctgagtacctactgtatgtgagtcactgtgcaggcactagaaatataaagcaaaaaaaacagattctacccaccgggagctcctagtccagtggtgaagaggtgtattaaccctcaaggccctaagaaaatccccaatagkgctctgcacaagccgggctctgataggaggtgccagtgcttttcttcttccagtttcagagccccagcgatcccaggatgaaggagagcccatttgcaaccctcttctgtctccctaagcattcaacaaacacttagtgaccatctgtcttgtgcaaaaagcttggggagtgataaaaacaaatcaaattcacattttaatttagggagtttaggagatacatcctagtgtggatttcacatggtcaatgatttgctttccttgaatttgccctctgcaaccaacacctgttcgtgctatgagactgaagtcctcctagaccgccccattcatctgagtagttagggctctggatgaaggagcaaatggacaaaataagccccctcttgctcaggacctgactaacatttcagaactgcggtcacccattttatacaaaccaaagcacttctgacagacctctgaatttgcattaaaaagagcacgtctacagctcctaacaatcaaaaacaactatgaacactgcttgcttcagtgatacaaacagacattttcttgttacatgtgtggtgatctgagaatggtgactttggacccagtttgactggttagcgtttaaataaaacttaacagactaggcaactaaaggaactcagtaaaagatcaaaagcaatgctcaaagggagtgcctgggtaaccatgatgtaattgcagattgacacatctttgggtttttcattattgtttctaaaaactagatattattgctttattattatgttgatgatgattattgaaagcacgatagcaatgtttaagtggtgagaatgactctaagcctctttttgttgctgtgactgacagaactaaagggagtttgctctcacattcacaataccaactctgccatcttatggaaaatattggaagtacctagggcatttcattatatttcaaaggcacaggttgctggtaagagggacagaaagacaagaacatagtaccttctatttctactacatgtttttaatctttaacatttttaccagcagaaatcattttttttttaaatctctcaatcttcaaataattcttagattgcttgccagcaaagatgtctcttgatcttgacactggaattcaatgtaaaaatcttgaatgatattttgtactgatatgaatttctactgtcccataacactgtgtagtgacttcactgtatattaacttcttttctacagatgtttgacttatgagatgaattaattgaaaaagtcaaagcctatcaggagctatcttatatgatgttggtagcctgtgaaaaaataaatgtcttttttcttatacaaactgataacaagacttgctttcacaattactatttacatttttgtgcatataatgcctgtatattatactcatatttgaaagtgatcagaaagtgttatttaacagaaactacatacattttttatgtctctctggaccctttgattctaagtaaatttacagtaagttagcagtaatagactattcttttcaactatgaataaaaatgtacactgaagtacaagatgactactgtttttaatacattttctcactatattatatatttattgtagtaaacttagaaaccatatgcatcttgaatgttcctgaattcttcagattttggaggattacccccctatttcatgcacaaataaaagtcttaagctacatgactataggaaacctggtccctcccctagaaatttctgagcaaccctggagagcgtttaaatgttctgcaagtgtacccaggtgatgccactgcccactgcagacagctgctctgggcttccccaccaatgcccctgactccaattacatctcacccctgccactcactccaccctgcctcttcccaaaacaggaactcggcctctcttttgattccacaagcaaagttgaaacaaacctttgtaactaacaagtgttactaaggttttgtggtaaatatactccagaaaagaaaaccttaaagtaggtctcaggtaccaatgagtccagagacattctgaatccaccttcacaggctggtctccatcagactcttcttgctcccctgcctctatcttgttgctcccaaggagatctgcccacttttgacttcttcattgcctctgagacaggtcatcaaaacatcctccaccacaacccagccagggagtaaaatccccttaacatgagagtactgtagtctccacaaarattatttaaaagaacactttattctttacattatttgacagaacatttaacatctgacctgagtcatttgcactgggattccatccccagatcagactttcccaaaaacagtgagtgaatttgtcttgaacaaattgctagcacctcacagtgcattcatcacagaaaaaaaaaaaaagggaggagcctgttaacttttatgggaactttctgtattgcttttgcaactttttgtagttctacaactttatttaaaaggaagcagggaggcttgttttagtgacatactccagattctactcttagagatgaaagcacaacaacataaaaattcatacttttttttccatttccatttatcaaagtagaaatatagtctagtctcagagtgtctatctacttacaagccaaattttaagaagaaaagtttacattgctgatatgactgccttttcccttggatgaggatttgaattcctatgcctcgttggacaaatggaaatcatattgtatggcagacacatttcatagcaacaacttaagcataccctaagaatgaccctatggtttaagaagaatgtgtatttggagatctgtgctaaagaatccaggagtggcyaacccggagattcatctcttatctataaggaacatctgagcccctagtccatcctgtggaacgcagcccattcaggagattgaggccctttgttttgggttaaacgaatgttgccaagtggatgttgctagcagaacagtgataagtgaaaatgtcatataaactgcatgctttttacaagtggttgcagtcctcctctccagcccactatcactggactgccccatatgtaagttccctcaataaactctgtgtctcattcactggcttcaggtctcttattcagcctctcaaacatggtgccctccctaccaaagtgaatgacatcaagcacgacacatattagatgttcctataatctaatcatagctatgatttaaactacagactagtatatattatttttcttctctttcatcttttgcctgtgtcamaataacttaatcatgtctttgctcctcctctgcaatctcactgccattgcatttattatggtactctttattaaatagtctcttcatggagcttagaccctcccccatcccccaaaactctgcttttcagtattatatttctaaagtaagaaatctgagccgtgttttatcaccctgcttaaaatcttgaaataggataaagactcagatccaaatttctcatcttggtatataaactcatccattatctgacccaacataggttatcagccttgtctcttacacacaacgtgtttytttcttgctcttatctaaacattgcccctgctctttcatgcttatatgatttgggagctcttcatgtataatggttatatcatcttgaatgctagatatatttccacattgtttaagacctaagttcaattatgtcctactaaaagtgcactcaatatataattattggctgcgtgtggtagctcatgcctataatcccagcactttgggaggccgaggtggctgaatcgcttgagttcaggagtttaagattaacctggccaacatgacaaraccacgtatctactaaaaatacaaaaaaaaacatcaactgggtgtggtggctggcgtgtgcctgtaattctacttgagaggctgaggcatgagaatcacttgattcttggagaatcacagctgcttgggaggctgaggcatgagaacccttgaattcaggaggtggagtatattaggctgttttcacactgctaataaagacctacctgagactgggtaatttataaaaaataagaggtttaatggactcacagttccacatgactgaggaggcctcacaatcatgacagaaggcaaaggaggagcaaaggcacrtcttacatagcagcagggaagagatcatgtccaggggaactctcccttacaaaaccatcagatatcawgagactaatttactatcatgagcacagcatgtgacagacctcccccccatgattcaataacctcccactgggtccctcctataacacatgggaattatgacagctacaattcaagatgagatttgggtggggaacacagccaaaccatatcattctgccgcwgcccctcccaaatctcatgtcctcacatttcaaaacacagtcatgccttcccaacagtcccccaaagtcttaactcattacagcattaacacaaaatcccaactccagagtctcatctgagacaaggcaaatcccctctgcctatgagactgtaaaaatcaaaagcaagttagttactttctagatacaaggggagtacaggcattgggtaaatactcctgttctaaattggagaaattggcaaaaaccaaagggctataggccctatgcaagtctggaatccaatggggcagtcattaaaccttaaatttccaaaatgatctcctttgactccatgtctcacgtccaggtcacagtgatgcaagaggtgggctcccacagccttgggcagctccacttctgtggctttgcagggtacaacctccttcccagctgctttcatgggctggtkatgagtgtctatggcttttccagatgcacagtgcaatctgtcagtgggtctaccattctggggtctgaaggatggtgaccctcttcttgmagctccactaggcagtgcctcagtgggcaccytgtgtgagggctccaaccccacatttgccttctccactgccctagcagagggtctccatgagggctccgcacctgcagcacacttctgcctggatatccaggtgtttccatacatcctctgaaatctagatggagattcccaaacctcagttcttgacttctatgcacccacaagctcaacaccacatggaagctgccaaggcttggggcttgcaccctctgaagccacagcctgagctgtaccttgtccccttttagccaaggctggagctgctggtaggcagggcaccaagtcccttggatgtacacagcaggtgggctttgggcccagcccaggaaaccatttgttccttctaggcctctgggcctgtgatgggaggggcagctatgaagatctctgacatgccctggagacatcttcctcattgtcttagtgaytagcatttcagctcctcattacttatgcaaatttctgcagacagcttcaatttcttcccagaaaatggggttttcttttctatcacatcatcaggctgcaaatcttccaaacttttaggctctgcttcctcctgaatgcgtcacygcttaaaaatttcttccyccagatatgctaaatcatctctttcaagttcagtgttccacagatctctaggacaggggcaaaatgccaccagtctctttactggagtaaagaacaacctttattccagttcccaacaagttccttatctccatctgagaccacctcagcctggactttatcatccatagcactatgagcattttggtcaaagacattcaacaaatttctaggaagttccaaactttctcacatcttcctttcttcttctgagccttccaaactgttccacctgttacccagttccaacatcacttccacattttcgggtacctttacagaggtgcaccaccatctggtaccaatttactgttttagtctgttctcactctactaataaagacatacctgagagtgggtaatttataaaaaataccaggtttaatgtactcacagttccatatggctggggagacatcataatcatggcagaaggcaaaggaggagcaaagtcatgtcttacatggtggcaaggaagagagcttgtgtagggtaactcccccttacaaagccatcagatctcatgagacttattcactatcacaagatcagcacatgaaagacccacccccatgattctataactcccacaacatgtgggaattatgggagctacaatctaagatgagatttgggtggggacacagccaagccaaatcacagagcttgcgatgagctgagatcatgccactgcactccaacagagggagactctgtctcgaaaaaacattttttaataaaaagaaaaatatgtatatatataattattgaacatttactctgtggaagatgttggttctacttggcagaattggtctttctacaccctaagaaatttagtattacttccattattagacattgaaccctaaatacacctatgacatcatgaattctctgagtgctttgtaaataggaatctaattagcttttttggcaatcrcattaccttgttcattcccatcaaacctttctaacctggagccataaggttatcattccctgccctgcacacaaaggtaagtgttaagtaaaaattcctcatcttgtatctgctcaatgaatgtttagacttgatttcaggcacttatattgacttttattacacttaattttgtttgattcagcaaatcatttcaatctaataagatcaatttaaatgttgatattttaaaaatcaacttattttttattctcagattcatgtgatctgcaagtatgcaaacatctttttatccagatgctgcaaattattgaataagcaagaattagtaagatattatcaccaaattgtcacatcagtcaagcctcatgtgcttcctaagaactgaggtgatgcattattttagagtgtcattctaaaccccagattcaacatcttcctaatctttctagtgcagtctaatatataaattttatgaaaagcataggtttttttttaaccagcagtgctctttgagaatttacattgattcctaaagattgccattgctttgtataaaatgttataaattatcttagcatcttacctggaatttccactaaattcaccaatttatgatttgtgaaatctgattttactttttgaaaattttcatgtgaatttcccattttcagtgttgtagcacctctctcttcctctaagatcctscaagctcatcaaaagccatgatcttattataccagcagttttatttattcaatctttcaacaagtagttattgaacttctataatgtgccaggctctggagctcgccttacaccaaacagacacaatcgatccattcgaagtgtcgtaattacacattgagggaccaactagaccttttctcattgtaaacttggagcaaaagtaaattcattaaaataaatttacattatagtgccacaaaaaaatgaacagaaccagaaagcattttttacaaaaattaacagaacagtgtgatagaggggaaaaggatgtgagatcatggtgccctaccttcaatagggtggccagaaaacacctctctgaagaagcagcatttgagctgagacctgaagaacgaggagtcagtgatgcagagaacctcaggagatgccttccaatctgagaaaagagtaagtgcaaaggccatgagatgggaaagaggtgaacaatgttcagggaactgagaggagccctctgtggttgagcctagtaagtttaggagagaggcttgagactggacaggtgggaggtaggaggtagctggattattcagagccttgtagatcaaggcaagaagttgaggttttattcactaggaaaccatgagagggtgttaggtgttaatagcagtgggtaaggctaatcacctcaataccacctctttgggtataaaatcccagcaaatactaggaactgcatgtatctttaaaaaccagaattgttggcaaagaaaaaggacactgcactcttcctctgcttgagcagaaattaaatttaatgtcattcctcccagcttgtgccatcttaatcctttgagaatatacagatatcaatgcagagcaaagtatgtgcttgctcagctcactgacacataataatctgacattagtcaatatgtcggaaaaggaaattcaatcacaaaagacatttttgcttccagattatgtagaaatgacttcattaagtttgttttcagagtgtttttctgaaaagctgatgtctctttaaatggttacattaaagagctctaatgaagacttacatgaactgaaatatcagcactaatggtgcttgattctgtctttgtcattttggtgatgaaaaataaaagaagactggatatctcctgttaatgcaatacttttagaactctttaattgaacgtgtctttaagggacaaagtgtcctggtgaataaaaaacagctcaagcaatttccttgagttgcaggcattggtacagagaaaatatgttcagaaaaaagaggaatcagtagctggagttgaggtgccactgagacccggggcccatacccagcactgctcccctcgccaccccactttcttctctttccttcttcttctttttttttttcttttagacagagtctcgctttgtcgtccaggctgcagtgcagtggcacgacctcagcactctgcagcttacatctcccaggtttaagtgaccctcctgcctcccagagtagctgggattacaggcatgcaccaccacacccagctaatttttgtatttagtagagacggggttttaccatgttggccagactggtctcaaactcctgacctcaagtgatccacccgcctcagcctcccaaagtgctgggattacaggcatgagccaccactcccaaccacttctcttttattctttacttttccttcctgtatctctgatctctctgtatttcttatacttggggatgcccctctctatgttactttagtgccagttctactattcatttactccatatttttgaatcagtgaaacttcccagggcctgagttctcttgcctttatataaagagaggctgacgcctgtcccattgggttgctatggaaaacagacaacacaggccatgatatatcgataagtcccctccaagtgttagtgttccctcaccctcacccatcccaccctttcaactttcccttttctccccttcccttgcccatgccataggtcaagtttttcatatagccatgattcactctacctgtggcccatgggttccaagggctagaggccaccagtatagagtttatacactcagaagtatattctagcatgcaaattctttcaaaagaattctttcaaaaagaattacctgatcccttctgctagttaaaggcaagatttttttctggttggggaaagctgcataacgaagttgaatcctatacttgccttcgtgcataagagcaatctgtcatcagaggccagtccaaaaggaaaactaacatccggttaatgagggcataaaactcaagctttcttgagtacctcacctccaagcagattcagggacccagtctcattctgtgttccggttttgtgaaagcctaggatcctgaaggttttgttttgttttgttttgtttgcctctaggtacaaaagaaaaaagagtgaaaataggagtgattgcatggggaaatttttaggggccaggcctggaagtcgtccacattacctctttctgcccacattcctcaggccagaacataatcatagcatcccaccagacagcaaggaaagcagaaaaacaggatctagctgtggcccaaaaagaaaaggaaatagaatatagtgaacacatagcaaactctgccacacaaccttttattacaaatagtttcgtttagtattttttacattgtaatttgtatttgatgtattaggattttaccaacacttaagaaaattggaaaattaggagaaaaagaaaatgtactcaaactttaagtttccatagaataatagtgactgtcttaatcttcatcctctgtgcatgttacaaaaataatatgtaaacctggagagtaaataatgccaccacaacattattctctagaggcaccatatggccccctttctcccggcactagaaaaatctctcacatgtcctgtttctccttttcagccttctatggcccctttgtctctccagcctttttgcaaacgaatcactcttgtccttagcctctggtatttgttctggttgggcctgatgttggggttggaaggatggaaatgagaaaaatactatgctaaaagagtcctggtaactttctcttctttgagttgcattacctaaggcagcctatgtttctttgtgacttagagaaatgaatgaggcagataagggggtagaagtaactaccttttctcattgagataatttctgccctgtaaaagcaagttgagagccaggaagaaaagcacaaatgaaagaagcatgccccataacttataaaccatcttatctaacttcaggtcactggtttaatgcccttacattattccagagccttttataagctctttaaatgcattaattactttgggaagactttaaattggaatatcagtagtgtagatttgtcaccatgtgttaacattaaagatgcacgtaccctttgacccagaaatttttagaaagttgtcctgcagatatacccacatatgtgtaaaaaagtcattcactgctttcatcgaagcattttggtagtaagaaaagattagaaacaacccaaatgcctaccaggggaaaactgcttacataaattatggtactgccatgcaatgggtcrttatgcagctatcagaaaagaatggagtctgtgtgctggagtatttccaagatagggtaaagggcaaagccacatgcagaagtaggtgcagtatgccaccatgttcgtgaaaagtgtgaaagggattgtatgatgatttgtctaagtgtagaatgtctcaggaatgatgtaaaagaaatcagttgcactggtcatctctgggaaaaaggattgagtggctaggcaccacagatcaaggaaggagacattttaggctttcctcataaaacctgtttggacacttcaagttcattcattcattcattcattcattaaatgttatggtctttaaccagcagtgtcaaaggctactgagagcagagtttcagctcctcattttaactggaacattccagagaaggagcatctccttgaagggaatttgactaaggcattaaccgagagaagagaaatgtaacctacatttcctccatctccatctggagagtcctttcaggtgtcatcttaggaaaatctaggttttccctttacaaggaaggtggcattttatttcatggaaaatcagactctgctttcttatagttttttcagcttggctcaagctcaggaaagtaaatagcaaaaataggtgaaccataaaattaagcctacatcattggggtgttaactaaggccattaaatttgtcatttgggatctaaatattggagtaggactttgatgatactctgaaattgtacctaaagtagactaatccagaataataatagagtaaacagcatgattgaaaaatttgaaaaactacttaagctttccaattggtatttacatttgcacattcccatccttaatgacataaaattaaatagctctacagatgcttaatgcatcagggctcagtgaatctggaggaaaagcagatggcttatgtatatctgagagcattttaatattaagcaaataaaccccaattagatgggcgtggcagaagcatatcctgttgcatgcttaatggtgagaagtggatatttcaaatgtctgtcctctgtactttacaagagtttattcaaaatggctgcatggtaagggctggggaattaaacaaggctaagaagcaagagagtagatgaatgagaatccacacagtggtatagatgaatgctacagtagaagctgctcagctggtgcctgagagggaagggaggacctttgttcacactgctctgtgtctgttgtgctgacctgggactagggttgttgccgaactaaaaacaaagaaaagctaaactgatctatatcataaatgtcatagagatatgtggtagaaggaagatggaggaaatggtaaacacaagggggaagaaggaaaggtaggttgggagtttagagaggtaggaaggaaaaaaggctagatgacataagaaactttaagaagagtggacaatcaattcagaatttatatgtaaatcaaaacatcaagttgttcaccatagatatataaaatttgtattcaactatacttccataaagccaaaaatatttaaaatattagaaacattataatagttttcaaaagagaggtacccaaacagcagcatcagcatcacctgggagcttgttagaaatgcaaattctcaagcctcacctcagactgaatcagaaactcttgggtgggcccaaaagtctgtgaacaagctctgcaggtgattcttatgcactctcaagactgagaaccactggtccacaccttctatttaacatgataactaggttgacctatgttgtaaatattcccattgaacataaaagtgatgtaaaattgctagaagctgtctgtattggtcttttttcacactgctaaaaagatactacctgaaactgggtaatttataaaggaaagtggttgaattaactcatagttctgcatgactggggaggcctcagaaaacttacaatcatgacagaaggcgaaagggaatgaaggcacggcttacatggtggcaggagagagacagagtgcgcaggggaaagctgccccttttaaaaccatcagatcacatgagagctccctcactatcatgagaacagcatggcgaaaccacctccattatccaatcacctcccatcgggtccctccctcgacacttggggattacaattcaagaagagatttaggtggggacacagccaaaccatatcattctgccctggcccctccaaaatctcctgtccttttcacatttcacaaccaatcatgccttcccaacagtcccccaaagtcttaactcattccagcattatcacaaaagtccaagtccaaagtctcatctgagacaaggtatgtcccttccacctatgagcctgtaaaatcagaagcaagttagttatttccaagatacaatggggggtacaagtattgggtaaatgttcctattccaaaatgggagaaattggccaaaacaaagaggccacagacaccatgcaagtccaaaacctgatggggcagtcattaaatcttaaaggtccgtaatgatctcctttgactccatgtctcacacccacggtacgctgatgcaaagggtgggctcccatggccttgggcagctcctcctctgtagctctgcagggtatggcctctgcggctgctttcacaggctggtgtggagtgcctgcagcttttccaggcacacggtgcaagctgtcggtggatctaccattctagcgtctggaggatggtggccctcttctcacagttccactaggtagtgccccagtgaggactctgtgtgggggctccagcrccacacttcctttccacactgccttagcagaggttctccctgaggctgtcttatgaagaccagcgtgggaggcaatagaactgtttactgaaagaaatattaagaaaaaaattccttcccccaccccacccagctttggaaaaaagttgcttctggcacatttctagaaattaagctccaaataaaatttgtaaattgtagatggaaagtgataataaagacaggcaggtgataatgggagtgtatttggattaacttctgaaaaaacaaaaaactagaaatttgagaggagattttaaaaccatggcagtgagtaagaatgaagaggtgaacagaaaaaaaaaatgttgggtttgttttaattaaaaaactaaaaggtcaataatacacaaggcacttaaataaaagtgataaagaaaaacaaattaagaggatttggaactcatgattcacttgagggtcaccttggtagtagtgagatgtaatggagtgagaagagcctgggttttcagagtcagtgttcagatccaccagctgtaaattatatcattctggataattcacttaacattagggattgacatgctttcatttgttcttactttgccctatagtgagagaagtaaagtgtttaattagggctattattagttttcaatttaccaaataaatgagctcttttcttttaaaaaaaaaaaaaaagaggaggaggaggaacaatgtatggtgagtgtgttatgaaatctgagcgtatttttgacaatgcaatagccccctcctccagaacctcataaaaataaaaacttcaactaaagacttgtattaccccttagggctttttggagtcagatttatgggtttttctgtgtatggtactgggttgacatgaggtttgagttggaatcaagaaagcctcatgttatttgggttgaattattaaaattgagactatgagcccagtacattttttccaatatatttcatgtttagggccattcacatcagcactcatttgctgtttgtgctcagagactttacatccccttgtgtctccaagttcttgtcatctattttatgaaagaggccatatggacactgtcttctataatggtgtcaaatattagtcagagggttaagttgtaaaatgagtgcataaagcaaaagctaagtgtagtcatttttctttctctctctctctctctctttttttttcccccacagggagggatggagtctcactgtgtcgcccaggctggagtgcagtggcccaatctcggcttactgaaacctccaccccctgggttcaagtgattctcgtgcctcagcctcccaagtagctgggattacaggcattcaccaccacaccagctaatttttgtatttttagtagagacggggtttcaccatgttggacaggctggtcttgaactcctgacctcaagtgatccacctgcctcggcctcccaaattgctgggattacaggtgtgagtcaccgctcctggctgcttttcatttttctatcacttgcactatacaactgctgatccctcaccagtcctgttgctggtagaggtttggctgatatgcatgaattcgtgatttgggaagattttctgtcatccagttttcttgaggatgattgtcatgcatattttttcctttcactatggtggttggtccatttgtctttcagtgataacttgaaagatgttttaaaaactaccactgcatcacaatcccaccacctcaaactggatgaaatttcctgcttgataaaccaactaagactaaaaactagcagttagtgatatcagaagagaataaaaagtgtgtcttccattcaaacagtgtaaggtgatatctcattgtgattttaatttgcatttccctaataattagtgattttgagcagtttttcatgaacctgttggcctttttaaatttttcttttgagaaatgtctgtgcaggccctttgctcattttttaattgggttattgmttttcttgttgacttgtttgggktccttatatattttgaatagtaatcccttatcagatgtatggtgtgttagtctgttttgtattgttataaaggaatacccacggctgggtaatttatgaagaaaagrtagtcagttttttggctcatgcttctgcagggtgtacaagcaacatggtgccggcacctgctcagcttttggaaaggactcaggaagcttttactcatgatggaaggcaaagcgggaggaggcacatcacatagcaagagtggaagcaagagagacgtcatgctcttttaagcaatcagctctcaggtgaactaatagagtgagaactcactcatttctgtggggagggcatcaagctatttataatggatccatcctcatgacacaaacactgctatctcccacctctaacactggagatgacacttgaacatgagatttggaggggacaaatatcaaaactatatcatatggtttgcagatattttcttccatccttgagttatcttttcattttgttaattgtttcctttgctgtgctgaagctttgtttaatgaaatcccatttgtctattttttgcttttgttgcctgtgcttttgggaacctatctaaaaatttattgccgggagcattgttgtgaagcttccccctatatattcttttagtagttttacagtttcagctctgctgtttaagtcttcaatcaattttgagattattttttaatatgatgtgagatggagatccaattttactcttctgaatgtggatatctgattttcccagcaccatttattgaagagactgccctttccccattgtatgtctttggcacctttgtcaaaaatcaactgactataaatgtgtgagtttatttgtggtgttagtcagaatgtagagaaaagggaccccttatgtattgctggtaggaccacacattagtacagccataatggaaaatagtgtggaggtgcctcaaaagactaaaaatagaaccaccacataatccagcaattctgcttcttgatatatagccaaaagaattgaaatacatatgtggaaaagatagctgcactctcatgtttactgcagcattattcacgataacatgatacggactcaacctaaatgttcatcaatgaatgaatggatacagaaaatgtggtatatatacacaatggaatactattcagcctctaaaacgaaggaaattctgtcatttatgacaacatgaatgaagctgatggacatgatgttaaacgaagtaagcgaggcacacaaagacaaatactgcatggtctcacttatacgttgaatccgaaagaaaccaaattcataaaagtagagaatagaatggtggttaccaggggtggggagggaaagtgagaaaggaaatggggagttactagtcaaaagaagcaaaatttcagttaggcaggagaaataagtttttcgttgttgttgtttcttggtttttggtttgtttgtgtgtttatttatttattttgagatagagtctcgcttcctcatccaggctggagggcagtggcgtgatctcgactcactgcaatctctgcctcccagattcaagcaattctcccacctcagtctcccaagtagctgggactacaggtatgggccatcatacctggctaatttttctatttttagtagaaacggggtttcgccatgttgcccagactggttttgaactcctggattcaagatatccgcctgcctcggccacccaaagtgctagcattacaggggtgaggaataagtttttgagatctatggcacagcagggtgactatagccaataatagtgtgtgatatgtttcaaaattgctaagagagtaaatttcagacatctcacttaaaaaatgataagtaaatgaggtaatggatgttacttaactgaatttaatcattccacattgtatacatacatcaaaagatcacatcgtactccataaatgtatacaattataattttacaattaaaaataatattaataataaaaatattttaaggagcatgtcttcctagtgccaaagtgtttacagaagcaaagagggacaaccacaccaaatgatggatcaagttacacggggacttgggacattggattcagccacctggaggtcattggtaaccttgacaagagtaatttctatagagcacaggggtgaaaacaccaaagtcctgtggaatagatttgagagaggataggaggggagaaacgagagtcatcaagtatagatgactctttcgagaaggtttattgtacaggtatacagcaaattaaggagataatgagagaatgtgcagagtcaacagaggacttttaaaggtaggaggtactatagtatgtaagtgtgattaccggaatgagtctggagagacgtaaatattgatgatgtaggaggagggggccatttgcttgtgtgatgcccctggatagtagaaaagggaaaggatctggtgcacagtagaggaggtggtctcagatgacaataagtgattggccagagcttcaggtagggaagggagagaatatgtgtacagatgacagtgggggagcactgaacagtggggcttgttgggggttctcctctaatccttttcaatatttctgagctaacagaaggaaattcattatcttacagtgaggagagaggaaaggtgtcggagatttgacaggaagggtgagaagcagttaccaaggagaatgaagaagaaaacagactaggaaagtgtattcaggtggtgcagtagcactgaaggcctgcttatggtagtgccaaaaccagctcagtcctcttcaaatgagcaccaaatggaagaattggtttgcatttaggggccatttatacacaaaatacagcattttattttttatctttatagctttttcaatagttttttgctgattgtgcacagtggagtttgagaaaattgagaaattaaatgcacatctggtggtatccactgaccttccctttttactgatatttattcacctaaggattatggttccagactcacattcagtgtggctctcaatattatcctgctgtcagcagcctaagtacgtagatgagtggaaagcatgtacatgaagacttaaccatgtgtacttctggtaggtgacacttaagtagaacaggcaaatattaaagaaaaaaagacttaaatttcctagaagcaggtgacatttcttccatttgtttcacaaaatttcacaagtgagaaaagtcatgaaaaactggtctttgatcttttttacctcttgaaaatgatgcaacatttctttctacttcacaaggtgaatatttttttgaatgttttaaatctcaaagttcaaacaatggcatcaaagcgccaggctggagctcaccatggggagccagccggggtcctgtgccctgggtggcgctgaggctcacgctgtacacggggcacggggacagttccagagctcagggagaggctttggtcccaaatatggaccacaggcacaggaagcactgcttattccttggactttatacactcaaatgctttccttcaagaaatacagtttaaattccaggctttgagttaggcacaggggctacaaagtaaacaactgtggcccttcctcctcaagagctaactcccagtccagtggagaagaaaggtattaaattagtgagctccatggaaggctagaagagcctgcaaaagtcaaagtctatatggagccaagtgtcggagagggccaaggtaaatttcatggatagtttcagaaggagtgtggtgaaggggaggatttggattacaaaacatcttatctcgaactgtgtagctttaggcaggtcacagtctctgagcacccgttttcccatttgcataatgggggtagtagtaataacagtaataataagttacaagaggatgtgctgattaaatgtttatcaactgctctgtaccagggcttttcaagtgctcagcaaatgtcaattcccttcccatgtttctgcccttgtatgtttgaattctttaacaataagctggagatagatgttttcagattagacatggaaaaattaagataatcagagagttcaattgcaagttaaaagtcatgcctctggaattagttgaaggtttataattaagagaaagtttctacaaaataactggcctatagtcttcacaaatgtcaaggtcataaaagacaaaaactgaggagcagattaaggactatggagacgtgaaaattcaatgcaacttgtgattctgaattggattctagacctgaaaatactttttttatttgcatagaggacgatgtcaggacaatgtgtaaaattttaataaggtgtgttgatgttgataattatgcaatattatgtaaaagaatgtcgttgcttttaggaaatattcattgaagtatttaggtgtaaaaggcaacacatctgcaatttaatctcaagtggttaaaaataatatgtatatatgtgtcggtgaatatacacacacaccacacacgtacacagagaatagagaataggagagaaagagaataataatgcaaatgtgtaaaatgttaacattttgctgtgggtgaagggaataggaattctttgtacaatatttgcaattttcctgtaagactaaaattatttcaaaataaagagtttccattataaaaggcaaaataaatgagttttaagtcataatgattcaggaaatcctacagaaaaaaaaaaatctaaattaacagccaggctttagaatggaaacacattaaaatgacccaagcaagaatcctggcaaggttcacagaattcgtgaagccctaattagaagtgatgagaactgaactggaaataccttgacacactctcattagctcagcatcggttcttgccttaaggtacagttcaacaggagggcaccctttgtgtggtttctgggcaccctgaagcccttcatagtttgtcaggcctttctgtttgaaagcaaagaaaaggtaaaagcttaatggtagtagcagagcagcaacaaaggacacacaactgatcctacatgtaaatagctggtttggaatcatgccttctggaaaacttcatactgtgatgatcacctcttggaatgcttttattcatgtaaagcagaagtctgtaagccttaaccaggctactttaattataccatttcaatgtcagaatgattcagcttcctcttaatttaatgtgcacaattattttatttctgaaaaaatccattacataaaatatggaaatattcatatgtataaaaatataaatgaataattgtaatgtattatatttatgtacaatacgtaattgcatatttacatgtaaatatatgtaatataataagcccttaggaattaattttaaaattgctagaattaataaatggctcaataaaaagaataggtacaaaattcacagacaaacatatcaatggaatgctaggaaacaaactccccgcttccacatccctaaaaaatcttttaaaaatttttagggatactcttttgataggttcaaggggtgtatacttaaaactttctaagatagtatataaattaatcccattgagaaataccaatagataatgaaataactaatccaatgagaaatgtatcatataaaaaactacttagctgaactaggagatataaaagacactttgtgtattgccatatcaaaaaagctaaacattgtaaagatatgggcttttttcaaactaatacataggcttattgtattcccaataaaatccatattgtgggggagaggggaaattttgagaaaataatcctaaaattcatcttaacatttaaataggaaaagatatcaaaacaaattctttaaaagaaaaccaataagggaaagtcagtcctatattaaaatatgttacaaatatattgcaattaaatgagagatattggcataagaataagcataaattaatgaaacaaaattgatggcagaaaacagacaacagtgtttacaataattcattatatcctatagacagcatcatgaataactggaggaagattatttgacaataattctggaaaaactggttgtaaatatagaacaaaaaattagttactaacttcacttcatatcccaaaatcaaccgtggttgagttacagagttaaaaattataatatagaaaatcagaaaaaaaataaaacaaaaaagagggaaatactttctaggcttaaagaaagagctaaacaaacattgaaagaaaatctaaaaatgtggctacataaaaagaaaaatttatttacgtcaaggaaaaaagaagacataaagtcaaagaagactgagataaaaacattttctataaagatgacaagtaagaggttaataatgttatgtaaagaactatatacctaacttgttagcttgaaagtagggtaaaagaaagataaaatgagaattgcgtaccaaaagaaaaaaagaactgtataccaaataagataaacattaagaaactaataaaaagtaaaagaaatgaatagttaattcgca

SEQ ID NO: 97462 - DNA, 142643 bp, Homo sapiens
catgggaaatgtagttttcaggagtccttttacatctcattctcggcctcaagccttaggattgcttttagatcccaagttagtaactccttgttacctcctagaacgagatgataaggggttacaaacctgggatctaaaagcaattttcttttattttaaaatttttttactgggtgtcaactatatgccaagggtctctgctctctctctctctcatctttcacttttttcttcccaatcgccatgatttaggaatagagggtgtaacaatctcttgagctgttttctgctaatttactagaagcaaggaatattcggactttaaaatttaaaataaggcacgtaattttaatattttccaactttctagatgtttagttgtttcaagttttattcaatagcacattgtgtatttattaataaattaatgaagcaagtgcatctcctacatacttcatttactttgtgaatgtagattattttcttttggaactttgtggtctctttatagatctgcaggagtgtccaaataaataacgagcattgaaataaataacaatcattgaatatgcaaggccctatgctacacagaataaggaataaagagatgagtaagaaaagatcgctgcccttaagaaagacacacactcagctaattataagcacctaaggaagtgagtgatctaaactattgtatagaggtacaaaaattgcatgagggcaagtgaccaattatgcctgaaggagatggtgaaaccatggcactgatagtatttggtctgtattgaatgctgagtagactcaggctttctagcctaagatgccctgaatatttgaaggagataccctccctccagtcctctactattcggcttgatttctatggtgcgatgttcaaggacatgggctttggcgtgagatggacctaggttcaagttctgacttggccacgctggctaagttgtcacattgccacatcgggtaaatcactgaatttctgatcctgtaaagcgggaaagattgtgaatcttaaatgagataaatgtaggtaaaacataacttacgtgggtgtctgacacattataactgcttaatgcttgttattattgtgtgataagctgctggtcagcaacttcgaacaaagaaacacaaggaacacattcctggaaacaaggctgatggttgataaaagggtgtttatttcaaataaagtcattgggaacaaaatcctcccaacacctaggtatattttggagacgtaaagaacactaagctgcacataggaagggaattaatgggagtagagctcaccgaagaaaggatgatttttcaaaggaggcttatacatctgtcattgaatcaacagctatagcctggtgctaagccagactttaagctcacaaactgatatgggacagattgtaatgaattgtaatgatttgggttctagaacttcagaatacttttgcatgctagttaggaaggcctgttgatattgatagcaataacgacagctaacatttttgccaagtgcttgctatgtactgggcacaatactcagtacgagtacttcaaaagtacacttgtttgaataacggggagaggtgtttgaaggagggagcttggtaaccaggaaagtgaaggtgatccggctgggccctgatcagcagcattgattcagggttgattcagttgatctgactgagcaggtgagttcccctttcttccctcattcctcttgaggccttcatacttgggcaaagaaagtgactttcctgggtagatgaagattgttcttaaggtaagaatggaaggagaaggagacaattttatgctgctttctggatggaatgagcaacagtgcagaagggtaaaggcgtgtgcaggatgtatttgggaaactgaatagtttgggttgcgatcatataaagtgcctggtggagctacagtggaagagcaaactgggcaggtagatggggctactgtgaaggatgctgtagtctagactttactgtgttggttatgagaaaccaaatagggtttaaaaataggagtgtgccatgattagacatgaatttcagtgagataattttttgcagttgtgtgaagggtggtttggcatctagaagaccatgcggaggctattaacaatagctaggaaagtgacaggcagagttttaaaattttttcccttgttttcaaagttatataagctaattgtaggggaaaaaacgtatgcacagaaaattaagagggtaaaataagcataagccagaagtagtaactattaggtattttggaaatacatttgatatgtttcattctaatcttttttcttacaaagttgagattaattgtaaagttaattaatgtcctgattttaacatgtatttccccatatcaaattttaaaaatgcaccatatcaaattttaaaactgcatcataaacataactttgatggttgcagaatatttcactgcatagatttttcgtaatgtacttaagcattctcctaatgttgagtacatttggggtggttcagagtgaacacctaacatgagctgggttaatcacagtccttccctgaaatttttcaaactagaattgggaaaagtaagtcactctacctctagaggaaattagcatattttatgctaaatgaattattttgtagttagtgagcacacatcagacacacatcaatatgaagggaaagtgctggcatatgtctcatggttctaattgtccctaaggcttgcctgtgtcctcacctttcttatggcttggttgttcagcttgctctttgattatatgagacatcctaatatccttgtaatacaatttctcatttttgtctaagctagttcaagttgaattttggaatttacagcaaaaagagttctatctaatacaattactagacagtagaaagtaagacgttggtaaaagggagaaaagtcaatgtttccttcttgatggatgaactggtgatcctcttaaccaattttaaggggcacagagcaggagaagcaggtttagaggacatggtgagtttgagatatcgtccagcagacagttggaccatttggggtctgctggacttggcagttaagtggtcagtgataacctcatgtgaagatgtttcgatagaatagtcagtacatgaaagcagtgttgatgataccctatccctgagtggaacatcttataatctgtacatgatccaaaacccaagaactctccacaagctttcctaaggttacactttctgtaaacttttctctcataaaaggcaactcttattgggtttgatagcattttccagaaactcaagaagttaataacatctaagccatttcctctggtatcacccaatattcagttcctaggagctcctgggaattcattagagccacatagtgagagagggaattagccttcttttgccactgccactgctaaagaagagttgtttgattttcataaaaccacagtataacctagcagcacgttcagaaagagcggcccttcccctcccacccccactctgtttattagaaaattatgttggcaggccgggcacggtggctaacgcctgtaatcccagcactttgggaggacaaggcgggcagatcatctgagatcaggagttcaagaccagcctgaccaacatggtgaaaccccgtctctactaaaaatacaaaaaattagccgggcgtggtggcaggcgcctgtagtcccagctactgcagaggctgaggcgggagaatggcgtgaacccgggaggcggagcttacatgagccgagatggcgccactgcactccagtgtgggcgacagagcgagactcctctcaaaagaaaaaaaaaaaaattagctgagcatggtggcaggtgcctgtaatctcagctactcaggaggctgaggaaggagaactgcttgaacccgggaggcagaggttgcagtgagccgagatcgcgccattgcactccagcatgggcaacaagagcaaaaccccgtctcaaaaaaaataaaagaaaatggaccgggcgcggtggctcacgcctgtaatcccagcactttgggaggccggggagggcggatcacaaggtcaggagatcgagaccatcctggctaacatggtgaaaccccgtctctactaaaaatacaaaaaattagccagtggtagcggacgcccgtagtcccagctactcgggaggctgaggccggagaatggcatgaacccggagggcggagcttgcagtgagtggagattgcgccactgcactccagactgggcgacagaaaaaaaaaaagaaagaaaatgatgttggcaaagcacaggaaggaagggtactcagtattcaagtgcgttgctgaacatttgtgtcctattttggagttatttgctaatagacctttccctagtaaagttggtattcctttcctattactggactgcaaaataatataaagcatacgataaagttttttggaatgatgcgaattataatccagagtcactgtgactatgtacaatttaggtcaaattaaatccaacaaataaaatcacaatataaagtaaatgcttaccttgtctcctccccacagcctctgcccagacccaccaactcttctttgtaggactgatcttcccacttaaatccccaataattgagtgtcataaagatattgaagaaaaaaaaaacacccaagaaaagcctgtatgttggtcccactgaaatatagataaatcttgcttcaccctgaacatctacatgcggacttatcttaatttggaatttaaaggagaaaaagttctttttgttgcagttaaatccctttcttcttcttctttttttttttttgagacagagtctcactctgtcacccaggctggagtgcagtggcgtgatctcagctgtctgcatcctctgcatcccgggttcaagcacttctctgcctcggcctcccaagtagctgggattacaggcgcccaccatcacactcggctaatttttgtatttctagtagagacggggtttcaccatcttggccaggttggtcttgaactcctgacctcatgatccactcgcctcggcctcccaaaatgctggaattacaggcgtgagccaccatgcccagccatccctttcttcttttagggaaaagagaatggggggaaatgtgagaggagatgtcatttctgcataaatcaggtgggcagcagggaaactgctgtgtccacttcttcttgcttgtcacttctcttcctcaattttcaaattactggagctgtccctccctagaaatcagctgcaggggggatgagtgggtgggggaaatatgttcttggcatcccaccaacaggtaaagcctttttctagagaaatatggttatccatggtggttacttcttcaggatcatgcttcacgcacaattaagggttaaatgtattgttctaggaacttgatcactgtgtattttttttaattggcaggtagatgtaagcacatgtatttctttttaatgaaaaaaaaatccaaacaacaaactactaaacacatttttaaacaaagagtctttataagttgtgactaacttctcttgtaaattgagagttaaagtcatttctaagctgtgatagtatttgattttaagggcacacacacacaatccagaacatttaagacaaatttttggaacacaatccattcaactcacctatatgaaatatgaaatcatgggagaaccaatatttctatctatttacctatttacatattgtgtgtcaatatgcacacatatggattaaaattacaattctccaaaacagctcccttttatatggataaaacaaagcaacactgaagacaaagcatgaatgcaagagaaggaggtaataactaccattttcactggtactacacctcagctttgacaatgaaaacattaggtatttcttgaagattattcaaaagataatgctcaaaatgggttttgtaaatcatttattatgactgaaagggaagaaaatgataggagacaaatattacaattaaacatgtaacattattctcttgtaaccaatcataataacatactttgaatttttgaatrgctatataatttcccagaaaataaaattttcacatcatcagttacagaaaattgatttccttccatcaaaatattttatctctgctctatcaaaaataaatgccaagtctaaggtactacacagtttaagataagccttcactacttgtttaaattagaggagtgtggggaggggcttaccaaatgatgaataaactactgcctgagaataaagccctcacacataagtaacagctctgtcaagcctctggctcaccaactaattattaaatggctctctaggaacttagaaactcttctgtawcccagccaaaaggcttctgagagtcatcacaaactggttaccagtttattctcaaaaacaaatttgcttattcgatgggcgactgtggctcaaaagatgtaggggaaacagtcaattgaaatctattttgatggggtttaaaaaatattctttttgtcattatcaataaagtaaaatattatttgagcaatgtatttcttagttctgtcccttctaaggatgctaatacagtatggaacatttttaaaaggcttaatgtgagaacagtacattgccacagggagaaggcagcaaagaagaaaatatgaaggctcgggcaacaaattaattcagcagctaacatttctcaaattggttaaaaaaaatgacaaagtgataaatatatgtccaaaaaataaatacaaatattctatacataaataaaattaagtatactcatgattaccattacaattgaacattttaataatataattttcatgtcttatcacagtttcatttttatcatgaatatgaactacactgttgtgacacatactggaatgcactgaccacttacataacctaataaagtaatgcatttaagtactctatcaactaaaatttaacctcctttgacagaagaattattttctcttttcttttaaaaaatatttttgaggctgggcacggtggctcatgcctgcaatcccagcactttgggaggccgaggtgggaggattgcttgaacccaggagtttgagactaggctggacaacatagggagatcctgtctctactaaaaatacaaatattagatgggcatggtggtgcatgcttctagtcccagctattcaagaggctgaagtgggattgcttgatcccggaaggtcgaggctacagtgagctatgatggcaccactgcactccagcctgggcaaccagagtgagaccctgcctcaaaaaaataaaataaaatttctggagccaggtgtggtggctcacacttgtaatcccagcactttgggaggctgaggagagaggattgcttgaggccaggagttcaagaccagcctgggcaacatagcaagaccctatctgtgcatacatatgtatgtatgtgtagggaatctattttcaaactataattagaaggtaatgtgtgaggagcaaagctttaaggattgtctttgtttttaaagatattattaacaaagcaaggtcaaaatgacccagcaccaaatacagtgaaatgtgggcaatattcttctgaatctgggcagcactgacagccaaggaatgtcaggaatcaccatcttgttttaaattttacactccagtgatgtgaaaaggtgacggtatactttctaataccacacaggaggctcaggttacctaatgttatcctgctttctcacataatgattcatagagccggaagatgtactgcacctgctctgaaaatgtactcctcgcaccactctgcagcagtttcttatgctgcatgttctactcctttccaaacactatatcattaattaaaagcgcatttagttatagcacttactattttggcagtgaacatttccaaataatcaactggtttaccaaatgggagtttggaatctccctttctaaagattgccagaatattaaaaaggggaaaaaaagaaaagaaaagaaaagccacattgcacaatgtgtctgatgacaagggagaagggagatggaaaaaatgatgaattcttactcatttactctataakaaaattagtgtgttggcaaattttgtgtttatgttttactgttaatatttatttgaatatttaagaatcaaataaaagagactaacccccttcattgttaaggtttggaataccggtgtgtggctgccgtgctgccaggtgtaaacgaacttgtagggagctgatacagccacagcatggaggacaaggagtgaatgttcaggctccccagctttcagagtaaggtggggcctttggtcggtctgctgcttgacagaagaggctggcttcccatcattctggcttggggtccccgggtctgggctgagagcagtgctggagcagagaggtggtgaaatgctgccttttgctgatggaagttgtttatgtaactggcgatcaaaagagtgatttcaagaatctaaaacaaggaaaacagaattsttttgctccttagaagttctcatcacttccagaagagagtaaagtgttggccacaggtgagctccatttgcaagtgcccrggctaccagaattcccttctctctagatcaaacaatgaagtgcttacatgtccagcaccatcaaggcagccacacgttttttcattacttaaaccagcagaaagagtgaatctcaaaaacaatcaaattgagtggcattcttaggaaatgtgacagtcagtagtagaactctatcaaattatcataaagccacattagtgaatatatgaattaagaaagttagtgtcataagaactctctattttcactaaagactgagctccctgatctgcacttaatggttagctgctttcacttaagtataggcttaattaagaaagacatctattttgtaaaaaaagcttcagattccgaagaagtaatttcttttatctgataacattaagacagctaaagttgtaggaaaatcactttcaattagaattacatgttagaatgtaatccatttatttattgcttttacttagagatgttaaaactacacagtttgttaaaagtcgtaaaggagcaagtatgttttaattataaaatcccagtctttcctctaatgagtccataaagcaaataacctcaagtgaataagataatgtgtataaagtaccaggcagcaataacttaatgccacaactatttattttgaatcttctatatacctggcattgggctaagtaccctacaaacttccttcatttaatttttaagccaaaagaagtagggagtatgttaccatatttttagacaaagaaaccagagcttggaaagatgatgtaagttggacccatgtttgtttgactataaataacgtctgttttcccatctggaatgcagtctttgctgaataaatgttttaatatgaaaacaattagcattgctttttggccttctggctaagactaagtgaaaacaactaggacaaaaaagttggcagaaaggcttctactcaccttgggttttgccatggcaaaaagtaatttctctgttggtttgtcctttgaatgtgtattgttaatgactaccataaaatcatcttgatagcctccaaaggtcattagactcttgtacacrtagctgactattaacctctttaaagakaagaaaaagtatatatgttatatgctcttacttccaaggagagatgraaaataattaataatatatctccattaaaaggcagatattaatcaattatggtayaatayaaaattattttctaaaataaaatgtattatgatccaaaatagatagtagtggtactaattttatttaggcatyatctacctttacaatgttgagtccgaaacaagtcactgcagaaaaatgagaaaatataagaaaaaaataaaaagcatctatattccagcatctagtggaaagccactgttaatattttttatatgccctttcatatatctcttatatttatgttaggttaagccatattactgatacttttcatggtcaaaatggtcaagtattggtaaatctacatagttcacctagatagatggattttgaaatccataaacagaaacagtatcacgtattaaccctttgtcacatatgcagcaaatatttttttctaatgtgtttccaaaacaatgtaaaaatataacttaggccgggcctgatggctcacgcctgaggctgaggtgggaggatcacttgagcctagcctgggcaacatagggagacccagtttctatgaaaaaaaaaaaaaaaaaaattagccgggcatggtagtacatgcttgtggtcccagctacttgggaggctgaggcaggaggactgcttgagcccaggaggtcaaggatgcagggagcagtgatcacaccaccgcacttcagtctgggcgacagaataagaccctgcctcaaaaaaaaatcaataaatcaataaaataaaataaaataaaatgtaactaatatacagcctgaaaggactctgcatatctaatgattaccttgcaagactgagcagaccattccaggactgaatgcctcagacccacctgtgtgtgcttcctggcctgtctggctacctcctgggagctagggagctagttttctgaactaaggtaacttagtactggtgtataggttttttggtttgtttgtttttactttaagtcactgattttataatatcttcaagttatccatttaaaaactaaaaggcactcagaaaatataaccccttgaaaaaaagtgtgtgtgtgtttgttttttaagcaattataaggggaaacagtgactataacacaaaagaatrgtttggtttccagaaaattttcagtgatcttctgattatagccacaggattagacctgccaggtgaatttagtaattcctgctcaccagattaaacaaaaaagagaataaaattgtattaaataattagacacatgaaatatgataaaaaatgtaaatttcgggtaaataaatgaacacatatagatatcatagtttgaatttaaactatgtgaaaagtgctaasatgctatataaatgacattataggaaattatagaaattgttaaagaagccttagtgaaagtgaacttaaactttggtaattaaagttcccaccttaatgatttcttacagatttttattttacacaggaaacaatcttcttaacacttttaaaaaataatcatttcatgaatgtaaccatgatcacaatttagtcatggtatcaagatttttctcatacacaataaacgacctgtcttatcttgttttaaaaggttaaattataatcatagctgtatttgtaaaatgactgttcatgacatagtattaggaagaatgtttcctgggtaagagaaaaatcagattaagatatcattactttctgtttacggtacactgagcaatggaaacagttgacttaatgcaaaacttgagcgtttaaacttaccatggagttgtattctaagaggcttaaaccatcctcatgtacagccagccacaagaaagtacttccaagtgatgatggagttatgggctatgaagaggtgaaaatacactatattataaatactaagcaaaattacaggaatatttttcagtctaaatgtcatgtaacatttgccattaaacaacaataataacaacaaaaatttattaaaaatctcgcctaggaaagaggcagggtggtataccggagctaagagtgaattcgatattaggagacctagctttgagacccaaacctgccatatattaatgtatgcatttggataaactactgaatctgtttgaggctcaatttcctcatctttagcataggaacaataatgtttatattttacttttcttctgcgttaagacgttaatagtcaacaagtttttagggtttctatgatgaccaaaatcctaatgaagcaaaatatactgatatgcttgataagttgtgtagtgctattacaaggtaaaagattattattataattgcacacctttcctgaaagtttattaaatctgatattcaatgtgtaataaaaacacaataacaagaaaatatgaaactgtgtaatcaatagtaatgagaaatatgaaaatttccaccgaattttttattgtaaaagctacgaaattgactgggtgttgtggctctcgcctgtaatcctagcaccttgggaagccgaggtgggtggatcatctgaggccaggagttcgagaccagcctgtgcaacatgacgaaaccccatctctgccaaagacacaaaaatcagctgggcatggtggtgcacgcctgtaatccgatctacttgggaggctgagacaggagaacagctggaacctgggaggcgcaggctgcagtgagctgagatagtgccactgcactccagcctgtgtgacagagtgagacttcatctaaaaaaaaaaaaaaaaaaagctaaaagctactcctggttctcatagaaaaaaaaagctatgaaattatattaataaaaagaatctcctaccactagaacccaactgaaacccatgaatgtttttgagcaattaatgatgcttgtttggttccattaacaaatgaaatcctaaaaaaaatcttaactatttcccttaaattttacaaaacaatgtcaagactatagatataaaactggaatgaatgttgggttattttatataataaaacttgctagcatctcatatatacaaaaccctgagttagaaactgtctactgagggctgatttgcaaaggatagggagaattcaattcaaaaggatgcccttcaactctagtgtccactgacaggtgaatggataaacaaaatgtggtatatatatacmtacagtggaatgttattctgcctcaaaagggaaggaaattttgacacatgttacaacatggatgaaccttgaagacattacactaagtgaaataagccaataacaaaagcacaaatattatatgatttctcttacctgaagttcctaaagtagtcaaatgcatagagacagaaagtagagtggcagttgccagggctgggaggaggagggaggactggggagttaggtacagtttcagtttgggaaaataaaaaagtgtttagatgaatggtggtgacagcaacacaacaatgagaatgtacttaatgccacagaactatacacttaaaaatggttacaatgggccagatgcggtggctcacgcctgtaatcccagcactttgggaggccgaggcgggtggatcacttcagatcaggagttcgagactagtctggccaaaatggtgaaaccctgtctctaccaaaaatataaaaattagctgagcgtggtggtgtgcgcctgtaatcccagctacttggaaggctgaagcgtgagaatcgcttgaacctgggaggcggaggttgcagtgagtcaagattgcaccactgcactccagtctgggtgacagagtgagactccgtctcaaaaaaaaaaaaaaaaaaaaaggttaaagggtaaatttcattatgtgtattttaccacacacagaaaacaggatgccatgaagcaacaaaggaggtgtcgcttgttataaagaaagaaaagtgagcaaaaaagatgcttgtcacgtaatttgaaaagcaatattattatttaataatattttgtgccagcaagcacattttatcagaacagaaaagggtatttaatattacttccaatgctgaagttagaattaaaatccatgctgctctacagttcaaatctattccttgtaattttaaaaagtaacgttcaacttcccgtaagtacattaattttatagatgtttaagaatactaactttatcatctttttcttaattagtatacagctttcagttccactagaaaaaaattaattctcacctatcaataatatagtcactcatagaatcagagttagaagataccttagattttacttttctaatctaagtatttcattaacagatgaggaaaagtgaggtccagagaggtaacctgacttgcccaaagttgcacagctattcagcaatatttattaagtgataattattaattacgtgcaaagcactacagtaggtacaagaggaagattttaggatcagtgagtttatagtttcaaggagcatgcaatttaatagtgagtataaaacaaacacacagaaaaatataacacaaggcaagatgtatcttaagagcctgagaaagtacaaagagacatgtttcaacagaaagaaaaggaatcaaaaggcataatttttcccttggggaaagggctggccatccctgggcagggtgggtctccttcctcagtgttcctgcagcagtctgttcatgtgactcatagtgatatttgccatacagtggtttgtttataggcctgttgttacaaagtaaaatagtcctggaagttcatgtacaatccatctgaaacaataggttatgtatccctagagcttagctcaatgtttagcagacagaacttagtaaatactaatgagcaaatgagtgacagagtaaacatgtgcatggatgaatgaatgaacagaagaatgcagagttcagctgtggtttaggactcatgattcacctaatgagtccaagaaatgatttagggtgggaaaagttgggcagagaggaaaagatagagaagcttttctgccctttctctagtgtctcttcattgttttctttacattattggatatttcttcattttttacaaaagccaaggatactaagtctggggtaaatctggtcaactatgtacacaaaggttttcattatgcatctctctcccattctttcttacttttgcaagaaacaacttggcaccaaagaatggccacttcctggctactgtcaaataaatgcgcacacagtcagcagcactgtgtccccggagggccatccatctggttgaaagtcgctggcaaagctgcctaaaaaaaaagaaaagaacaaaaacaaaaacactaaagcaaaaacataaacagtgtgtcatagtcttaagataaaactctccttgagccaatcctaagcataactgtgatccctaggcataacccaggtaaagattttgtgactctcatcacaccactgtccatcacttgtcctttctggaatattcctttcaccaaattctcatactattcgtgttttcggcatgaactaggtacccacagcaggtccatttttaaaatctgaatatctaccatcaaaacttagcgtaaattagtttaaaagataatttctcatgggaatattttcattttaaaagaaaagtacaggcccggtgcagtggctcacgcctgtaatcccagcacgttgggaggccgaggcgggaggatcacctggggtcaggtgtttaagaccagcctggccaacgtggtgaaaccccgtctctactaaaaatacaaaaataagccaggcatgatggcgggtgcctgtaatcccagctactcgggaggctgaggtgggagaatcacttgaacccgggaggtggaggttgcagcgagccgagatcaccccattgcactacagcctgggtggcagagcaagactctgtcttaaacaaaaacaaaaacaagtagtagagcccaaagatgaatccctgatggtagaattttaggtcctcccacccctggcttggagagatgttagatgcaaggtgaaacttgtcaaatcaaattacaaaggcaagcacttattctacatagacaaaaggctgatcttaaatgtttctattttggaaaagctcacgataaattggatttgcctctatttctaaatctaatcagcttctctttatatattctctgaaattgaaactccaaattgaggtaaattagaaacttttatattaaaaagtcttttgtaagaagatagtttatttttatttcaacttattcataatagaatatacaaaatataattttttggtatgtacttcataaaattaaacatattattggccaatttttttctcttatttattatcagggttgttctggacaagaatgaaaaagatcaattaaaaagtacatctaaagcctttttttttaattaaagaaagtttaaatatagattctaaagcttctgggcttatcttaaataaaaatattggctgggcacagtggctcacgcctctaatcccagcactttgggaggctgagacaggcagttcatgaggtcaggagatcgagaccatcctggctaacacggtgaaaccccatctctactaaaaatacaataaattagctgggtgtggtggcgggcgcctgtagtcccagctacttgggaggctgaggcatgagaatggctgtacccgggaggcggagcttgcagtgagccgagattgggccactgcactccagcctgggcgacagagcgagactccgtctcaaaaaaaaaaaaaaagaaagaaaaaaaatctataatctcctgtggctcaatcatgttaaaaaaatcttgagaaagctgtccaaatgtttttcacctttaaaatttgaacacaaaaatattaccaaaaaactagtatgaccctaccctataaagagttacaaagatttccttaccttaactgctcttcagaacagccatctctataccttttaggataaaatttctctatgacttgctttagagtttgattcactttgcactgattggtaacrtgccctgctggagttgagaaaggtctttcaaaatctccaatctctacctaattggaaatccacaaaagtgaaaatatattgaaaagagttttaagacagaaaatcagttagttttattttttctaaacattcttttttaacacataatacataaatctatttgtcatgattatgtgattatgaacttcataatcatatgtaggaatttttataaattacatttgaattataattttttttttgagacggagtctcactctgtcacccaggctcattgcaacctctgcctcccaggttcaattgattctcctgcctcagcctcctgaatagctgggactacaggcatataccaccacgcttggctaatttttgtgctttttgtagagacgggggtttcaccatgttggccaggctggtctcgaactcctgacctcaagtgatccgcctaccttggcctaccaaagtgttgggattgcaagcgtgagccagagccaccgcctggcttgaattctaattttgaaaaaaatctgtaatttaaacatttgagttccatttctacattaaccttcctagtttactatcaccatctagtagtacttgctaaaggtcactactttgttattgtctgcaaggacaatttttcatttttaaggcactattttaattgctgataataagatgaaatagatgttaaaaataaaaggcaacagacgggtgtggtggcaggcacctgtaatcccagctactcgggaggctgaggcagaagaatcgcttgaacccaggaggcggaggttgcagtcagccgagatcatgccattgcccagcctgggtgacagagcaagactccatctcaaaaaaaaaagttataagaaatttcaaaaaactattagttggactttttgagggtctctcctgaatgtaatgggagcaagaaccatattctcattactttgttcctagattttctccatgttattgwgttcatactctcattctactagcattaatcccgggaatagagtccttcccaggatatacagttgtgttcggaaccacaatttatactttattggagcatgaagttcaaggtagggagtattaagggaatgttgaggctggaggggcaggcagagttcagatcttgaaagtccttgcatgtaaaaaaggaatgacagagctagattcacatttttgctgtatctctatcccagttactagtgctgcctaataaagctccatgcacaggtgacattgtgccagtttccaggctcagcccttaagaaaacagcagtttccacttcttgtctatcttctgggacattgttgctgtcacccattcaccattcttggaggaagcacaagcagtcatatacatgaagagaccacgtgtaaggtgctccagctgacagtcccagcagaagtccccacaaacagccggcatcaatcagccaccagacatgactgaaggagccttcaaatgattccagccctcagccatagagtgacaactggctctcaagctatgtcagctgataccaccggaagcagagacacacactgtcccttcacatccctgcccaaattactgtcttaagtagctgagttttggagtcattagttatgtagcaatagataagtggaaaaaatccctctagcatttgtgtgaaggataaatttgtgagggaccagaccagagaaaggcacactacttaggagcctgctgcaggacagcaggcagtatgagacaatgatccgaaccttagcaacagaagtcagcatacagaggagagaacagactaaaacatccctaagagttcacattcgcaggatgtggtgactggtggaaaagggccaaagtgagggaagagtcatgataattcccaggtgtgaagcttgtttgggggaccgggtggaggcagtatcataaagaggagacagaatgtgaacacagaggagggacgatgattagtttggttttcaatatgctgattttggctgggcgcggtggctcacgcctgtaatcctagcactttgggaggccaaggcaggtggatcacttgaggtcaggagttcgagactagcctggccaacatggtgaaaccccgtctctactaaaaatacgaaaattagcagagcatggtggtgagtgcctataattccagctactagggaggctgaggcaggagaatcgcttgaacccgggaggtgggggttacagtgagccaagattgtgccacttcactccagcttgggcaaaagagggaaactctgtctcaaaaaaaaaaaaaaaaaaaaagttgattttaaggagcccataaaaaaactacgaactgaagaaaaaagatctgggaaacactggcataggtggtgcatagaataaaaagaatgattgagatgtcctgggacagagtgtagcgtgaagagccataggccaaagaccctggggaatctaagccttggtccagatgccatatggcagagttgctttaacattttccttaattaacctaggcaaagacttgggtgtggttgagactatgggttgcatcttatgaccattctctccttcttaagaaaaaccttaaatttagctgggcacactgccaccccgctgagaccacattccccggactccctggtaggtagtaggcaaggccatgtgactaaattctgatgggagagacatgaatggaggcgttctatgcagctgctgagaagttttctcaagtgcgggagagcatgcccttttcagcccttcccccaccctgaagcccggaacactgacattagctggcactctggcagactcccaggaccatggtgatgacaccctagggatggcagaagagagaacaggataaagcccatgaccctaatggcttcacagaggtgccaggatgcctcgctctctatgtgagcgctaaatatacttctattctgattaagtcagtattaattttgtgtgtgtgtgtgtgtgtgtgtgtgtgtgtgtgtgtgtgtagaagattgaacttaatcctagctgatacaataggcaaataaaagaaagtgctctagccttttcaaggacttactcctattagactaccaagcgatttcagcatgacatcttcaagcccacagctctacactccaattcctttattaaatacaaagcctagagatatattttcaaaataattaagaaactgggttctctttatggaatactgtctcattctacatcattgcaattgtcagcagtttagaggcaaactataattatagtgcctgtaatttttaaggtgctaattgtagcaaaacgaatgtaaagaattattgaagtatattattttacgtttaattcagtgtagaaattagtatcatattatttcaatatattactccatataacatggaagttacctgagataaaagagctgccatttctaatgccagatctttgttcagaggaaaaagtccatttatgatttgatcatttgtctgatacattaacagcaacttttctctatcagtctctccacgagcttgcactgagaaatatagtctgtaaaaaaaaagagtaaatttctcattaaattatattcttacaaggwaataaagtaaagataaatccagaggactgagatggkgttgttttaacacagtactctaagtggtatgaacttagactrctactgtcaatgacttctgtttctgttctatttagtactttccgcaaaataagaaaaaactgctttgaggttgaggttgagaagtgctggaggtggcgctgaatcacattaaatgtcaattgtctaaatacaccaatgaaaagacagagattgtcatagttgataaaatataaaacccaactatatggcgcttataagaaatccactttaaatataaataaaaatatataagtagaagtaaagggatgaagcaattttctaggccttgaaacaccaaatccttaaatgttcctgaggaaggacctaagacatcaagcgaaattaaatatgccctctcttgcaaggaatgtatgatacaggcctttatttcaatgggctgtataaacccagtcttcaaaaccctcatgatccttcctgaataccttggacacagcacagaaaaggaagtgaaggtttcaactcaaaactacccccaaatcaacatcaaataaggggagggggagaaggtgagttttctctgggaatctgaaagataatatttatagatttaagtgtgttttgactttttggccacaatctgataagcagctttaggggctcaaaaatagtttacatgttatcactattactcactgaaacacaacatggcttttgtctgcctaggggggtcttcatcaaatcagtgactctctttatttattcactgtgtcatttattcatatgtgagatttgtggggctctgacttcaggctgcagatcaggcacaggtgctgtaacggctctaaatgctgtgacaatggggtgggtgagcaacatcttgacacacctgaatactgccatgacaacacagtggctggaaaagagagatttagatacagtaactgttaggtgtgtgctcagtttggctataactttgcattttcagccttttcttccccctacacacttgtgggagaggacacacccctatcatttacagtatctctcccagtaattctctcaaatagcagggaaggggagggcagcaggtctgaatctctgggcaagcatgggtgggtatactttgaaaagctcctcctaccccatgattctattcattctttcctctttacccagtttacaaatcagaaaaatcctaagctccattttaatctatgatgactacacaaagacaaataatgcaggattatattgttaaactggtagtagaatatggctgggcaacagaaacagatgacaaatccaaaatgatatcagcaaagccgtatgaaacaaagagaagaaaatttaagatgaaagcctttctttttggcatgcttacatttgtatgcatagcttattctccctacttgaagttaggaagtatatcatactcatcactgtaatccattagagtttagctaagtgttaccactggaaggtttggtaatatggctaaggggagaaaaagaaccaaatggttacaggcaagaagagcttaagtgcattttctcttattcccagcaggcaacacaattgagcctgacaggggaaaaggaagtatcactagcaaaaaaaaaaaaaaagagagagagagagaaacaatactggacatgaaccatgggctcaaatccctaatgaaacagttttggctccaatagctatccagggatttggggagaatttgaagaggaacaaaaatgaccaagaagtcataaaaatcaaatccatggagcttgaataggaaaggcactagaggaatgtgatctaagcctctcacaatatggccagctttcagctgcttccaaatcctaaagaggcctgcagcagacagaatgggcttccatgacagcaggcaaggcttagattagctcgcgggggtattcccaaatctccacctcctcattggacacccaggaagctgaatactgtgggatggaaattgcgtcactgtggaccagtaccactacgcaaatatactgcttccaaattcagcagggctctcagcaccactgggcgatccttttgcttgccctcaactggatccatattcattcttcagagcatttatttcctactgttgcccttcccatcctcttgtaaacttactggggggaaagcctgcaatctctctctgttcacccttccttcactcctcagtccaccatggtctactggttatactctactaaaactgcaattgttctcttcctgcctcagtggcgtccaacttccagtcatctgctcagaagtcaccactctgcaaagtcttcctctatgtccctacaacctcttgtacgtatgcgtcatactcatggtaacgacaaatatctacaaagcatttactatgtggcaggctctgaaccaagtgctttacaattgccaacatttaatccttcagacaaccctagaggtgggagtcattttgacctccgtttcacatacagggtacctgaggcacagagatgttaagtgacttgctcagggccacatagtaagtggtagagccaggattctaacccaggcagcctgtctccagcccatgttcttcactcctgtgctacattcttcctgttacagcactgattgcattgctaagacttcatgtctgcctctccctataaactggaagattctaaagggcaaggaaactctattcaccttggaattcccaaggcttcaaacaagtcttggcactggtagatggcatgaatggacaaataaatggtacgtgagaattgctaagtacaggaattatttgccaaaaatcctgaagaattccctttcatagtcttaggcaagtgacttaactctctaaagcttcagttacctcatctgtgagatggaaataataatagtacctcaaagggttgtaaggattatgtaagaatgcatacaaagagttaagaataaggcctgatgttaggtaaatgttcaacaaatgagggttagtagtagtaggagtaccagtagtagtattccccagaggtctctggaatcatgagagtctctctctctctttttttttttttgagacagagtctcgctctgtcacccagactggagtgcagtggcatgcagtggcacgatttggctcactgcaacctctgcctcctgggttcatgcgattctcctgccccagcctcccatgtagccgggactacaggcgcatgccaccatgcccagctaatttttgtatttttagtagagacggggtttcaccatgttggccaggctggtcttgaactcctcacctcaggtgatccgcctgcctaggatcccaaagtgctgggattacaggcgtgagccacggtgcctggtccacatgagagtctcttgatcctggaattttttttggtgtgaacatagctaggagaaatgggataaactccatttcttggcttaaacttctggctatggccagttttcttttgttaaaaacatgccttggctcttacaacttcaaaaacacagtgagaaatcaaattaaataagaagcttaactatgaatagaatttaaatgttagttgccaacggttgtctatgagaacaagttcaaaacctgttaattagatctttcatacctgaatctaaataattaaaattccatcacttgttaagtatccatttaaaattccatgataaagagaattgatattttagctttgtttgttaccctgctgcttggcagatgaagaatcaggtccttggctgtgtgacaggtcacagcaaggttccctcctaactgtatcactagaaattagggctcattgtctaagctacttataaacaccggcaaagcacggccatgtttagaaacattactttctcatagctgtggctatccagccatttcagagttctgttaaaaatcaagcctttcagttgagttaatttttttcctgctgtcaaagacattgtcatgaggttttacttttaaacaaggtaatcatcatctgttattcacaattctctcttttaaaaaaaaatttttgaagagatttattctgagccaaatatgtgtgaccatggcctgtgacacagccctcaggaggtcctgagaacatgtacccaaggtggtcggggagctgcttggttttacgcattttasggaggctgagacttcaatcaaataacttaagaaatctattggtttggtctaggaaggcagaacaacttgaagtgaagactccacaacctcttatggcaacccagacattcctttctattgattccaggtctttggataaactcaaccaactgtcaaccaaaaaatttttattcacgactctctttgtccttccttgtgatgtttgttagacttgaagcattatttttacctgtctttcatatccaaattttatccaaatttcacttcagttccaatcatagccatcatactcagagttggtatgtattaagcattcataaggtttagattattaggaatagtcttggctgggcgcagtggctcatgcctgtaatcccagcactttgggaggccgaggcgggcagatcacctgaggtcaggagtttgataccagcctggccaacatggtgaaamccagtctctactaaaaatacaaaaattagctgggcatggtggcaggcgcctgtaatcccagctatctgggaggctgaagcaggaaaatcgcttgaacctgggaggcaaaggttgcagtragctgagatcgygccattgcactccagcctgggcagcaagggtgaagttctgtctcaaaaaaaaaaaaagaatgcctgaacctcttctccataaatgtctttggcaggccaggtccaggagctggctccttccacaaargctgaggccaagaggcaggggcagcaatgaggaccgttaggtcagtgcttctcaaaacccagcacgtgtaagaattatctggagagctgtcaaaacagggactcctgggctccacccccggaaattctgactcagtgggtctgaagtggggcctaatgatttgcatttctaacatgttccacgtggtcctgaggctgctagtgttgggcccacgttgggaactactgctccagattaaacagaactacaataataatctagaaggtccaaatattctagcctgctgtccttcccagtcaccaaagggccactgataccttgataaagtttgccctcaagggaaacaggtccctccagggatgaagcctattagatttccaatatctatgcaatattgcttatctctaggaatgcatgattttaaaatcttagacaccaaagattaatagtcactttcttattacttgaacctctggcaaatcatcacagctcatgagcccctgaataaagaagctccagtgttcacaaccaccatttattcagatcaacagagtctgttcaaatactgggtggccctttaagtggccaactggatgagagaagagcccaaaatatgaatgtgccatatttatttaactgttctccctagtaataaacatgtgagtgtctgtcccaagtttttaacaaaaacattgacaaagaatatgacaaaaacatgacaaggaagatactgtgacatactggaatactctgcccacttatctgcatatttctgtgggatagactattagaacaagaaattttaaagtggatcaaaattacattctttatgttgtacagtgccttcaattcttacattccaattttaagtctgaacatcttccaaaaagagacctctgagtaccactccaataattccaccaggctctgggtctgacattttatagattccttaatttacagggtataagactcaaataaaaccagcaaaataccattattttgttataattaatgtgagctggtcagttaacagtgtttattaagtactaccttttgctaatacatgaaagaaatgaaaatatttaaaaagaaagaaaggaaatctggttcctgactacatgccaaagtacattaccattttatctgtagagaaggtgtgtgctccggagtctccggcattttctcaattcttgacacaagctaagcagcctccatctacaggcctttgaacattcttttctatgcattttgatgttcccacttccatctccctctgaacttggtataaacatcatttcctcaaagaagcctcccgaggtctcccgtctaggtcaggctcactgttgtgtgccctcacagtacctctctctctcttcagagaacatactgtgtcattacacactcattagagtgaggatatgcccaacaatagtcttcctcactaacccgtagattccaaaagatcaggaactgggtctgtctgtatttattacaattttatttatagcatccagctaagtgataggccttacagttgaagctcggtgaacaccgagagagagagagagagagagagagggagagagagagagagacagaaagaaagagaaaaatgagaatgaaagactgagaaggaataaatatgagtataaagaatatatgacttccaaaagactgaggcaaacataggacataggtatctcctcttttttttttttgagacagagtctcgctttgtcgtccaggctggagtgcagtggtgcgatcttggctcactgcaagctccgcctcccgggttcatgccattcgcctgcctcagcctcccaagtagctgggactacaggtgcccgccaccacgcctggctaattttttgtatttttagtagagatggggtttcaccatattggccaggatggtctcgatctcctgacctcgtgatccacctgcctcggcctcccaaagaaacataggtatctcttcttactacagatctgtagtagggtattgaagtattcagtctttatgaaaaatgtaataatactgttaaaggaaattatgaaagtgaaaaatgcatccttgtatcaactactctaagagagcaactatttttttctgtagtttttctgattgtgtgcktgtgtgtgtgtgtgtgtattttttgtttgttttgagacagggtttcactctgttgcccaggctggagtgtagagtgcagtggcacaatcacggctcactgcagtctcaacctcctgggctcaggtgattctcccacctcagctgtctgagtagctgagattacaggcacatgccaccatgcctggctaattttttgtatttttagtagaggcggggttttgccatgttggctcccaaagtgttggtcttgaactcctgacctcaggtgatctgcccaccttggcctcccaaagtgctgggattataggcgtgagccaccgtgctcagctgagacctagtgtttctgatgtttgtctaaaagcatattttcataaaatataattctttatgacattaagagactagaattagaaacaaaattttatgtgacaaggtttttttcctatagaaacagagttatcatttatagaaagacaaacttacaaataaataacttttaaggcattcaatagaaaggtaaatagtaggtgcattattagaacatattgtatactcatactttggcatctggatgcagtattacacacctgyttttgtatgtcagacgaacagtccttgtaccttcacattttccaggctgctgttctttggaagcctgttcccatttggaaataatgtcacaaatctagaaaggaagtggaaaactgakatttacagtacttttcaaatcaacattttttgaagacaagtgtgctgcagactgaaatttttcaattaatatgatcaaaccaaatatactcaagctttttgttttcagcctctgtgcggctctgagtttagtatgtaattataaattgctatttggtccacttatccttttggacacacattaactttggactgtggccacgcattttttactcaaaaaggaactgtaatgtaggactgcctgaaactggaaacaagaagattccagggatttttccatgatttggtcactgaagaagcaagtttttcaccttccgagttcaaaaagattttaataactaaagttataccaaagaaatttgacatataatttatggaaagagtctagacccaggtctagctatttgattttgggtaactcatttccctctctaggcctcagctttctcatttgcaaaataagtgcattatttctctaaggtcccttgtggttctgtaattctatttatttttttatttttcaaattgagatggggtctcactctgtcacccaggctgaagtacagtggcacgatctcagctcactacaacctccgcctcctgggttcaagtgattctcctgcctcagtctcccgagtagctgagactacaggcacccgccgccatgcctggctaatttttttgtatttttagtagaaatggcgtttcaccacattgatcaggctggtcttgaactcctgacctcaaatgatctgcctgccttggcctcccaaagtgctgggattacaggcgtgagccaccacacccggcctagttctatatatattattgccattactaaatggaagctctattaaagttattttactatgatctggaaaagattcttttaaaatccctcccttttcatttccacaggtctgttttctttctttcttcctttcttttctttttctttyttttttttttttttttgtgagacagtcttgctctgtcacccaggctggagtgcagtggcgtgatcacggctcactgcagcctcgacctcatgggctcaagagattctagtgcctcagcttccagagtagctgggactacaggtgtgtggcaccatgcctggctaatttttgtatttttagtagagatgggtttttgccatgctgcccaggctggtctcaaactcctggcctcaaatgatccacctgacccggcctcccaaagtgcttggattacaggcgtaagccactgcacccggacacaggtctgtttcctaaaccatttttcatttccagctcaggccttccctaactcccaatgctgaacttaaactctctctttctgtgcaaagttcacagcactctcaaaactttcatcactttcaaccctagttcaaggttatctgtgtataaagctgctcttccgtaagcaaattttaagttcactgtgggcagggactatttctggtccttttgtattccccacagagtccagccagcccctgggatacaataaaatagcttagtaagtattgctgaataaatggaaaaaaatggaaagccattttattagcacttctacatatctacccttattatcctaatacttagagtatcatttccattactaacacctttcctctctttaatatggaatgtgtatatgtagagattgtgtattaagaattctatgggtttaacaaagtcctgcattttttttttcttatcrtggagattagattggttaaagttttggaaaactcctgaattaaacttcttgcaaagtttactcttcttgtaaagagtagcttctttgctgttcgttgggcttggctcctgaaaaggacttggtttcaccttgatgtttccttgaagacaatgctctaaatctctgccagaaggatcgtcagtgaacaacgcaaatccagactgcgctggtttcctcattcctgtgtcctggttcaaagtattcaaaaattcttccactgtggtagatgcgtcaaaaccaactacctagacagaaataacaaagcagttctcttaataagaaatatatagtttcaaactgagattttaaggatgaaacagagcatacttgatgcatgattaatgataacatatttttctaggtgcttcaactttttttcccaaagctcctctggagaaaattaacaaagttacctcataaattagcttgctgaagaactcaaaaatctcagcttcagccaacagacatgaatccaaaatagaatgatcagttgacagctataaatattttgcaaagatattatgcttacccattagaagcaaaccaagaactatagtacaatatgcaatctttaatcaaatggaaaataaacaagaaatatgtttaaataaatgaacacctttatgtatttaatgtttgtttctttaataggcagttaagtatctgaattctgtgataaaaggcatatggctacaaagactaattgctagtttgggaacatgtttgcttcaattaataagcaggcatctagatctgagaactggaagggcccagtgaagttttcccagataatttctgagatttggagattttaaaagagactaaaattgtacacacccagtatcagtaattatttccacacctaggaggtgtactgatgggaaaaagccccaaccgaagtgttttttatttttctgtccatcagaatcayaatggcagtgaagcccatcccttatttggttcarwatggatttgttattagtgtgaatcctttatagcaaaactgtttcaaaactcagctgttctgatagtaaatctaatatatttgcatgtttgtcactgccaggtgctgacaaaagtaagcagagaagtctctgttccctataacagaggttgtacataggattgttggcyaagcatattttcatcaggtaacctacctggtatatcccattcatgaagtgcacaggtatactaaagggcaaagaatggtgataagggtttcggagaagagttgaaagaatttccatccttgagggtcttgcttctctgtcaccattttgttgcrttctttctacacaacgctggcagtaaatggcatattttccaaattctgtcctgtaatacaaaacttaagataaaatctaagaataaatttaattgacaacctaatatgtgcaaccattaagaaagcatccgtgtacattatcacaatgtattaggctaattttgacagtaactttttttgaatgataatactaaactgctgtaactttcctcaaattccaacttctttatttttgtaactgcctcactcaaacctccccacaaagcattcttcatctttactgtattattatagtcacaagctgaatttaaaattaccagtcacaagtcaatatacagtgawttaatattaacaaatataaagaaagcaattgcatgaagaatagtacagagtaacttataaaaacatgttacagcagaattctcttctgaagaacatggtggttaacgcttgaccactaaacaaggtaaaaaaaaaaaaatgtcttcaggccaggcatggtggctcatgcctgtaatcccagcactttgggaggctgaagtgggcagatcacctgaggtcgagagttcaagaccaacctggtcaacatggtgaaaacctgtctctattgaaaatacaaaaaattagccgggggtggtggcgcacgcttgtagtcccagctacttgggaggttgaggcaggagaatcacttggaccttggaggtggaggttgcagtgagccaagaacatgccactgcactccaacctaggtgacagagtgagaccctgcctcaaaaaaaaaaatcttcaaacaaaaataaaaatatgttttctttctttattctataaaaaacactgcatttgtgaaaaactgttaagcattagaaaaactcattagaataaataaatgtaaaagttggatagaaatcttatttgtccttgtttgttatacataaattttactgcttattcaagcagattgataacacctgtcaaatatgtttgtattcaagtgccctgtaggcagatccttggtctcggggctcctcagtgactgcaactgaaattacctgaccttggtcacagatgaccttgatcacagaggccccacaatgtattatgaactgtagaatattttcctattgcttccaagttgggtttgtttatttgtttgtttcttttactgtgtttgctttagtccaagagtttaagcaacctgacacaaacctcttggtggacaaaatgaccctggataagccttggctgagtgacctgggtcccaatgtaagaaagccattctggaagttgaactttaaatgtgtttttcaaaggagtaacaattctgaagtaattcaaatacatacaattagaaaaggagggaagaccatgggggaaatttttcacataaaagaattcaatgtgcagagaaatagtaaaagggaaaactaaggaaacaaaatagttgcttttattgaatgaacacccactaatgctaagtcattcatacttgaaatgcaaatgcacttttcacttaaaaatattctctgtcagtttttcaagtatttattgcaatcttccctaagagatttaacataacaaaggaaatattttcctagctccacatcaatgataaccaaaggcttcctgtaccaatatttgtttcatacattcttctgaaaatgtacctggcagatcgttaaatacttatgayttatcgtagactttcagaggycacataaacagttcagctggctagtattctgcacacctggaatctgcattcytctttaggtgaagcctgaggagccacaggaaaggatgatggggaaggaagagcccaacgcagagtgccaagagctgccagccctgggcagggagaagcaccacaggttagataccaygtgccagtcagagatccacatctgartgagtgcaatgggctgatgacagtctctcttaacccaaaaacgttttgcttctttcacatatgcatgatctgtttacagcatttatcataggttaaaaacaaaaaactctacattgggtcagatctatgatccatctagttgtgtgtatggttatctacaactgaggaaccaaggcacaagcagacaaggtgctcctttttgacgttacactcaaagattaggaacattgtttcttttttttcacttacgtatttactcattccttgaaatacaagtaatagttttgagaaacgcagattgcagaacagtagaaaacacatgccctaaatcaaaaccaatctacctacacacacgtatgtatctacatacctaaataagggacaagtataaaaatattaacagaggttatctttaggtagcagcaatatatgtgatttttatttttccttcgctctgttctgtattctcctttctatattttttcaaggaagtataaaacaygttacagcagaattctcttctgaagaacatggyggttaatgctcaaccactaaacaaggtacaaaaagtcttcaaacaacaaaaaaatttttttaatttctttatcctataaaacactgcatttgttaaaaaatgttaagcattagacaaactcattagagtaaataaatgtaaaagtaggatagagatctcatttgcccttgtttgttatatataatttttcagtcatttttaaaacgttatattaaaaaagttggatagagatcttatttgcccttgtttcctatgtataattttcagccatttttaaaacgttatattaaaaaagagggagaaataggcattgtccctgcccttaaggaacctacagtctagtaggagacagttatatatttaaacagtaaattataatacaacatggtaataccacgtattaactttttaaagcataaccaatggaaggaatgactaacttcttgtggagtcaaggaaggcatcacagggaatatgttgcttaggctggactataaagtctacggaagggaaggaagaggagggatccaggtaacaggaataccatcaggtgcatggtggagaatattgcaaaggtggagtgtgtttgaaggatggggcgmatttattcattcactgtctgctggaggcaggaagtggagaaagagcgggccagtggagccagatgacaaagtgttcttgatgcagatgaagcttaagcttcagattccctcttgggcacaggtcctgggaaaggcttattaactgtgtttacatggtcatatgatttctaaaatgtgcaaaagtaatccattttcaagtctttgtcttaaagagcatttcccaaactgtataagcttcggtctcacaaaacctagatccaaccccgacagtcctatatgctaaggtaagaaatttctgatttatcctgtggctaacaggcagtcaatacacaaagataaaaacaggtgttcattgaagagtaaacacagatgactaccaaacacctgaaaaatatattcaactgcactaataaagaaacgcatcctgagtcaatagtgaaatatttttttttgcctggtaagaatttaaaatatactgaatgttgttgaagatataggaaaattctaaaaatgaattcaaaggaattcgctggacctgtccacaagatttaggttcctggtgggcgcggtggctcacacctgtaatcccagtactttgggaggccagagcgggcggatcacctgagatcaggagttcgaggccagcctgaccaacatggtgaaaccccatctctgctaaaaatgcaaaattagccgggagtgttggcacatgcctgtaatctcagctacttgggaggctgaggcaggagaattgcttgaacccgggaggcggaggttccagtgagccgacattgtgccattgcactccagcctgggcaacaagagcgaaactccatctcatttaggttcaaagatgtctactgcagaggtatttattataggaaaaaatatagaaatgtatcgtacttaatgttaacatgaccattaatgttttgaagaatgtctaaggatataggggaaacgattattttctatagtttaaaaaagtagtatgcacactgtaactccagcaatataaaaaactgtgagtgtacacacaccaacatacacacatttatatataaacatataaataaaccaaaaaggtagacatcaaaatattaatacytatttttccttctgcactttttgtattctccaaatgtctatgctgaatgtgtatcattcttacaatcagaaaaraaaacactttaaattgcatgtatatgtatcaatattaatatctacctgcaatggtcctggttgattctgtggctgtcttcgtcttgtctgtttaataagctgacagcaaatttcattctgcagctcaggatgtgtcaggcagatttgcaaagcactctgggctaaagatatgtggtaatcaattgcaggagagtcaactgcagcatttataaaaagctggcaggtctgaattaaacaaaaaaagatatattcaaggtgaggagtgattagatttattctgcatgaattatatcgaatatcttttcagcagtagtttttgtttaaaatgatggaaaaggatatattatgataacactaatsaaaagaaatctggaatcgccacaataatagcagacaaagcagatttcagagcaaggaattctgccagagataaagagggtcattttataatgataaaggggtcagttcatctagaagacataacaatcctaaacatctacatacttaataacagagcttcagaatacatgtgaatctcatccagcatatttttcattttagtcactgcatttttcatctctaaaaattcaatttgggtctttttaatatcttctcttactcttsttaaaatgctcatgctttcctttaccttcctgaacatgtgaagtgtggtggccaatctccaaagtggtcctccrtgatctccacatcctgacattcagatccatagttaattccctcctgtattctaccagggttggtctgtgtgactggtagcatgtggcacgccatttctaagattagcttataaaaaacaatgcacttccatcttggtcactctctctctttccccgttagatcatttccyctggggaaggtagctgccatgtcttgagcagtcatttggagaggcccatgtagtgaggtactgaggcttctttgccaacagccacgtgagagagtttggaatcctccagccccattccaatcttcagatgcctgctacccccgctgacagcttgatggtaccgccaggagactatgagtcagaaccacccagctaaactgcttctagattcctgacccttcaaaactgtgtgaaatagcaaatgttgtaagtcactaagtgttggggaaattttaaatgtaacagtagacaacagatacacagaaatgtccttatctaccatcacctgcatcatttctagatatgtttctatgattactttttcttacccattgtattgtcatacttgacccgattctctgtatgcctggtgatctttgactggatgcagacgttgtgaatgttatactcttgggcactggactttttggtatgctttaaacattttttagctttgctctgagatgacagttaaattacttggaaatggttcggttcttccaaggtctgttttaagtttcttagggtggaccaaaacagccttacatttaggactatctgggccccattccagaggcaatcaccttctgtgcactctatttgatgtccaatgtatcaaagatttttccattctagaagatgggaaaactgtttccagctctgtgtgagctggaatttttttgcctgtgtctttctgtcctcagcctcaggtactttccgcacatacacacatgcttatcagttctcagatgaaaacacgaatctctggagctctccctccctccctctctttagctctctcctctcagccctgtgattgattgattkatttattttttagacggagtcttgctctgttgcccaggctggagaacagagctcagcgcaacttctgcctcctgggttcaagtgattctcctgcgtcagcctcccaagtagtgagattacaggcaccaaccaccacaactcgctaatttttttatttttagtagagacagggtttccccctgttggccaggctggtctcgaactcctgatctcaggtgatacacccacctcagcctcccaaagtgctggggttacrgggtgagccaccgcgcccgatcagccctgtgaagtctaactaccttggccttctcaaattctgaactctgtctccgtgactcaggaagactgccaggctctatttgggtgctccctctctgcacarcagtcttgaatctctccagacagtaagctgcarcaatcacagggcgtatgtcattagttttttccgaagaatctgtcctacactgcctacattcaacatctgaaaaccactggcagggcaaatccagtccctgtggctccatcatggcccaaagtagttcttcctttttatcttctaactggttgttgcttgcacacataaaagcgtttgttttttgcttattttgtacctctcactatcttatcaaattctctttttgtttgtagtagttttttagtttgttcttttgggttttctgggtatacaaatataccatctgtaaatattttcatttattgcctaataacatcggttagttccctaacagaatgttaaataataataataataacaaactttatgtaatttatactttaattgaaaaatttaaaaaataatggggcatatctttgtctttttctcactttagtggaaatgtttctaaaatttctccataaagcatgatgcttgcttttagctaaaacaagaatattttatcatgttgaagtatctatgtattgctattctataaatgttaaatttgtcaaatgccttttcggcatctacagatatgattatctccctaataataagtaatattaatagatatcccaatacttagccatccttgatttcctagaataaatccctttcagtcataatttaatattttctaacattaaaaaatgttattgacacataatagctgcatatattattggagcatatgaattttttgatacatgcctgcaacatgtaataatcaaatcaagggaattgggatacccactacctctaacatttgtaatttctttgtgttgggaacattccaaatcttctcttctaagtattttgaaatatactctaagtccttgtcagctatagttgccctactgtgctgttgaacactagaacttattcttcttaaataaatgtatttttgtacccattaaccaacctcctttcatccctccaccccctactacccagcctctggtaaccaccattctattttaccatctacctctatgagatccacttttttagctcccacctatgagtgaaaacataagatatttgtctttctgtgcttggcttattttacttaatataatgttctccagttccatctatgttgttgcaaatgacagggctttgtttttcgtaatggctgaataatattccattgtgtatatatactacatttttttcttttttttgagacagagtcttgctctgtcacccaggctggagtgcagtggcacactctcggctcactacaacctccacctcccaggttcaagcgattcttgtgcctcagcctccctagtagctgggattacaggaatgcaccactacgcccagttaatttttgtatttttagtagagacaaaataaattttgtatttttagtagagaccagcctccccatgttagccaggctggtctcaaactcctggcctcaagtgacctggctgccttggcctcccaaagtgctgggattacaggcctgagccactggcccggcccatcattatccattcatctactgatgaacacttaggttgattccatatatcggttcttgtgaacagtgctataataaatataggaatcccgatatctcttcaatatactgacttactttcatttggatatactcccagtgagactgctggatcacatggtagttctatttttagttttttgaggaacctccatactgtttttcaaagttgctgtactaatttacattcccaccgatggtgtatgagttttcctctttctctgcatccttcacagcattcgttattttctgccttttcgataacagccattttaactggggtgagatgatatttcattacgatgctgatttgcatttccctgatgattagcgatgcttagcatttattcatatacttgttggccatttgtatgtcttcttttgagaaatgtctattgagatcttttgcccattttaaaattggattatttgttttttgctattgagttgaatgatttaatattctttaaatgatgctggattctaattgctaatattttattatttttgttcaatctttgctgcattctcatatgaaagcaatacttatttaacaaagagaatatagtgatataatgactgaggattgcttcaaaataatccaaagttagggtgcagtgggaaatgggagaataaaacaaaattggccatgtgttgatgactgtagatctgaaagatgagtactttaggcctcattgtaatattctctctactcatatatgttggaaattgtcccaagtaaaaagtaaaagaaaaaattgaatttagaaaagttccttctttttctatgctttgggacaatttaaacagcattgaaattatctacacgtaaagtttggtaaactcctctgtttagattttcattttcctgtggaatcaattttggtcatttatattttcttataaaattgaccacatcatctagattttcaaatatacttgtatagtctttcttgctttaggtattggtgtactctacaggtgggtatttttaaacattccattatagaaattttaaaaatgtataaaagtagagagaacagcataataatcacccatgtacccatcacccagtgtcaataattatcagcatttttccaaacttcaccacctccccacctctacttttttctcctctggagtattttaatgtatatcataytactttaccaataaatacttcaggctggatctccagttgataaagattttttytatagccatccatgaccccacaaataacaataattccatattatctaataaacaaatagattttttgagatgggagaaacttaggcaagacaaagccaaaagaaagagatggagctccaagagactagggaaaaatgaagtaccaagatcctggtgtagagtccagacttggaaacacagaaggtccaccgttatctgaggctggaggagtggaggagaaagggttgtctattaagtggagggatttttttttttttttttttttgagatggagtcttgctctgttgcccaggatggagtgcactggtgcgatctcggctcagtgcaacctccatttcctaggttcaagtgattctcctgcctcagcctcccaagtagctgggactataggcgcatgccatcacactcggctaatttttgtattttttaagtagagacagggtttcatggtgttagccaggatggtctcgatctcctgacctcatgatctgcccgcctcggccttccaaagtgctgggattacaggcgtgagccactgcgcccggctgcaaggggagggctttgaggtggtcatgtcatgtctgatgtcctctaattttctcagtgaaatagaaggtaagtttctctgctgtattcttaagtagagagtttgagggggatgtgaccaaagacaagcacaaggcagaaagttggctgtgagagaggaagaccctgaatttttattggcgtcagactacatggctgtttgatgctctgcagcattgcacatctggttatactggcagcagaaaacatagcactgatctaggttgggatctggctgaagagtacatggaattatgggtcccaaggaactacaagaattaatagaaacaaaccagactagataaggaaggaagaaaagccaggacgcagttatcatgatcttaaaaaaagctaatggttcaaaacaaaggtcttagagatgaagaaaaagtggaagagtaaaaaaatataagagcttgtaggctaggattctggttaaagaaagagatgttcgaattgaagcttttagatgtgacgtacttgtgaggaatggtgaagtcaggtgtggacatggaaaatgggatgatgaaggaggccagaggtgaagcttactggaatttagaaggtcaagaaacttaaaatcatggcattggtgagtgaagtgataagagtcatttgcaagacttcaggtagagaatgtgagttgggagctaaaattctttgataattttttttttttgagacttattttcactcttgttgcccaggctggagtgcagtggcgtgatctcagctcactgcaacctccatctcctgggttcaagcaattctcctgactcagcctcccaagtagctgggattacaggtatgtgcctccatgcccatttaattttgtgtttttagtagagatggggtttcaccatgttggccaggctggtcttgaactcctgacctcaggtgatccaccctcctcggcctcccaaagtgctgggattacaggagtaagccaccacacctggcccttaaagaaatctgaagagttactggaaggtaactgatgatagggatagaaggataaagagtgcgaagttgcatggcaagttttgagtgattagggatttctaatagagattgaggaataagaaattgagagtaacactagagaggagagagagtgctgacccctctcccattgctgtgcctggtgtgatgtggaaaattagaggttaaaggggaaatgattcatctgataccaagtatttcacattgcccaaaccatacacattaatagtttatttcagtaaatcccaaatcctcactaagaaagcatatgaaattcacctaattttatttcaatgatattcttaataataaacacattttgaattttcttggagtaaaattttgtaacccaaaatgttatttttaatttttttccaattatttaacaacatataagtattttaccttaaatcatttaacaacatataaatattttaccttaaataatttaatagcttctgtctgsagggcttcggaaggtagagttgtcagaggggaaatgattccttctttactgtgacacaaagtggggtgtctccatatctgagaggctaaatgcagaataaaatatgaacagaaaactgaataaaccacttattgtggcctcttattaaattaatcctttagacattagctcattcaggcttggctcacaactttaagtcacaaaggtcagaaaaaaactctttggcaacattattttattttggtagccaggtcattgggattctcatgttactgttttttgtgttttgttttttttaattttaaaaatttccataggtttttggggaataggtggtatgtggttacatgagtaagttctttagtgatttgtgagattttggtgcacccatcacccaagcagtatatactgaaactgatttgcctcacccccttcccaccctttccctcagtccccaaagtctattgtgtcattcttatgcctttgcatcctcacagtttagctcccatttatgagtgagacatgttcctgttttggataatctagaagagttgggtcctaatttactaggctgcaataagtctaccagggcactatcacgttgcttaaatgtgctaaagattggtgacctaggtagggggcatgactatatatgagaaagagctggggaaagatctagaacttctctagagaggagaagccaaagtagaaagagatataaagataaagaggaacttgaaggcattcctaaaatcaacatttattaaattcctgtgttggacacagcaaataaaatgtggtctctcttagcgtataaagcataggatagaatctagtctctcagtgggggaaccttagccataaaaattcatttcaggccaggcacagtggctcatgcctgtaatgccagcactttgggaggctgaggtgggtggattacttgagctcaggagttcgagaccaacctgtgcaacatgaagaaaccccatctctgccaatgatacaaaaattagtcgggcatggtggtgcatgcctgtggtcccagctactcaggaggctgaggcaggaggattgcttgagcccaggaggcagaggttgcagtgagcggagatcatgccactgcactccagcctgggtgacagagtgagactccgtctcaaaaacaaaacaaaaacttaatttcaatgcaaaactacaaatgctataaatcttttggcttccctgggccacactggaagaagaattgtcttgggccacacataaaatatataaacactaatgatagctgatgagcttaaaaacaaaaaactcacaaaraaattttgtaatgttttaaraaagtttatgaatttgtgttgggccacattcaaagccatctggggccacaggccacctgtgggttgcaggttggccaagcttgctataaaagaattaagtgacaaaacgcattaggacataattttaacattgatgaagcaccttttatgagccagatgctgagctgcagagggctggctgggggatctcctaaggctaggtggggtttcattatgttggtgaggactgccaacgaagggggcattccaagcagaggagcagtggaagcaaaggcagagggaggtgacctgacacagactaatgaggaatgatggtgtccctgcagccaaagagccacagacagaattctctcccatgatgagcaaaggcaatgaaaaggtgggtatatttcagggaaacaggaacccattaagtgaaaactccattaggctaagcgggttgaggtccatttcattaaccataaagctttatttatatgtttatgaacttacaaggctccccgtctatatttagcaatttgcaaaccagttgttcaaattcagatccaacgtttacattgttgcttccagctgcaacagtcagatgataaagccaagtgtccttaaaaccagaacatattaattaaatgttaagacacagttttgattaaagaaaaaaaaacaacttgcataaacagtagaaaactttgagatggaaatgaaccacttgctttaatttttaaataataatgaaaagccatttattcaaacaattctgaggcatgctcacttgaactgtgtttatattaccttttcccattatttacacttttcttattcagatgcattttagaaaagcatgacaaaattaagacgagtaacacatgttaagagactaaatacaaccagctgatattcttttacaaaataaataaattctattaaattaaaaatctggctcccagagtgatacatacagaatattttggaaatccagaaaatttaaagaaaacataatacccgtcttatcccattcaccaaagattcctggtctttttttctctatgataatatatatgtagattaaatttttacatagttgaattattctgaaagtagaggataatttctgaattttagtaatatagtacaagcactcccttgttgctagaaattctttataaacaagttttaatggctgcaggatattctactacacatatggacacaccatatttatttaatcaatttcttattgctgaacattatgatggttactaacttctcactgataaaaaatactgtgacagctatcatctgttaactgaaaaggaaatgttatattttccatctttaaaatacttcaaaaataaaattattttaaaaagagtattgtaggccgggcacggtggctcatgcctgtaatcccagcactttgagaggccaagccgggtggatcatctgaggtcaggggtttgagaccagcctggccaacatggtgaaacgccgtctctactaaaaatacaaaaattagctgggcatggtggtgcatgcctgtagtcccagctgttcgggaggctgaggcagaagaatctcttgaacccaggaggcggaggttgcagtgagccgagatcacgccactgcactccagcctgggcaacagagtgaaactctgttttaaaaaaaaaaaaaaaaagagtattgtgttgaacaaactatacataaatttttggctacatttactaacattttctttttctttcttttttttttttttttttgagacagagtcttgctctgtcacccaggctggagtgcaatggcgcgatctcgattcactgcaacctctgcctccaggttcaagtgattctcctgcctcagcctcccaagtagctgggattacaggaacctgtcaccacgtccagctactttttgtatttttagtagagatggagtttcaccacattggccaggctggtctcgaactcctgacctcaggtgatccacctgcctcggcctcccaaagtgctgggattacaggcgtgagacacagtgcctggccaacattttcttagtatatattttttgaaatagaattatgagtcattactagggcgagaaaacttttaggaactcttgaaacatattttcaaagtactttccaaagcatttacactaatttctattctcaccagtggtatataggagtgcttccctcctcatagcttcactagcataattttttaaatctttgataatctcagagacaataaaagctttatcatttttaaatgtgcgcatctttgattacagatgagcgtaagcattcattagccattaaattcctcagtaagttgttcatcaggccctctttccatttttctactagaaacatagtccttttcaaatcatatgagaggtagcagaggcaagtgttcaggaacacaggctctgtggttagagataggggtctaatatcaactctgcctcttgccagatgtgtgaccacaggaaagtgcttcagtctttccatctataaatgggaataaggtcacctcccacagagggtaattggaaggatgaagaagagatatacttagcacttrgcctgatacatgtgctcaaaaacaatgatcaatagtaacaataataatctataaagagttgtttatatgttaaggatacagtagccatccatgaaatattttgttttctgtattatctttttagtcatatttatgataatatttgacataaataattatttcaattttgtatagtcaaatctatcaaccatttgcactctgatttcttacactgcctttttgtttttgttctttttttttttgagacggagtctcgctctgtcgccaggctggagtgcagtggtgcgatctcagctcactgcaacctctacctcctgggttcaagtgattcccctgcctcagcctcccaagtagctgggattacaggcacacgccacctcgcctggctaatttttgtattttaatagagacagagtttcaccatgttggccaagatggtctcgatcttcctgaccttgtgatccacccgcctcggcctcccgaagtgctgggattacagacgtgagtcaccgcacccagcccgcccttttgttttcttagaaagtacttctgattcagaactcagataaaggcctttttaaaaaataatttcattgaattcttttaactctttaaattctggaaattattttgctatctgtatgagatgaaaataataatctggaaattattttgctatctgtatgagatgaaaaactaatgtttcctaagtagccaatttcctcaatatataagaaatacataatcatatgtattgaatgatatattacttccccattaatttgtgatacctcctttatcataaatgactacatgtacatataatacataaaataattaattttctactgtatctaaggccaaattttattaaaaattagtcaaaaatataaaacagagtccttagatttaccaaaaaatgttcaatctgagagatccacatttttaacataagttcctttagccctccacttccacgcactaatttcagccttgataccactcttaccaacaggattagaaaatgacatatttgaasraggctcatttccagggaggtaaagaatctctgaaaacagaggtgaaagtctatagcaaaattttcttccttatttccattaaattgayttgataattattaccaatatctgaataatattagtctacatcattctaaatcaaccaataagtctttgaataccttttcatgcttggatccaattaggaggtaagttggaccttggtctttgggatggataacgatagtataatgtgtggataacagacttcgtccactggcttcataatcttcatctgaatcacaagatctgtcaacctcttccactttagcctcccagagtttgatctgacctaaaggaaactaaagtaaatattagtaattgtgaggaaggcattttctaaatcttttcctactaaaacatttcatagtccttttcatttttaaatttataaagcatacctttaaaaattttactttattttttattttccttttttttttttttttgaracagggttgggtctccctctgtctcccaggctggagtgcagtggcgcaatcagtaacctcactgtaaccttgaactcctgggcttcagggatccttccatctcagcctcccaaatagctagcactacaggcacatgccaccatgcccagctaattaaaaaaaaatgatttttttttggagatagggtcttgctacattgcccaggccagtctcagactcctgggctgaaagaatcctcctgcctcagcctcccaaagtgctgggatcacaagcgtgagccaccgcatcagyataacatacctttttaaaaatgatgcctagaggcaatttgattatccacagtgtaacaaaagtagtggcaacaaccaaagagcctaaaagtaatatgaaagaaccatatacatattagagatttaacttctgaggaaaaaacaagatgctacttttatgcagtagttcagatgattcagctgtactaaaattcttataggaggcagaaagaaattatttagatagacagttagggtaaagcaagtccccagcagaaaactttcctttttaaaaamgcagctcaaagatagctccttttytaaccccaggcagttcaaggaaatcacttctcttctaacaacaagcagcctgaaagagcagacagtgaaacacagataagacagcttcggcacagaaggaggggggaaggtctcctgggtaattaccaaactccacacttgtacaatgggccccccaataaaacagtgggccttaataagcacattcttttccctttggacacactaagatagagaagctaaaagcagactagagggggtgcctacagctgcaagaagatggcaacaaacacaaactctccctcccagataagcaggacaaagaaacacagactaacagtcagcctatgtggttacggaatgagacagagctgataaaaaaaactctgctctgtacagatagcacacctggttccaactaaaccatcaggaggataagatatcccctccttacaagctccctcctcgctagcccatttataaaaaccctgacatctttactacaaattggcaacccactcgggacccttctctgtgatggagaggtgttctttccttttgcactatctactaaactcctgctctaaactcactctgtctgtgtgtgtccatgacccagatctccttgtccttgagaacaagaactttggtatttaccccagacaatgaggctgcttcaaaatgacccattatttagttaagcaactagtcataattcaccaaaacagtcatttgacttttttatcccacagaattgatcagcaatttgwttaagttattggatcaaaaggacaagtgtatacatagtctcaaaactgctyattgaaaagaaaaatattgttcctagaaaaaataacaagattagataggtagtgcaaaacgaactatcatcccaaatgccagtaaaggaggagcattccaaggctctttgttatatatcacaaaacaataccatgaatttctccatcttaagggtaagaaaaacttcctaaagccaatttatattaaattttatctaagcttttattgacaaaaccaactatatctggtgtgttgaatatttggcctatctgttgtaaaacttttgctctaatttagtacctttattccaggaaaatacacggtctgcatcagatttataacttctaaaatatttggccaagtttgcaattggagttttgaaaaagttcattctaactacaaggatatttacctcacacgtttacatgctaagtttcagggctcagtgctggagcccttcttccatctatgctcactctctgggtgacctcatctaagctcatggctttaataccagcatgttagctactcccaaatttataactccagactcactaactctacttagatgttggatagcatttcaaacttaacagcatttcagacttaccttggtaagtcctccttgacaacctgctctgcccagtcttccccatctcaagttgttggcaatgttacttttctattaatagctattaacacccaaaaccttggcatcattgcagtctctcatactgacttttcagtcaataaatcctgtcaacaagmctttcaraatctatctaraatctgttcatctctcacatgtccacagcaccactaaaccacaatcccctctcacctggattactgcaatggctcctaacccatctcctccttattccctccggtctattcttaatcagcagtcggcgtgtgcctgttagacacaggcaagatcatgtccctgttccgctcaaagccctccagttgtttgtcatctcactcagagcaaaagctgaagggtggcagaatctgccaccccaacagatatcactttggcataagggttattttgaactaaaggcatttttaaaarcagcaggtgcaagaagggtgttctgaccctctgcgttttcttcccaaaggcaggagggaacctgcctttcataacgcctatatgaaagatatcctccctttaccagaaggaaagtaagattcttgtcaagatgggaagccgaagcctggggaaagttatacaaacaacccttgttaaacttaatcttatcttcctcctcacttctccacccaagtaactaccccagcccaagtctctttgccttgtcacattttcacaatttactacactttgtccagtttggtgtataagtgttcacctttatgtcttggagtcttcattgccttaggaagsctcctctgtgatgtaaaacttaaataaatgtatatgtttctcctgtaatctgtcttaatgtgaatttaattctcaggcctgccaaaaaccctaagaaagtagaggtaaaatttcgcctctcctaaaaagcaagcttttaawaataggatgaagaaaacaaattctattaatactatgataatacataacaatactaacctaattgtgtactttaggcacaatsatatgaaaatctaggtttcatccaccctaatatttaaagatggttattcattttaccaaaggatgcaccatgccttgataagcagcaaacagacctagtggtttcaaatattttgatttaataaaaaaagacattgatacagattaaaagcaaattcttttggaaatatttatagcaaaaaatgaagtaggcctataatgattcacatatattctcaatacttttccagttgttataatggatttctgtttatgtatccattcttctgacttgtttcttctgtgatcaatgctatccatttttattaaawtatttttctatttataaaaacacatgcttattacagaaacttggtaagtatggaaaggattttaaaaagaaagaaaccatccatattactgtgatcacagataattattttatttagatgtgtcagactgagatttataaacttggccttccaatcaccatcctctaagatctcataattacagaraaattgggaactgtatttgccagaacctccttccctgttatggttcccagttagagtttcctgtgagagaatctacttgaagtttagaaggagagggtagaagagttgttattctcctgggactacggtggctgatgttggggctcatgtaagattcactgaagcttcccagtgaagcctcgaggaccagctgccttcagtcctttggccagaaatcttcagtgttgtcttctctgaccttcattggcagtttccctaacttttaccactcccatacaacttttytaaaagttatgtaagttataaaacttctytaatatttacgtatgtccacaattctatattaacatttttttttttttttttgagatagggtctcactctgtcgcccaggctggaatgcagtggtatgatcacagctcactgcagcctcaatctcctgggctcaagcaatcctcctgccttagcctcccaagtagccaggactacaagcatgcatcaccatgcctggctaatttttttttttttttttagtagagactaggttttgctatgttgcctagggtggcattagatcttttacacctgtaacacgtacagtggcttctgttttcctgactgatgagttaggattacattgacagcacaattttgtattgtacatattcgggtagcatttgtatgtcggcattttcccacactacttcagagattgtttgtttgtttgtttattttgagacagggtctcatcctgtcacccagcctggaatgcaatggtgcgaatcacagctcactgtaacctccaccttctgggctcaagtgagcctccaaccttgatctccctagtagttgggactacaggcacacactaccacactcagctaatttttaaattttttgtagagacaggttcccactatgttgtccaggctggtctcaaactcctgggctcaaacgatcctcccacctcttggcctcccaaagtgctgggattataggcatgagccatcatgcctggcctcagtattgtttttaatggctgtactgcgttaatctctaccccattagcaacactgagtataacggcatgtattttaaatacagctggtcagacctgagagtgtaggctatcaaaagggaaggagaaatactaactgtcccaygtggtcactagaccaagaagtttagtctcattaacacagtaacagtcacaggctgctcttcagaggagcagtcatcattatgttatacaagtactcgtggcccatgttggttcaatttttatagcttcagttatccaaaggtgacacagaatacccataatgatgactgggcatgcgttttacctttgggcagacaccccatctttttattctgaaatttaaaataattcarattcttttggggaggggattagtttaaacattaataaacagaatataaacaggcagatggatgggtagataagcggtattcgggaatttgagggcttgggacaraaatagattccttttcctttttaggttttctttcctaacttgctgcttccttctatcaaccttatctggtctgtaagaacctgggaaaatataaraaactgatggttgyggggagggaatagaagaagactgttctaggtcttagaagatgcattaattaaaagttgctaaggcttgtaattaaraatcaagacccttgtaggtgtaggtgatagacctttgtgtgattttctcagttgcaccaaattataccaaatttcaacctcataaagattctgaagttttacaaagtaagagaagagagaaaaggaaaagttyaagccctaacacacaaaaagttacttcaattggcatattaaaaatacatacataccttatcttcttgactccgaaaataatataatgtctttcctattagtgtacaccagactctcttggaatatccatgttttacctgaaaccatatttcaatgaattacaagtttagcccagaactctgacaccttaaattatagcttatacaccctatttgagtttctataggcatccagtttgcccagatataagtgatattccaaatagattgtccagtgctgtttaagatgtacctgtcacacattgagcacacatggacataaatagggaaacaatagacactgtggactagcagggtagagggcaccggggtggctgggttaaaaagctacctatcgggtactatgctcactacctgggtgatgggatctgtactccaaacctcagcatcatgcaatattcacatgtaacaaacctgcacgtgcaccccctatatytaaaataaaagttgtaaaaaaaaaaaaaaagatttacctgttaacagtagtagaatggcaagttttgctttggtgctcaccattcaacatacaacgaatgtttactatgcatcaaacactatgcctaggacygaggtttcacagatggataaagaagggagtggaggggtggattatgggaaattatgtaatggggtacaatgtatgttattacgagtgatgggtatcctaaaagctctgacagaatcactatgcaatcaatgcatgtaatagaattccacttgtaccccatgaatgcattaacataaagaagagaaagtgcagtttcaccagtaagtatatttcatagtttccacatttcacagatttccaatagccatgtggctctctaggttaacactctaatgtcaatgcatgtaacagaattgcacttgtaccccatgaatgcattaacataaaaaaagagaaagtacaatttcaccagtatatttcatagtttccacatttcacagatttccaatagccctgtggctctctaggttaacactctaacattagaagtgagaagatgaaggctgtgcgcggtggctcacgcctgtaatcccaggactttggaggccgaggcggtggatcacctgaggtcaggagttcaagaccagcctgaccaatatggggaaaccttgtctctactaaaaatacaaaaattagccaggcgtggtggtggacatctgtagttccagctactcaggaggctgagacaggagaattgcttgaaaccgggacacggagtttgcagtgagcagagatcacaccactgtactccagcctgggcgacagagcaggctccgtctcaaaaacaaaaaagaagtgagaagatgaaaacctgaagaattctagtaatttcccaaatgtaaaagattcattcattcaaaaacatttgatgccttcttagaagtaatcatacaaagtaataaaataatgttaaaagctattactgtaaattgagtacctcctgtatatcaggtactaagttaagtgactgggacagaatttgaatctagctcttaactttgaatagtcagtaagtgatataggccctggagtaacagatttgaacaagatacagtctctttctcgggaactcacagccttgtgaagaagacagacaattaaatcagcagtatgttaaatattttcatcaagagtgcagaggctcacaactgggctgttgtgagaaccaaatgagaaaatgtaaataaaggatgacagtagttactcaataaatgcttccgtcctcactatgaataaaaagtaaaacacattttcttttaaactcataaacccagtcagcctttgggctttcaaagctgtggtttaagcaaatgagtaactccaccacctaamggtttgatggatttagaatgctgtttgagagaaaacaaaaaatgtctcatttgagacatgtttcaatttaattaaatttagaaacatatttacagacaaatatcctggaagctttaaatagcgctgtgtggggtgtttttttcttttcttcttcaaacaatcttcagaaagaagtctcataaaaactgaagtataatgcatctggctatagacagtgtacttctgaaatgatttatctttaaaagagaacaatgtatgccttcgaagaaatgcaaattaatgaagacctttgccaattcactgtaaaagctgtgttttaacaatctatctttatacataaatcttgtattagaatttttttttttttttgagacggagtctcgctctgccacccaggctggagtgcagtggcgccatctcagctcactgcaacctccgcctactgggttcaagtgattctcctgcctcagcctcccaagcagctgggactacaggcacgtgctaccatggccagctaatttttgtatttttagtagagacagggtttcaccatrttggccaggatggtctcaatctcttgaccttgtgatctgcccgcctcggcctcccaaagtgctgggattaccactgtgagccactgtgcctggcctagaacttcttaaatctctgacttactctttaaaaaactagaaaacaaattatactggaagaatcctcacgaaaatttaaaggcaacctcaaatctcaaggtgaactaattaaaagaataattttttaccatgcttccatgacaaaggtagtttctattggttttgtttgaaatcttgaagacaaacagtatatcatatcccaattagcccttgccactgcacaaaccataagcccctatggtattctctccttccccataagcccatccctgtagcattctccaccacaaatcctgccaccagccttgctgacttcactatcaaggtgaaactcttggatgataatagctagcattttttggtgtgtttatgatgtgccaggcactgttctaacacaatttatatgtttaaataattcacttaatcctcccaataccctgtgaggttggctctattattatccccattttataggtgaggatgctaaggcacagagcctgtaagtaacttcttcaaggtcacacaggtggtaagtggcagagccaggacttgtgcccaggcagtcttgttcccatccttgcccttgcctcttggccacactgtctccacawccttgctctcttcacttccagtaacctttgctgtccctccacttttgccacccatcccctcagccataccctaatcctttttccttcactgggaactgctccacttctgcaatttactttctattctctgatcacaacttcctcccaattcctcccacttccctccccctctcacttaccacactcctattcttgggtttgtttgtttgtttgtttgtttgtttgtttgaggtggagtctcactcagttgcccagtctgaagcacagtggcacaatcttggctcactgcaacctctgcctcctgggtttcagtgattctcctgtctcagcctcctgaatagctgggattacaggcatgtgctgccatgcccggctaatttttgtatttttagagaagacaaggtttcaccatgttggccaggctggtctcaaacttctgacctcaggtgatcctcccaccttggcctcccaaagtgctgggattacaggcatgagccaccatgcttggcccacactcttgttctttacctcattcataattttaagccccttgatccttccattttattctagcttatcagtcccctcctggccccatgtccttctctgccaacttgggtttccatgtttgatcacgaaacaactcttgctccagggcctgtgattatgctgtattcctttgcttctaacaaatccactcaacaaaattccatttgcttttaaataatctagtgaagaatgtgacaagagacagatggttataggaaataatattagccataattaataactgttgaaactagatgatgaatatatgagggctcattatattattccctctattttcacatacattggcaatgcccataataaaacattaatttcaaatatcatcttgaaagatacgtggtaaagcaagtaaaatgttgattgtagaaacaaggtgatgggcatatggttgtacactgtaaaattattctgcttttttgcatatttgaaaatttatataataaactgttagaaaaaaccactatcctcacttcactacaatgtaaattctctgctcctttttctgggcatctgaagatgttagagaaaaatattcgataaaaactcaaatcagaaagtctggtgggccttcaataatacttaccaagccttctatttatccttgggtacatcctactttcctgaatgattattctccacccttttccccactcttagtaaataacattgtcgtacggaataatgttcatyaagaaaactgaggatattagacatgatatcactcaatgtcctacaaacttaagatacttttctgcacccttcctcacttttcctccagtttcagcccttccagtgtgccttcccactatgtccagccacccacttcttctggactttgtctttaatccccctcctcccttcttccaggggccttccccttagtttgtgaactcaaggtacatcttttccaccctaaaaaatgcctctcctgactccaggttccctccagcttgattctaacatactgaaaggtatagatagtccttgaaactcaaatacttcacttattaatctcccatttacccttcaacccactgaaggcaacgtaccttcttctctgagcacatgtgacactagatcagtcacaggcattactctcagacctctgcacacatctccttactgtgcccttaaatttacaagtgttaccctgctctcccctgccctacataatttcccataattgccacatgtatgctgatgattcctcgaatccttctctccaatccagccctccagcactcttctccgatgtagactggtggtctgctgcctgctggactttttaactaagacatcctaccagctcctgatgtcttccaaaatcacctaatcttcctaaaactgctcctctttcctgagctctctcttatctgctatcatctttctaccaggcatctttatctcttctacttcctaaccccaaattcaatcaaactaaagattttacctcttaccattatttaaattcatcctctcctctcttttcctgtaaccccttcagagtttcatcctcttcataggaaccactcccttaactgttcttagaacctccaccttgcctcccactgattcatcttcctcttagcagagtaatctgttagcaacatgaatatgcccatgctcctgttacaaaccctgcagggtttcaaatatccttcaggataaagaccaaagtccttaaaaagacaaaaatagctttccaccatccataggcccctctagctttttctccaaaggacttgttcctagtgcagctggcactgcttcgagattttttttttctttttttctttttttttagacggagtttcatttgtcgcacaggctggagtgcaacattgcaatcacagctgatttcaacctccatctctcaagttcaggcgattctcctgcctcagcctcccgagtagctgggattacaggtgcccgccagcatgcctggttaatttttgtatttttagtagacgggttttcaccatgttggtcaggctggtctcgaacttctgacctcaggtgatctgcctgcctcagcctccctaagtgctgggattacaggcataagccactgcttcaagactctaagccttcattcgcgctgtctcctagcctagagtaccacccctccacccattcccacttggtataactaactcctactcctccttgaagactcggcacaggtaaatcttctctcagaagtcattactgacacatctcaataattgtactttatatcattgtaaataagcttttgtctccctctttttyaatagattatgaggctctctgaggaatgggacagtggcctattcatcttagtatctttcagcacattgtgctgcatgtggtaactgcgtaatacattttcgttttttaaagaactgaatttttatatagaaaatgtttttcctaagcattaaaataaaaattgcaagagtgactgtctagaatcaaattagtcaagttcttagcatctacctatattattctgtacttaataaaaacaatgtgacaacctgagaaaacttcctcccctccraggtattcaaatgcaatttgacagtatctcatattgcagcctgaatgtgagctcagaacaagtcactcagaataactgagggaagctgttctctcataaggttctaagggtgaaaatatgggggtggacaagcacaaatggcaggaaggaaacttaataagcatcctggctataaaccctaatgatttagtcatctgagaatcccatcgactcatactcatttaaaatgcaattgtgaaatgggaagtggagaatcgcagaaatgttataggagcagaaactgacatgccttgctgataaagtaaaaacaagcaagcaaacaaaatcctaattgtgggggaagtaataaacccttagccatgggatcatcttaaactctcagggtttgatatgcatatgaggtccttgaaacaagagcatagctcattattatgaattatagtaagaatgtgatttaaagtagcagtgtgttcactggaaaagtattgtgcaaatattttgttccctaacccatcagtaactaagaaaacattttcacagtcgtattttagaaaaaacatagtacatagtatatttctttgtttaatgcaatagtgaattaagttttacctttgctatagttggtcagtctttttaaatattatggaataacacccacctacattcccacattaataataagtataaactacacagtagcatagttactttccatctaattttccacctcttacataatcagagtacatgaatgaggagtgattatgtgtgtatacatattttgttgtatttttcaaaaagtgaccaataggactttttaaaacttaaaaataatattaagtcaatacttactcattgtaaaaaaaaaaaaaacagaattaagcaaaaataaataaaatcacagagataaccaatatactttggtatatttcccagacatttttctataaatacttacaacaaataaggtataataatgtaatactgcactctacttattacctaacaatacatcatatttctatagcattagatattcttttacaacatttaaaaggctgcatagtaaagcattatatggttgtacaaacattttttaaagctataccttaccctacatctaatttgatcccaatttttmtttattatgaaccatgctgtgcaaggaatctttctggggtaatggaaatgttctgcatcttgatagagtcaaaagtaaatagctttcaaaactagtcaaactctacacttaagatctgtgcatttcagatatattaatcatacctcattttttaaaataggaaaaaaaacatgctgtgaggaacatctcataattaaatcttttgcaaattaagaccacttcctaaggataaatttttaaaactgagattgctggatcaaaggagrtatatatgcgtgtgtgtgtgtgtgtgtgtgtgtgtgttgatttgatattgatttgttcactcaaaattattggctaagttaacacttcagccaagatattgccaaactgccttttagagtaatgctctcactagcagatttctttttttttctactgcctatgtaattgcagaaactagcagattttttaatctgtgtcaatactaggtttcaaaatttgtaaaaacgtcttacttttcaccagattttaaaaagtgccacctcttatttcaatctgtgcttttaaaaaaattgagtgacagtaaaatgtttttccatatgcttattgatcatttgtattccttctaacctcgatgatctctctttcctgcccattgagtcttttgttccttttcccccaattggtgttcattgtttgcttactgattagaaaaaaacgtgttaaatattaatgatattaaccagttttcacatgtttcaaatacctcttcaaagtttttcaatccttcttttaaaaattctgctcgtagaatttttaatagagcctttacatttttacatattatagtcaaatttgtcttcttttcatctttatagtttttgccttgggcatcatacttaaaaacaccctttcctatccccaagatcatatcaatattcaatatatgtatatgctctgacatcccattttcagcgatcatgggctcatgcccatagctgcctgggacattgctatgcacaggaggttccyaccttagtgagcaatcccttcatggtgggtttgccctcaggctgcagggaaagtgggttggcagcttgtactcgaagaacattctgtaacactttaatccactcttccaatatattgggagaatctgcagtcagatagtatgtgtgtttttcagtggtcaactagaatgcaacgagaaaggtataggaaagaaaactgtgaagatttaggattgttagcatttccttgttcattattcaaacgtcattacttaacacagaagcaaacatgctaaatctcaagtcccagtttctaaataaatgactccatatcagttagaatattttaaccactttgtgagaattacagcaattaaatttttgtggaaataactttgttactccagtttacctaattttggggttatgattttatatcttgtttatttgtcacattttccctttctygcttaaatgtgttacaggttcctacttttcttttttttttttttttgagacagagtctctttctgtcgcccaggctggagtgcagtggcgccatcttggctcactgcaagctccgcctcctgggttcacaccattctcctgcctcggcctcccgagcagctgggacttacaggcacctgccaccatgcccggataattttttttgaatttttagtagagacggggtttcaccgtgttagccaggatggtctcgatctcctgacctcatgatccgcctgcctcagcctcctgaagtgctgagattacaggcgtgagccaccgcgcccggccaggttcctacttattgaaatgaggagcagaatgattaaagactataataaaatagcatagttttagcaactaaagaagaggtttyttaatacaaatgacaaaatcaactataaataaaataagaagatcttgcatataagaagataaattattggaacgaacatgtgattagatattatgaactcagaatkttccagtctcaaattagccacactgcaaattttccaaatttcagaaacttacaaatgattcttaactgccatgcccaaagacaaagctttccttgattctcctttctaaatttttgagaggttttcaggtacaaatcactggaaacattgataatgtacctttctggcaaagttgtcctccaccctccaaaggagcaatataagaaaataatggttattgaagacatttcagaaataaagtgtctgactttaaattacatatactagaatatctcaacagcctgtgttttaaatttaacagatttctggcaagactggccttatgtgtgagtaaaatgggcagcagctgcccctacagtgtgacttgcttggcagcacactccctctgctcaccaatatatttcccactttggtgttatggcatctgaagttcatataagaactgtcattttcagattctatattaaaatacaaacattcctgaatttcacartacattatataactaacatcttattgagaattcatttaccagataacccttccttaaaatagcttcacagttggacagctgaaaatacctaggagattaaatatgaggaaagaagagtataaaggaagaaaggtaaagtgtggtgggagttactcaacacacacctaacttacattatagttttaaccaaaaattcgtggagtttcacatacttccaaggcatcaaactaaccccccaaagtgaataaagaaacactgaattatcctatctcctttccattaggttggataattgagaattgagtctggcatgatmcmaaaaaaaaaaaaaaaaaaaaaaagttaagtacctgaactgtttgtttgttatctcctcttaaaatactacaggatgcactaagttcaatatggccctggggttttctaattacatcactctgtatgaaacagaaaaacaaatggaaagtgattaactttaacagtaataataaggaatgctttgtatcattacttgcattatgggaaggaaatcaatcaggcgtctgatttatagtttgaggaattrcgttytaaacagaaaacactttccactcaccggagatttgtagtaaagtaattcaccacctttaagaacaaaccaccgccgcttccaagacttgactttaccactcatttttaataaataaccagatttttccagtggttcctaatttttaaaagatagacaaaagcattttcagtttccttttggaggctcaatctgactgactgctttttaaaaatcatattcaatatttacatttttcccattatcactggaagatgagcaagtttttgggagcttctgctctggctgtgagtactcygtgtctgtggagtaagcatcaggaggaatagcataatcactttcagaagccacagaggagagagacacacctaagagaacaaagaaagaaatcaagtcagtatttmatactggggagggccaaacaccagctctgagtgctcctacagaatgcaattattcctaaatcataagcctccctagactagatttattctcattcctttggccataaataacttttttygagacagagtctcgctctgtcrccaggctggagtgcactggcacaatctcggctcactgcaacctctgcctcctgggttcaagcgattctcccgcctcagcctcccgagtagctggggctacaggtgtgcgccaccacgcccagctaatttttgtatctttagtagagatggggtttcatcatgttggccaggatggtctcgatctcttgacctcgtgatccgcctgccttggcctcccaacatgaagaacttttaaagcagaaaacagaactaagaggtagggactgtcatgtaaatctctaaggaagtgaaaggaacaggaataatattttggtatgattacaatcacacagctattttacatatataaaatatatgcaagagtctactcatgtatattttattaagaattaaaaatatgtgtatttacacattgacatataggcaaacaaatgttgaaccttaatttatcaagattttcacaatcacattttaaatttcttaacttctgtaatcacttttaaagtaacctcacattttaaaaaaacacaattcagtagtattttttcattcaagttccataagctactaagcagtttacagattttaaaaatmtttcataaaagagaaacaataagattgaaagatataaacaaactatttctttcacttgccagcagctataacataaaattcaatggaacatttatacaatgattcatttgcctttacagaaaactacctgggagttgcaagccacatttcatgagtcactacaattggagatttagaatatattaaataaaatcaaggacttaggtaattatttataaaagtatccagcaatttttaaaaatatgtattaacatttaagggacatattagaacaatgccactcttgtgacactgctttttatttgactcagacaagtaacagttgctataatatcttcatttttcatagaataaacaaaaatgtagacctatagggacctcagtgattgtcatggctaaggcccaaggagactaaggcccagagattaaaggatttgtccaaagtcaaagagttaggcaggggcaatgttggaacacaagtctcaggctcccaggaccagggccagtgtgccaggcactgtcctagatgctagggatagagcaaacaacaaaaatattggctctcgtggaacaaattctagcggaaggagaccactgacaaacaggcagtaggtggtatggaacaataaaacrtagagcagactaaagggaataaaaagagctggcaacagaagaaagacaaagggctgcaatttgagtggtgtggtcagggtggacctcattgagaaagcagcgtttgctgatggaggtgagggagtcagctatacggacatctaggggaagaataccagctggaggaaacagcagtgccaaggtcctgaaatgcaagcatgcctggcatgtctcagaacagcaagagggccagtgagactggagctgagtacagagaagaaaggagatgaggtcaagtacgtgaccgaatcctggaacaccttatagccgttgtgaggagccactgcagtgtttccagcaaaagtgtgtcataacctgattctggctgtagcggggcaagttgagagcaagaagaccagtggaagctcaaaatatgaaaccaaggaaggctgagcagctccagttgaagccgaggggattggaagtatccagaggttccatggaacacagtttgaaagccaacagacacaccatgctgcattaagggctttttataacatacagatgtcatttggtggaattagatctctctgtaaccactacctacacacagaatgtcttcaaaatccactaaaaatcatagacatattccaagtaaatgttgttctccactttaacatcagattaattgacaaattttaaggtatattttctgccagttagcagtgtaacaactttagctgaaataagtctatttcacaaatgccaagaaagaaacctcattttggccaattatctcacttcattccaacaataaagtgatctccctctcacagacaataaaaagctgaaaaaaaaaaactatataatttgtctgaaatcacagagaattaagaagagaattaggaatataaacatatcagtcataggctaaagttcttttcactagggtctgaagcaagttcttggatttaaaaaataatcctgtaatggagataaaattcccaattaatattcagaatgatctggagttgcctcatatgcctgcgattttccctcacctcgtttcatggctctggggctgcctggcccactcctactgcgtgagtctgactctgacgtccgggagctggatctggagctgtcttcttcctctgacccagatgagtcatccaggaaagggctgctacttatttgggtcgccttctaaagaaaagtggaacaacctccctgtatccatccctaatgttaccactcatccaagaaaaggctgctagttattagggtcgcctcctaaagaaaagcagagcaacctccctgtatccatccctaaggttatcactctttttagataacagaaagttttacaggaagaagtcatagcatagaattttttttttttttttttttgaggtggagtcttgctcttgtcacccaggctggagtgcaatgacatgatctcggttcactgcaacctccgcctcccaggttcaagcgattctcctgactcagcctcctgagtagctgggattacaggcacctgccaccacgcccggctaatttttatatttttagtagagacagggtttcgccatgttggccaggctggtctcgaactcctgacctcgtgatccgcccgcctcggcctcccaaagtgctgggattacaggcgtgagccaccgtgcccagccagcatatgatttttaaaaggaatttgggaatgtattttgctgttatcaaaatcatgttgttaaaccctgaattctaataagcaattataaaagatgcctgaaaatataaggttgtcaatacctgcaatccttcttttaattaatacttcaagcaaggaaggggtaccctggcactgatacaaagatctgcctaaattaggagttttcattacattattaataatatgtctcctttaaacaattcatggccatggggaggtgggggaatcacatgggacacagtaaaaactgactcagacctctaacattctgataagtgtcttctgcagacctttccattccttcttttttatgatatgttaacgtgaacttgtaaaactttctataaagggagagcctgtgtaaaatgttaagaatggaatctggagcttgaattaacaatttccttgatccatcatgaagagaagcacatgttttaacaataacaataatgagttacccccttcaaagttgtatacactggggtggtcatgttcttgtatatcagagatgtataaagtcctgatgtagtataggaaagggttgcagcagaatctgaaacagaaaaacaggaaacaacattttaaaaaacttctaattagcacattggtctttttcttatgaatacaaatgagcataatctccatttaaaaagcaattcgattaatacatgattactaactgtatagtctactttacagattatggcatttacaggtttatttatacacttttttacatggttcattatttcctcatgtgtgctagttccccaactagactgcaagctctttgagagcaagaaccatagcttttatttccttgaaatctccatgcatgctttgctcaggctgggcagaactaagtacaggcaactgcttaccaaccaattcagtaagcagtacataggaagatattctctgactattcataaccctattaccagcatggtatcaaaaccactgttctggtgsggcatggtggttcccatctgtaatcccaggactttgggaggctgaggcagtggatcgcttgagcccaggagtttgagaccaacctgggcaacatggcaaaaccctttctctactaaaaccaaacatggtggcatacacctgyaatctcagttacttgggaggctgaggcacaagaattgcttgaacctgggaaggggaggttgcagtgagccgagatcatgccactgcactacagcctgggcgacagagcaagacttgttctcaaacaaaaaccaaaaccaaaaccactgttcttaagcctttatcaggtaaatctgatgttgaaatattggaatgtaatttcctagctaagtgtagtggctcacacctgtaatcctagcaccttgagaagctgaggcaggaggattgcttaaggccaggagtttgagaccagtctgggcaacacagtgagacccccatctccacaaaaaatcttaaaaagtatcaaggcatggtggtatgcacctgtcatcctaactaatcaggaggctgaggcaggaggatcgcttgagcccaggagttcaaggcggtagtgagctatgatcacaccactccactcccacctgggtgacagagtaagacgctgcctcaaaaaaaaaaaaaaaaaaaaaaggataaaatttcctgaatggaaagaactgcagatagctgaacaggaactgaatatcaatagttacccctaacatatgaattagtggtgggatagggaggaggtggtagaaagaaccacaggaaaatttcttgttattccagacagttcttgttgtttggttttattttttgtaatgagcatgcattgtttccataagaattttttggaagaaataaagaaaggggaaatgtgttttaaattctgggaaaaaaggacatagaagcctawatttttaccattttaaacagctgaaatgccacagtttctctgatttagtctctctcaggtaaaaaaatatacatcagagttgagtgtatttgagtccccacactaagatgaatttcaattttaaaatacaaatcagcaaccctagaaatcattttttgaaagtttacacaactctttattccaatgaatttagacatttaggaagttcttagcgaatgaaatagcaatgcaaatcacttttctaaactttttttattgtgggaaaaaacacagaacataaaatttaccatcttaatcttttttttttttttttttttttttaagacagaatcttgctctgtcacccaggctggagtgcagtggcacaatctcagctcactgaaagctccacctcctcggttcacgccatcctcctgcctcaacctcccgagtagctggggctatgggcgcccgccaccacgcccggctaattttttttgtatttttagtagagatggggtttcaacgtgttagccaggatggtcttgatctcctgacytcgtgatctgtctgcctcagcctcccaaagtgctgggataacaggcgcgagccaccgtgcccggcccatcttaatcatttttaattgtacagttcagtaatgttaagtgtattcacactgttgtaaaacagacctctagaactttttcattttgcaaatctgaaatgctatacccagtaaacaataaattcgcttctccacgcacaccctgaccctggtaaccgccattctactttctattcctatgaatttgaccctttaaayacctcctttaggtggaatcatacagtatttgtctttttgtgactgtaccatgtatttgtattatactatcccttagcacaaagtcctcaaggttcatccaggtggcagcatgaaaaagcacttacttttattaacactctccatrttgaaggcctcagacattcgaatacctgatttggctacagcataaattctgctttcctagggtaaaagagagagtttgaacagggtatttaaagcaaaaaaaaaaaaaaaaaaaaaaaaagactactttcaatacacatgtttttcatttgttcttcatttaagattcactagagtacagcattattataaaaccatcatcggtgccaactaaaatatgccattgtgaatagtactgttgaratttttctccatctgttagttwttccattatttatctttttcccacatttttgtttgataaattattttgaagacgtgaagaaaaagtaagagaaagctttttcacaatcactgactacacataaacaccacctttaatattcttaccattctagaatatggttggcggtggggaraaaaaccatgagtggctataacattaagctagaaaccattctcaatcattgattacacataaacaccacttttaatattctactattctggaacatggttaaacaaagaatggaaaaacctgaagtcagaagtcatagatacagtagcattaaatgctatcgccttcctatgtcaatgtacatttcactcaagtagaagagatacctaaagtcaaacaagaaatgaatatgagaattgcaatggaatttatattatcttgttccaaaagtagattattttgttttctcttctcttctgaaaaatctctgaaacaggtactggacaggttactagccctgctcccttgagaaaagggaccacaggtggttcctaatgcatagagcaacatgtcctgaatttaataatgggtctaacttggacacagttgactgtccaggacayagtgggcaactaaggccatcctcttcaagacagccagtggcttgagaggcaactggcatgagatctccgactatcagggacattttcgattgaatagtgcctggctgagtgaatcagatgtagtttctttgagtgtgagatacacccacacacaaacagcaacagaaagacatataacaataagggcagtaagcaggagacgggaggcagtctgaagccctaggagactgggggaaagtggttagtagtagaattagagagaggggactggaggcctgggaggacaagctgagccactgggagcaggggcaatggatgtcacttgtttctatyggaggtactgctgactatcacatgttgtccctctagagtgactattgtaatttgcatggtattccagttcaataaggataggctatgccttaaaataagctcttaraaatttttaaaataaactcatatttattgaggcaattagaatacatctcttttccttgaaacctgaaaatacctaataaacacagaaataaaatctcagacttggccagtctgctggaaggcttttgaaaagcaatactactttttcaggaccgaatagcttcaaaagagtaagagaagacagaatggaaaaaaaaaaaaaaaaaaaaaagtagtagaatgggttgccaaataaaacgaacttaaaagcctaacctaaatctctgaaaatctcaacatcataagataggcaaaatttcaatttcttgctgcctaaagtataacataattagaattccagagattcacatgccattaacttccactttcctgtgctatccaaaatttagtaataaactacagaaggtttcatgtggatattgaaataaaatgtcctcttgaaagcaaataagagcacatacatcttaagttctgaatttatattagaaaaacatgtccaccctaatttgcttaaaactgcatcagtcacaaaataaaaaatatagtaataaaagaacatgactccaaaaaccaaaagagtcctgcaacccagatgtttctctggaggccaaaggttaaattatgccagcatgtgaagaaaaacttaaatctataacagatcatttcagaccaggtgcagtggcgtgacacgcctgtaatcccagcactttgggaggctgaggtgggtggatcacctgaagtcaggcattcaagaccagcctggccaacatggtgaaaccccacctctactaaaaatacaaaaaattagccaggtgtggtggtaaacgtctgtagttccagctacttgggaggctaaggcaggagaattgcctgaacccaggwggcagrggttgcagtgagctgagatggcgccattgcactctagccygggagacaagagtgaaacttcatctcaaaaaaaaaaaaaaaaattaaaattaaacagatcatttcattttatttcaaatattggaagaatttttttttttttttagtctagcagtgttatcctactaatggtcaatgtttcaatggaagaagattttatctattctaggtctgtagaaagayactttggaaaccaatggctatataagctcaaaaagaaaattaaatttatcttaaagccaatcaaataacgactaagttcaaaaacttataactaacaagagttaagtgtcccggttcagaattcacccaaaatatcacagttagggggaacccttctttcccacctccaatgtttccttccacatggaggaacctccagtaattgaacactgctgatccctctccacctattcactttcccctccccaagaggaagagtggcttaatgtgattggtaagctgagaaggagaaactgggcatgcagagcctggcarcttcctctcccctttctcttgagaagtagctgcctgcaggaaacaaccatctgttctgttttttgaggtagtaagttttagaggggcatggcttcagtagcagaatcctgtggtggtccagggcttcctgggaacaggtgactcaatccagctaatctcaaagttcagtattagaaagctcatttgcccactaattctctaaaattagttttatcagtaaataaggtaataccttgatctcccatctgtcttgtcattatcttatttctcaattgattcagaactcagtgagggaagagaagaagaaattttatcctaaaaactggaaaacgtcagaacaaagctggatttgaaaggaaagaagaaaagaaaaagtaaaacttgaaaatgagtgtggacactttgggaggcaaaggcaggtggatcacttgaggtcaggagttcaagaccagcctggccaacatggcgaaaccccgtctctaccaaaaatacaaaaattagccaggcatggtagtgcatgcctgtatcagctactcaggaggctgaggcaggagaatcacttgaacccgggagatggaggttgcagtgagccaagatcgcgccactgcactccagcttgggcgacagagcgagactccctcccagaaaaaaaaagtgttgagaaaaaaactactgcgtatgtgttacatgcggtgatataattacccaagaaggaaaacggtgcaggggaggagttggaggtttgctgtatgccaccttctttgctgagtcacagtgttcctggtcatctgaatttggagagtccaaggagtcataggaaaataatccatcatcacaactcgtgtccatattctctaaaacttctgtactgtctccatcaactagatcaagatcagtttcctgaggtctcagtggtcgtatcatgcttatagcgtttctatttgtaccaaacatcctgtcagagcttaactgtggctggcttaagtgccttttsgctagtgctacacttatactgaaaacattaggaatccttaactttgggggtggcaggtgtgatgaaggcactaattgtgttccttttccagagagtgagttaggatgctttggcattaaagctggggtcaaaatagggcttggggtgttggcttcactcgatgaagatgaataatcgagtctctgggattgaaattttttattcagttcatccgaggaactatcttgttcctttttacttaattcagaatttccctttccaagaggactatttagagctttccactgtgcctcctgctgccaagaatatagcttcttgtgttctggtctctttatgccaaaagtctcttcctcaaatatagagctgctgtcatcagatgctgtcagatacatttcacttcccatcctgctacactggaccccttcctcagatgtgtgactggagagggtggatgtgcatctggacttggatcttcctttgctcccgtcttcctcatcagagctccagtcactcacwggagccccagaattctgggagatgccaccatctgtggcaaagcttgttcttgttttccgattctgttctgagccacaaggggtttgatgcaatgttctctggcctctgttgttttctagaacttggttatcaacagacttttctggaatttccatttctagaaaaggatacatcatatcagcatgctgcctttaagaatataatctttctgtacatttagctttatgtagctacactgtagaaattgacactgtagaaatttgctgggtgcagtggtgtgtacctgtagtcccagctacttgggaggctgaggcaggatgattgcttgagcccaggagctgaagtctgcagtgagctatgatcagccactgcactccagcctgggtgacagagcaagaccctgcctctattttttttaaaggaataaaccaaaaatttcatacaaataatttacattatcctgtgttagtcttatgtmttttttaaacacaagtttttgaaaactataagctttatataaaactcagagccctaacatgtcaatataatagtttccaaattggtttttacaaaaaaacatgttgggaaaaaaaaaactgagagtctaaagagagataataaaagaagcaaaatgtgaaacagggcaactttcactatcaaagaaagcagtcaccaaaaaaatgaacagcatgaattctattttagaaggaaagaaaatgacacctcctttcaactaaatatttarattataatgaagtaaatttaagcataataaatacaaagctatagtttaataaacagaccttgcaccaaacttcgatacattgagatatgcaaaatcatgaagaaaatataaacacagaaaagctttycttgctctacttttggtttaatcataactacaaaatgtgtttttataataagaataacactctttaaaaatatctttagatatggtttatttttatgtataacataattaacagaatgaaccattggcttcataaacaaggaattaaacttttagactgaagtgtagaaaagaaactttgaaaacatgaaaacatagacaggaccttcataattaaggaactagaggctgaacaaataaactctaaaattcggtattaggaagtttgttaaatttgcaaatgagcaagagcatcagtacaagcaatctcagctgtactccactattagaaaaagggaaggaaatgaaaatggcttctcaaaaggcaaaaaaaagatgcaagtaggccrggtgcagtggctcacaccggtaaatccagcacttttgggaggccaaggctggcagattgcttgagcccaggagctcaaggccagcctgagcaacatggtgaaaccccatctctacaaaaaatacaaaaattaactaggcatggtggcatgtgtctatagtcctggctactagggatgctgaggtgggaggatcacttgagtctgggaggtcaaggccgcagtgagctgtgatcgtgccactgcactccggcctgggagacagagtgagatcctgtctcaaaaaaaaaaaaaaagagagagagaagagaagagcaaagcgagtaatggcatgaaagcaaggagcaaaggagccttcggattggaaaatgtatcattttcagaatttcataaccaagcatagagacaacttttactgttatactttttctcttctgggggaaggaagttggagctgaaagtagagaggatgaaaactcaggcctctctaaaatatttggggaaagtcaacaaaagtgattgtgctagaggtggcaaagccaacagctacaacaaagcaaaatttagatggattttttctttttttttgatagaagcacttcaagactaaaagaagaagagtagaaatctgtatacaggaccagggtttaaatatctaggaaaacattttcctcttggaaggattaaaggaaaatcaaagagttatcaatttatcccctagggtttttttctttagaagtttgctatgccaatgtttaatttcatgtgtaatattaagtaatgttttatattttaaataatgttttatgtgtaatattaagtaatgttttatattttaaataaataatgaataggaaattcacagttctaatctgaaactcagctaaaacaagtacagcatcttgcagatgggacagtaaactttttaattttaaatacccaccttccacctacagcaggaaaaatatattacgaaggaaaaatcagtttctcctatgcaaaggctctcagaaaacacaaaataattagacacacaaagttaaatgttgtattgctctttagaaacattctcataaaacatcaaattgtcagaaaaaaataaggaaaattaagctatatttggattaatcttagcaaatgagtcttcctttttaaaaaatgccaaagtcaattcctgtagttcataaataccttccatgtcttttccttcagtgaactcaggttctttcgatgatatcttgctcatttcctcagattttactacttgaggaggactccttgctcgagataaaaagcacccaaaggtcaaactgctcaggcgctggccttccgaaagctttagtgtagagacagtggatgacttctttccttgaacttctacaacatcgttaatcaaaattaagatttgaattttttatagaagtttgttaaacatagaaccaaggcatataaaaacttgaacaaatcactctttatgccagaaaaaaagcctaaagttcatctttattgatgtacwataacatagaaccttcaatgacaagcatcacatcccaatgtttaaattctgttttacatattttgaatgttcaaaatatttttaactggagaaagaaaaatatctaatccctttaagagtagttagttctaagcaacgacaaaacacaaacagattataaataactagagagctctagcttcctgcaaagtcaagtattgacaaataccagttcagcgttggtaaaatttgcacagtatgccactgtgaagaaaaagaaactgaggtcctggttgccgaaataaccaaagaaacttggatcatccttggggcaaccatcccatgataactgtaatgacttttgcttatcttagttttcagccatgagaaaaaagtagatggggaggttgggtctatggtaaccacaatataaagagctttaatcacttctttaaagagaaaaaaaaagaggaggtgagtaaagaatttatacaggtagtgaagtgattaggtcagcatctaatcatgaatttaattcatctcttggacttttttttttttttttgagacagggtgtctctttgttgcccaggctggagtacagtggcatgatcatggctcactgcagccccaaactcccgggctcaagtgatcctcccacctcacctccctaaccagcccccaagtagctgagagtataggtgtgtgccaccatggccagctaattaaaaaaaactttttttgtagcgawggggtctcactatattgccaaggctggtctcaaactcctggcctcaagcagtcctctcaccttggcctcccaaaatgctgggattacaggagtgagccactgcgcctggcccagtggcccagccaaaagttataaataattttggagatatatgttttttttaaatagaccaatctcaccactgatattcttgagtttatcagcggattatcaattgattctcctaactgactggattcaaaccctcatctagaagatccatatggggaaaggattagaacactggtgatccatgaacgaactgagttatgacatttgcatgcaagtaaccaccagctcaggcatctaagaacacatggaagtgcctcagagctaccctcaattaatgccaagttcaataatgtgttcagcatgtgtgatgccaagaaacctcctccaaagtgttcaatgcagctacaaatgtatggtatctgtgactcccctaatctccattaaaaggtctattctctaagkccaaaattcaagtcttcttggacttctggagtgcatgtctctctgatacaactacctctaactcactatcttgtgtggtaaagtcccctgtgttctttcaagaaaacagggagatacagaactacatcacttagaaggagcaaaatgtccttaccattagagattggtacccatcatccatatgtctgacctcccaggctaatgtctctgtacagtacttttagcaagctggactctctggaacttagtttsgttctaaaaagtgtaccaatggaaggtcttttagaatagagagaggcaaaattagtatttggtcatgtttttctgatctacgtagtgaccactttggtagacatcatcaattccatctcttttttgccttccactttcaggcccaacattcactcgaatgcaggacttctggtttgtttagtaattctctttcattttatggcaacagcttcttggatgacatccataatcgcatctttaaaacatcaaaaaaagtaaaagcctatatagtcaaataaatccaactaagctatcttagtaaagtatttgtaccttgtagttttgactgcattgttcttatctcttcagtttggttttggttgatcaaacgaagattctgattctccaattccagctaagagaacataatggtattcttttcatatagagataatattataaaaatgtactaataaattataatattagaaaatgttaatatttagtttctctacatgtgtaagcaaaatacaaaggaaatgataaacaaatctcagattaatttatcagaataggctatcgacctagataattatggtatcaatatttacatttttcagaactaagagttttaaatgttttcaccccttatgccttttccactgtaaaattattttaaaggaaacgatttcagctttaaactgccatagaaatgaaaacgtgtgcttctcagctaccaaawacattaattttatgagatatagatgtatgtcctattattatttgaaattaattagaactaaaattaacttattagaataaagttattcacactgatcctcatgagtctattaatatgtttaatttttaaaatacactggatattaaaatgaaagctacctatatctcatttatcaaaagatagcagtatcaccaaccgatcaaaattctttgttttactcagagtaatcacatattctgatgatgtatcaattcaaaagaagtaaaaggtaaagaaaaggaaaacatatagcaataaatacctcatttaacttaactgttacccattcttttatcttagctgctttctcttctattattttagcttcttgtattcttatttgtttctgaaataacaatagcaatttgtttagttcaaacataaactcaatggtctggaaatgttttaccataaatatacaaggcaaatccacttaaaacttgattccaagttactatatctgctttcaaattaccaaataggtttttaaaagaaaaaattattcggtagatacaataagaaaccacaaagccacatgcatgtattactagttttaacaaccgctattctctttctctgaaagatcatacactgaagtcaatccactgaatttatcaacaaaataagccatttctgggaatggtctaggatttaggggtcaaccacgttggggagaagagaataagactctccttaggggcatggctttttttttcccctcaaatactagctttcaaagatgcaagaaaaataaacatagtgaaattctagctctcatttaccagccttaaaatctggttatggtcacaaaactattgagaatgtgtttaccaaataaatcgcaataggcagggtctaggggtggtagaaagctgaaaaccactgacctaaagaaacactggtctttatcaagaaatggggaaaaaatgctgaaaataaacaacacatttaacaaaatgatttcatagtggtcatatttaaatgatgttaagtgagcattaagtacataaccccaatccccagtgcaattttttcctttttttttttttttttgagatggagtctcgcycrstcgcccaggctggagtgcagtggtgcaatctcggctcactgcaagctccacctcctgggttcacgccgctctcctgcgtcagcctcccaagtagctgggactacaggagcccgccaccacgcccggctaattttttgtacttttagcagagacgggatttcaccatgttagccagatggtctcgatctcctgacctcgtgatccacctgccttggcctcccaaagtgctgggattacaggtgtgactaatacattttttaaactagattacttgattccaataaagtggttcaaaaatggtgtacacatttctaagcagaaggattggcatcaaatataaatatttaaaatgtaatgttctataaacatttccaacattctaacaatctgaagcaaagatgggttgcaaacaatttaggggcatacctgctgataaccaaatgttcccaacttaaatactacatttaaactctaacatctggctgggcatggtggctcatgcctgtaatcccagcaggttgggaggctgaggtgtgtggatcaggagttcaagacaggcctggccaacatggcaaaaccctktctcttcttaaaaaaaaaatacaaaaattagctgggtgtcgtggtgtatgcccatagtcccagctactcgggaggctgaggcacaagaatcacttgaacctgttggttgtgggtggacttgcagaggttgcagtgagctgagatcgagccactgcacttcagcttgggtgacagagcaagactctgtctcagataaataaataaactcaaatgtttgaatattaacgagcattctcacatccaaaaagtgttagatcttgccttggaatcactctgaacttaaaggaatgccattttacttgcacctttcaccaataaatgtgatgcaatcctatgggttgaccgaataagcaatatttctccccaaatatagaaatttaggctctctctttttaatctttgtgattatgcacaaatgagtgcacacacttagaactctttatcaaattcttcctaacctgctcttcaagttgcaattccaagttttgaatgacgtcatctttttcctgtattagcgactccagatcttgacacttattatataatcttgtctctgattcactggtttgaatattagctgcttttaatttatcttccataacttgtacctaaattcaaaggataaaatattaaaattgtgtgtgtactcaggttatcacagtattaaacctagaattttaccttaatattatgtagattcctaaaagacttcaaaaaggaaaatattaaacagcaaggtttaatatatttaatgattataaagtctcaagcctatttcaccaagtggtgttaccttggaggtacatacaaacataagaaattctcagaatattgctatcatataaagtaatgtacatgtttcctagagcgatgacaatatgcaaagtgtttatatgagtatagaaacagaaagtttccagccctcattttttcatattttaaacaaagagtataaattaacacaggtgagtggtgaggtgagacccagactggatggcctggtataataatgtattatgggaaaaaacttgaacctaggtgaaaaagaaacatatacacaatggaaaggggggtgggaaaacaaccttaaagccccaaatgatggaatcataaaaaataaaaatgtattagagtctagatataggtaggagagtacactcaatgagggcttcttgattcattcatttaacaaatattcactgaaaacctgtcaagtgtccggcttattccaggccctgagaaagcatcagcaaataaactagacccccaaatctctgcctgcatagaaattacattctaggcctggcacagtggctcacacctgtaatcccagcactttgggaggccgaggcaggcagatagcttgagtccaggagttcaagaaattaattctaatgggtaagagagatcacaaatataataaatatgtttttttaaaaaaagaacagtactttacattactcaggtgataatgatagaggcgggaggcagacaaatgcctaggcagatggggcaggtcccyggtgaaacccaaccttcaagctggaaacagtccctggtaaatccttgaaccagattgagaacctgccttcccgtttggcacactttctttcgattgatcccatccttcacctattttacatatacctaccctttcctaattggttttctaaactatcatgcccacttttgagtgatgtctttactttaaccttttttgcttactcacaagccaatcagcacgcactccctattctgagcccataaaaagccccgggctcagccatattgggaaatctcctgcttcgggtggggggaccacccccaacatcccctctccgctaaaagctgtttcatcattcaataaaacttcctgccttgctcattctttgagtgtccgtgcaactacttcttcctggtcgtgagacaagaacccagatgtagctgagctaagaagcaaaaaatcctgcatcaataagggtaatgggaaaaaaacagaacagggtaaaagagactgagtgtgtggctggaggttgagtggtgctgcaagtttaatatctaagatagattggccctgcttggatattctgtaaaacacatccaggcatataaaatctcagaaaggcatatctgcatattgtgtttgccaacctacatggataatataagtctattcaactcatagtaaagtttagattttcctatcaccaccttttagttctcacttttctctcctttagttctttgactcacaaacttgatccttgattgtagatggtctagttgattggatgcctcagcagaaacttcacaaggagatccaaataagagatgtttgagatgttaattgtagtaagaaggaaaataaagtattgagtactatatacaatattaagactttcattctacatactccaaataggtaagactaaaattttagcaacgtttcagattatagaggcaaagagaaaaaataatgtgaaagcatttgagaaattaaagatgatagttaagatgaaaatctgaaattattaaaaacacttctgaaaagtcaaaaggaatccttacttaaagctaaaaaatatttgactaatgagggttttctcctgaaaaggtataaaggttggtttggatttatttttttgaaccatgaatgccaggtttcatctgtgggttcactgcataaatgtaaatcaattcagatgccaaaactgttctatttaaataccaaccacatggctggaaactaggaaaataaaagcacaaaaaaaaaaagttgaagaagaagaaaaatgtattctactatccaaatgataatttaagttaccttagattctaagaaatatagtgggctttctgcatgagctgaaggacaaagatctgtatcaagacaaaggtctgcatcagaaatgatgtcatgcaaaactgcccaagcaggacagacagctgaacagtaatcttaagatggtatagctatagccagttccacatacgacattctgtagctgaggaagcagggaacgaggagcagagcccaagtccaaaatgatagttctcctctgggcacagagtaatagaagtaaacctcaagaaaaacaaaagtaactgagtaagaataaaaataaatgctaccagacctacatctagtgtccttttattaagttaaagcaagccaccctacagacattgggttgccacataaaatagtcctattgttgcttaggaaaggtctatagacctgaaaaactatggtttggaactactcttttaccctgaataacacattcaatttggaagttgttattgtatgagtgaatgctacagagctcctcggatgcatccttgctgtctgaagctctttaattcaaccattacttttagacaaacaattttcctaggcaagaaaaatattggcaaaaggggcaaaatctcttagagaaagagaccacaaagtagttacaagcaacctacttaccaactgatcctattaagaccaagttctgtagacaggatttagccttcyttggtaattaatatgaataagaggtctacagaaaagctaagaggtccacagaaaagccaagatgccttttaaaacatctcaccacaaccatatggaaaatagctcacttgtttttccattcatttaaccagaaccatttaagaattttaactactcagagactggccaataacaaacacctgtgaattcaaattgcttgttaaataaaccctcacaaatgtgtatacacggatagcctccagtgtggaatgcttcctgtttttaggctactttgcttctttacttctaggagaacctctgattgtatccacccacctcagcacactcctcacccacttctcccaaaccttcttgatcccaaggtccctaaactcctgttcagcaaagggttaactcagtagacttggggtgtacagatcctccacattccaaagaaaggactggtccttcactggctcttgggagacaacctctgatgccctggaatatcttgactgttaaggctgcctttgtattaatataagtgagatcttgggccacaccacatagtttatgctaatggtctgacttatggtgagtgcctgtttttgtgttcacctggggccctgggccaaaatttatcagtttgacctctgggtgggctggagactgactaagatcagtcaggtggatatttcagacctacatgactgacctctaataaaaatcctggacaccaaggcttgagtaagcttatttgttggcaatgtttcatacatgttgtcacacattgatgggaggattaagtgcatccctgtgcaaccccacagcagaaagacaactggaagctcatacctgatttctcctggacaccactctatgtgcccttttcctttgttgattttaatctgtatcttttcactgtaataaacggtgaccatgagcaaaacagcttttctgggtcccatgagttattctagcaaatcactgaacccaagagtactgttggggatcccaatacagcttccagggctattttccataggagaaagcaggagctgcaaatattactcccattgtaattattcatatcattatttccttcttcccatttctaacctcattcctgtccactatacataatcaagatgtgactgtatttttaagagggggttgcaagtttctatttctatatataaattgctgtggcatgacaaagattcctgattgtttccaaatagaatgacaaaagaaattgtttagagtattttaaatcccagactactttccagttacttaaaatttacttgttgatttgtttagatttgtttagattgtttagattcatacaataacaacttccttatagattckggatattagaccattgttggatgcatagttggtgaatattttctcctattctgtaggctgtatgtttactctattgatagtttcttttgctgtgcagaagctatgggcaaaggacatgaacagacacttctcaaaagaaaacacaggctgggtgtggtggctcatgcctgtagtcccaacactttgggaggccgaggagggaggacagcttgagcccaggagtttgaggccagcctgggcaaaagagtgggaacgcatctctacaaaaaaaattctaaaatattagctgagtatagtggcatatgcctgtggtcccagctactcaaaaggccgaagtgggagaatcacttgagcctgagaggtcaaggctgcagagagccatgatcatgctgctgcactccagcctgggcaacagaggaagaccctgtcttgaaaaaaaaataattaaataaaacaaaagaagatatacaggcagccaagaaacatatgaaaaaatgctcatcattgctaatcaccagagaaatgcaaatcaaacaataatgagataccatttcacaccagtcagaatggctattattaaaaaagtaaaaaataacagatgctggcaatgctgtggagaaatgggaacacttatacactgttggtgggaatgtaaattagttcagccactataaaaagcagtcagaggtttctcaaagaaacagaagtaccatttgacccagcaatccagttactgggtatatagtcaaaggaaaataaatcgttctaccaaaaagacacatgcacttctatgtttatcacagtgcaattcgcaatagcaaagacatggaatcaaccaaggtgcccatcaatggtgagttagataaagaaaatgtggtacatacacaccagggaacactacactgccataaaaaagaatgagatcatgtcctttgtagcaacatggatgcaactggaggtcattatcctaagagaattaatgcaggaactgaaaactaaataccacatgstctcacttataagtgggagctaaacattaaatacacaagggcataaagatagggacaacagacactgaggactatgagacagggagcaagagacggggacatgggctgaaaaactattgggtactatgttcactgcctgggagatggaatcatccatatcccaaacctcagcatcacgtaatataaccatgtagcaaacctgcacatgtaccctctgagtctaaaataacagttaaaattattttaaaatatatatatakagagagaaggggggacatggccagatataaggctgtaaataaggagagggacacacggatctttgcatgtcatgctacactacttggatgggatctcataagaaagggaaggccatrtgtttataaaatatctttttaaagcttcttagaaaacttgaactcaagaatgtgtcaaaatttactgacatgttatcagtgaaatcagcaagttgattataatttttatatgtttaatgcaaattaattaatcattctaatcacatttacaacacaattattttggcatagtactccatgattataaagtaggattcttcttgcagaagttgaaaagcaagatcattaaataatttgctttccatwtaatgaagggtgggcctcatatagcaaagcattgcaatgtaatatccattacaaggtcatggatattagaatgactgagcagtattgatttattaagagtcaaaaatgacttcaggccgggcacagtggctcacgcctgaaatcccaacactttgggaggccaaggcagggggatcacctgaggtcaggagtttgagaccagcctgaccaacatgatgaaacaccgtctctactataaatacaaaaattagccaggtgtggtggcatgcacctgtattcccagctactcgggaggtggaggcaggagaaatgcttgaacccgggaggcagaggctgcggtgagccaggatcatgccactgcactccagcctgggcgacagagcaagactcagtctcaaaaaagaagaagaagaagaaagaagaagaagaagaggaagaggaagaaggaagaggaagaaggaagaagaaaaagaaggagaaggaagaagaagaggaagaagaagaagaactaactttacagaaagggaagrttagctcatgtgttagaatggtcagaggcaactttaaatgtagctgctaccatgcctgaatcaaacacaggcaagggatcaagcccaaaaggataaaataaaaagacacatacttttataggggaataatctaccccagttggtcagcataaataaatgtaatatattaaggtatccacctaattagatacttgggaatgaatcccatatgtcagtattttccaaatatgctctttgctgcttttctatctcacaggagtactcataagtagaactgggttgatttgatcacattgcttccaaacttgtgaacaacaataataaagatgcactagggccaggcgtgggtggtggctcatgccggtaatcccagcactttggaaggctgaggctggaggattgcttgagctgacaagttcgagactaatctgggtaatgtggtgagacatcgtctctacaaaaaaaaaaaaaaaaggttaaaaaaaattaactgggtgtggtggcacatgcctgcagccctagctactccagaggctgaggtgggaggattgcttgagcacaggaaacagaagttgcagtgagctgagatcgcatcactgcactccagcctggatgacagagcaagaccctgtctcaaaagacaaacaaacaaaaaaaasatgtactagaacattragtataaagatcaccaagatttatctggcaataaaatatttatctgtgactttttttctgcagacaatttagttaattgttacagaagtgatgccattcattgataaacaaagggaaaaatgtacaaagctaaactatagagttgcactggctttagctgagtactgcttttagtggcaaaatattcctttttggttaagataaatacagttgtttgagtcttaggacatggttgaatgagaaaaggcaagctgatttcagcaacataaacatcagataggccacagtcccatggaaattgttaaagatggcgaaggattcagttactctaagttattaacacttagtcttgcaaaggccaaaaaaggtgacttcatcagtgcatgagaattcatctgctgtctgtatttcctgtcgacttttagattatgaagtaattgtaaagaaaaaaagtccttctgaagtgtaacaaaatatgcactaaataaatttaaagtgttgtgacaaaaagaaatgcctacaggttttgctaacacatggaaactctgagagatttgtaattctctctcttttttttttttttttttggtaatgggagtagcagtatgtctaaaataaccaatcctggtgtatttttgcttaaagatatagcacatagaattaaataactttatacccaacatcctcaaagaacaacttcaaaggagagaagtccttcctgtcaaacttaccaagaccagtggttggccctgatggcaacaaacctctgtggtttgcttcccttgaatcgggaacaaggatccttttttaaagactcctcactggatctcataagacccaaggaattggggtggggcaggggtcggtggggggcgggtgtagatagttgaaaatcacaaataaaaaatacttaatttagtttaattttcaaaaacaaacaaatttgccacatattatgaattaagaattttaaattaaggcaaaacaaaaccatcctcaatttttttctctttttcccataatatgggcagttaaaggagagaaaggaagggaagggaaagatagggaagaacagatagattacatatagagacatatagacacagccagggtacagaggtaaagaaagatgctactaggaaggccaaagtcagaaaacacaagacaatgaaggaaaaagaagggaagggaaaggaaggggaaaagaagggaaggagaaaagaaggaaarggaaggggagtatagtatcatatcctatatgatactatagaagaggatacacagcattatacatttgtcaaaatccatagaacataaaacaccaagagtaaacactaatgtaaactatgggatttgggtaacaatgatgtgtcagtgttggttcatcagttgtaataaatgtaccactctggtgttggatgctgatggtgaagaaagcttgaatgtgtgttggaggggagaggatatatgaaagctctgtacttcatacaccatcaattttgctgtaaatctgaaactgctctaaaaattaaagtctgtttttaaaaaagcaataacctccctgatgaaatcattgatttaaacaaggtaatcaatggctgctaatatcaccaaaaaaaaaagagagagagagagataactagacatccacctcctggtggaggtcaacaatatcacccaagaagtagtcttgaaaaaagagaaagaaaagtcaaatttttagatctaactatattttacaggaaatataggggwagaggagcttgttaaatcacatcataggtatgcaataggcaaactccagaatgtggaaagctttagagaacaaattaacccatacaaataagttgaaagaaaaaaggaaaaaagaccctataaattaaaagagtttaagaatcaaatgaaatgtatcaatctagtttagatcccaatttgaacaaactaactattaaaaacaaaaaaaaagagggccgggcgaggtggctcacacctgtaacaccagcactctgggaggccaaggtgggcggatcacctgaaatcaggagtttgagaccagcccgaccaacatagagaaatcccatctctactaaaaatacaaaatgagctaggcgtggatgcctgtaatcccagctactcgggaggctgaggcaggagaatggcttgaacgtgggaggcggaggttgtggtgagccaagatcgtgccattgcactccagcctgggcaacaagagcaaaactccatctcaaaaaaaaaaaaaaaaaaaagggtatataaataaaagaattaaaaaggggtactcaaacaaatatatgtacgttcttaacagcactagtcacaatagtcaaaagatgaaaaggtagaataggtagggcacaggagacatcgagggcagtgaaagtccataaaaagacaatgtccataaaaagtcaaatggataaacaaattktgtgtgtgtgtgtgtgtgtrtatatatggaacattattcagccataatgaggaataaakcatgacacatgctacaacgtggataaatatcaaaaacattctgctaaatgaaagaagccagacactaaagatcamatagtatataaatccatttatatgaaatatccagaataggtaaatccatagcaacagaaagcagattggtggttgccaggggctagtgggagggggaaatgggactaaatgcttaatgaataaggtttccttttgagatgagtttcctttcgacattttggaactagataaaggtgatgattgtacacaacactgaaatgtycatttaaaaatgttaattttggctgggcacggtggctcatgcctgtaatcccagcactttgggaggccaaggggggcaaatcacaaggtcaggagttcgagaccagcctggccaacatggtgaaaccccatctctctaaaaatayaaaaaattagccaggcgtggtggtgggtgcctatagtcccagctactcgggaggctgaggcaggagaatcgcttgaactcaggaggtggaggtggcagtgagctgagatggcaccactgcactccagcccaggtgacagagtgagactgtctcaaaaaaaaaagttaattttatgttatgtgaattccactttgattaaagaacaaaacacagaagcaattattagctatttggaaaaatytgaatactgactagatctttgatatactgaagaattactggtaattttttggtgwgatgatggtattgtggttatgatttttaagggtgtttggtttcagattagtatartatataataatggatgaaattataccatgtctgggatttgcttttcaatagtccagtgtgaggggggcaggggaagtgggtggaggtacagatgaggcatgacttgactaattgttgaagtgggtgatgcrggttcactatactattttctctactcttgtatgtgcttaaagtcttgcctaataaagttgtaagatttccttttcaagcataattwaaaaaatcaaagattaggctacattgggcttatttagaaatctattaggcacttactctaccctataaaattaaaactttcatgtatctgctgaatctaaaataaaaattgagggtgatggggcctggtggggagagggtccagagtaggctctcagacccgaaactgaatggggtgtctggggcatcagggagctcccttgcctggccctcagtggcctgatggagtaagagcgtttggttgagtgattcagatctggtcactatggtaggagaacaaaaatgcatattgtgtcatatcgtgtacagctccaaaaagaggcactagtcatgagtgccgaaggtgcgggcccacagaagtgggtctttctgcatacgcaaagcacatttctggccagctgcacaaagataacgttgatgcccaggaaagagaagatgatggaaaaggagaggaagaggaagaagattattttgacaaggaactcattcaattaataaaacaaaggaaagaacaaagtcgacaagaaccttccagtagcagccaagaagtaaattctgatgacaggtgaccccaatggagctgagaacaccaaattcctcaccaacacagacagagttacagtcagccagcatggcatcaccctggacctccacaggaggattgtaattggaaaaaagatcgctttaataatacatggagaaacagctttctgtattctttgaggaatagtggtggaccaaaaggatgttctgagtggcattagagtgttgcaggaggctccttgacttggtttcacaaccatagtaattctggagttggttggcattcaaatagtggaacagtagattggaatcataatggtacaggaaggaattccagttggcattctgagggaacaggtgacttttccagttggcatatgaacaacagtaacggaaactagaaatccagtgtatgtagtaaaaataattgcaactaaagtggccctggacataaatttcaaccaggcagaaacagaaattctacttgtcaaatggaagatgtgactatgctatggaacaagaaatcaaataagtcaagcaaatacaatcaagaragatataattggtagtrtcaagaaaatgagaaacttggaatgacaaactttgtacggctgccacatatagaggtccttctgaaagatttacaagtgataaatttccttcggaaggcttacttgacttcaattttgagcagccagaaagccaaaccactwaacaaacagacactgcaacttccaaaattagtggaaagaacagcagtgcagcaacggggaaagccttgttgccagactccttacccttctaaaataaaaattaaaaaggaaaaagatttggtagtactcaagttgaaggaaggaaacatgacaaacttagaggaakcataaggaatttcatatgcacttcttaggagaaataattttgtatttaagccttttttttcttttgtttttagttgatacataataattgtacatatttatgagatacagagggatatttcatgtgtgtatacaatgtgtaatgatcaaatcaaggtaattagcatgtccagcacctcaaacatttactatttatttgtgttgtgaacattcaaaatcctctcttctagctttatgaaaatatagaaagctggctctttaagctttttgtaaatatgcaataaattatagttaaccatattactccatagtgctgcagaacaccagaactcactggatctcattgattaaactgaatatgactgagatcttttcatgaaatgagaagctatggatttagaatcattaaactttaaggctgggtgggcccatccaaacccatcattttactgctcattttaatgctggcaagacccagaaagggttatgtgacttatgaaaacatcttttaaaaataataaaagttgtctgagcacagtgagctcacacctgtaatcccaacactttgggacactgagcatcacttgaagccagtagttcaagatcatcctggacaacatagtgagaccctgtcattacaaaatttaaaaattttaataaataaaagttatattaaaaaactcaaagtatgaaaatatagggggccaggcacaatacctcatacctgtaatcccagcactttaggaggccaaggtggatggatcacctgaggtcaggagtttgaggccatcctggccaacaaaccccatctctactaacaatataaaaattagccgggtatkgtggtgcgcacctgtaatcccagttattcaggagattgaggcagsagaatcacttgaacccgggaggcggaggttgcagtaagccaagatcgcgccactgcactccagcctgggccacagagcaagattccgtctcaaaaaaaaaaaaaaaaaaagggaaaaaatcattcctgattccgtaattcaaacaattgtaaacatttgttaaaattttggggtgtttcctctcagcctttttttttaactcttaggtttgacttttcctaatacaactctaagcatttttacatattaatgcaaatccttagaaacaattattttaatggttgtctaatatttcatggagttgatagagtttactttttcattcttctataatatggcattcatattatttccaactctttataactacaaataaagcaactatgaacatatttatatacaaaacttaaatatagttagtattaccataaaagtcatatttgatttttctcagaagtaagataaaacttccttcctaatggaagcctttttttccttttgaaaatttgttaatggacaaaatagagttagattctccattttctttatggatcaagctatgaacagtcaaaaagataagatgtagaggtgggctgataattgtctttccattatgagcaaaacaatctttatgtgagtagtacaggcaaaaaaaatttaaagtaaaattatactctacctgttgaaaagctttttctgcttgacgttcagcatcaataacttgtctctcaagctgttgcatctgtagagtgagggaaaatataaatacaaaaatttatttttgaaaaatgagcctttctgaaaaaggctttaaaaatctcataattctacctccacctccacctcacctccacctccacctccacctccacctccacttccacctctacccacggtctccctctccctctctttccatggtctccctctgatgccgagccgaagctggactgtactgctgccatctcggctcactgcaacctccctgcctgattctcctgcctcagcctgccgagtgcctgcgattgcaggcgcgcgccgccacgcctgactggttttcgtatttttttggtggagacggggtttcgctgtgttggccgggctggtctccagctcctaaccgcgagtgatctgcgagcctcggcctcctgaggtgccgggattgcagacggagcctcgttcactcagtgctcaatggtgcccaggctggagtgcagtggcgtgatctcggctcgctacaacctccacctcccagccgcctgccttggccgcccaaagtgccgagattgcagcctctgcccggccgccaccccgtctgggaagtgaggagcgtctctgcctggccgcccatggtctgggatgtgaggagcccctctgcctggctgcccagtctggaaagtgaggagcatctctgcccggccgccatcccatctaggaagtgaggagcctctctgcccggccacccatcttctgagatgtggggagcgcctctgccccgccgcccggtctggaatgtgaggagcgcctctgcccggccgcgaccccgtctgggaggtgaggagcgtctctgccaggccacctcgtctgagaagtgaggagaccctctgcctggcaaccgccccgtctgagaagtgaggagcccctccgcccggcagccgccccgtcctggagggaggtggggcgatcagccccccgcccggccagccgccccgtccgggagggaggtgggggggggtcagccccccgcccagccagccgcccggtgcaggaggtgaggggcgcctctgcccggccacccctactgggaagtgaggagcccctctgcccggccaccaccccgtctgggaggtgtacccaacagctcattgagaacgggccatgatgacaatggcggttttgtggaatagaaatgggggaaaggtggggaaaagattgagaaatcggatggttgccgtgtctgtgtagaaagaagtagacatgggagacttttcattttgttctgtactaagaaaaattcttctgccttgggatcctgttgatctgtgaccttacccccaaccctgtgctctctgaaacatgtgctgtgtccactcagggttaaatggattaagggcgttgcaagatatgctttgttaaacagatgcttgaaggcagcatgctcgttaagagtcatcaccactccgtaatctcaagtacctagggacacaaacactgcagagggccgaagggtcctctgcctaggaaaaccagagacctttgttcacttgtttatctgctgaccttccctccactattgtcctatgacmctgccaaatcyccctctgcgagaaacacccaagaatgatcaattaaaaaaaaaaaaactcataaagtcatcatcagtttggatattttaaactagttcactggagatgcgttaaatacagttagcacattaaaggctctttgcatatttaaaagttgatcaaaatgccagagtttcgatacttttaatacaaggactacatatatacctcaagagtattcatcaatagaattttcttcagtggattgtagattaaaaattatggattaacatatattaagaacaagaaaataaatctaagaggaaagaaaggcttcaaatgtcctatttgaccgcttgatcaaaaagtcataatgacatcaaggaagtggtgtgttctcatgaactccgtgggtgctaggtttaaataaactctgggtagttttacattcttacagactgatggagagagtatagaagagattctttgattaaacacacagacacacaaatactaaaacgaatattataaggagaattttaaaagccttaagaaggaccccatgctaatcaacatacgggatgtgttgtaccaggggctgaatacacaaatcgtgaggtaaaactcaattttattctttttggctcagtgctgatgtctggctcactttagagccgtctgtgactcatctctgctcattttcaactttattgctggttggaaggccaggcgtgcagaactcctggtatacctctcacccgcagcagcccggaccccacccgcagtggccgccgcgtcccgctcctgccccgcccccttctctacgccaccgagaagcgacctcccgcagctagagtggcccaaccgggagcgcagccgccagctccggaaggcgcgggaccccaggacccggtcccaggctgcctttgaccctggcgcactgtcctaacgcctggaaaatggtttccgctagtgggacatcattttttaagggtatgttgcttgggagcatttcctgggttttgataactatgtttggccaaattcacattcgacacagaggtcagactcaagaccacgagcaccatcaccttcgtccacctaacaggaacgatttcttaaacacttcaaaagtgatactcttggagctcagtaaaagtattcgtgttttctgtatcatctttggagaatccgaagatgagagttactgggctgtactgaaagagacctggaccaaacactgtgacaaagcagagctctacgatactaaaaatgataatttgttcaatatagaaagtaatgacaggtgggtacagatgaggaccgcttacaaatacgtctttgaaaagtatggygacaactacaactggttcttccttgcacttcccactacgtttgctgtcattgaaaatttaaagtaccttttgtttacaagggatgcatcccagcccttctatctgggccacactgttatatttggagacctcgaatacgtgactgtggaaggagggattgtcttaagcagagagttgatgaaaagacttaacagacttctcgataactctgagacctgtgcagatcaaagtgtgatttggaagttatctgaagataagcagctggcaatatgcctgaaatatgcaggagttcatgcagaaaatgcagaggattatgaaggaagagatgtatttaatacaaaaccaatcgcacagcttattgaagaggcattgtctaataaccctcagcaagtagtagaaggctgctgttcagatatggctattactttcaatggactgaccccccaaaagatggaagtaatgatgtatggcctgtaccggctcagggcatttggacactatttcaatgacacactcgttttcttgcctccagttggttcagaaaatgactgaggsctggagaataatagacctgtgctgtccaagagcacttgaaatgtggctagtccaaattctgatacagtgtaagtgtaaaatacgtacttcattcaataattcatatattattagaaaacagtatgaagatgtaaaacatctcagtaatatttcatattgactccacattgaaataatgttttggatattttgcattaaataaaatatactattaaaattaatttcacctgctttttaattttattaatgtgtctattagaatattttaagttacacatgtagcttacatatttctactggataataaaggtgtagaacatttgttgccaccatgtatggccacatatttaactgcctgtccacatggcagcatttttttttttttttgaaatggagtcttgctttgtcacccaggctggagtgcagtggcacaatttcggctcactgcaacctccgcctcccgggttcaagtgattctcctatctcagcctactgagtagctgggactacaggtacacaccaccatgcccagctaatttttttatttttagtagagacagcgtttcaccatattggtcagrctggtcttgaactcytgacttcaggtgatccacmygcctcagcctcccaaagtgctgagattacaggcatgacccaccrcacgcagccccatggcagcattttaaaaggcagtttattacagggatctagattctggaagaggtttcaaatatttggatatgtaaataactgtgcaagtacattctcagtacctcatatttaatttctgtgaaaatatttcaaatgtttaatgagcaagtaatgtggtttcaaagcattttgttgaattacttgtttagactatggcactatatagaagcagctggacaagcattawgtcttttggatgtctctagaatattccctaaaccaaaaaccaactagcaaacacatgccaataccacattcttccactactggcaatatgctgacaattgtcacttctacaatataactatattctattttcagggaaatttggtttttctggagccttacttagcctggattttgaatattgtcaggattgccaggagaaacagaagaatgcacaaaattttgctagtgaaaaaaatagttctcttaagagaactatgcaaatatcttgtctgatttctcctcaaatgtatagtttctagtgataacaggaaggataaaagtcagcttgcttcactgttacataactaatacaggtctttctacatagtagatatttaatatattacaaattattgatgaaatgacaaagctctctgtcatgcctaaagtacsatgcatatatgaaggacagtatcattatttttaccactgccaaataactttttttctgctcctatggcactgacttcctatcttgtactatcttcccaactacattgtaaagttgtcttgaaggcgcaatcaggctcaaaagttacttgctttcttaatgaaaaggaggtaatccttgaartatgaatatagggaaaactggaaagaatactgaacttaaaggcaagacctaaattggaactcagattccaatactagctatgtgatgatgggtacattatttaacttatctgagtctcctctccctacctgtaaaatgatacaacacttatttcacagcatttataaacagaaaagcatccaacatagtatctaatacttaacaggtgttcaatgaatagttacatagaaattttttaagcagcctatttctaccatatatatgtgttatttttatgaataattttaagttaggaaactctactatttaccaatagtttgccactggactctaaaattcttgtgtataaaatgtggataatataacccgttctgactactttacaggatgttgtagggctaaaaataagaaaatatattcaagcaatgtgaaaagctggtggtaactcatttatttaaaaatattatggtagcagttgtagtgttataatttgaatgataaaactaaaagtcacaaatgtccaaaaacaggattatctaaatatataaataatggtacatccwtacagttagataccatacagtcattacaaatttttatggatggatgaaatgatatatttgggacttgtctcaatataacataggaggaaagaagtaggtcagggtgcagatgaagatgaaacaggattggccctgagttgacaaccatgaaagctgggtgatgtgtacaggagggtccattataacattctgcttacttttgtatgtttgaaaatctctctaataaaatgttttaaatatatatgaaaagatgtaaatgacatatttaaaaataagtgtaaattatatatagaatgatattatacataaatgatatattgagggaaaagggactgcaaagcagtaatgaatgttgcaatcaaatgtttgttaaaaaatttacgtgtgcctgtttttatggaattacataaaccaaggacaaggagttgtctatatctaggtgacaggattatggatatagtagtttgcatcatatatgatgaggcaccagagggagttttacggagctgaaaaaagkaagagaataatggcagggaggaaaawaaatgggtgttagaaacttgcattagaaatagtaggcaatagttaatcaaagataattctgctcccttagagggaatgagtagaaaatcaagaggaagattttcaaataacctgtgaaattagagaggctatatatgaaagtacatagaaaaagggttcaaatgctgaagtggcatctaactaggcaacaactggtgatgatgccactgctaattaggaggtcattagtgacttttgtgattccagctgcactgtggagaagtgagggcataagctggaatgcaagagtctgaatgaattaaastcattaggaagagcaaattaaacctaaagccaacagaaatttaaaaactaacaataaagattagaggagaaatgaataaaattaaaaacataaaaatagagaaaaatcaataaaaccaaaagctggttctttaaaaatatcaatacaattgatagctctctaaccagaccaataaagcaaaaaagaaaaaagacacaaattatcaatatcagtaatgtaatgggagacatcaccacagaccccacagatgctaatgagataacaatattatgaaatacttcatgcccataaactggacaaaatagcaaagctcatttaagaagaaataagttagcttaatagcccaatgtctatgaaataaatcacacttgtagttaaaaactttcccacaaaggaaactccaggactagatggtttcacttgtgaattctacccaaaaatgtatagaagaatgaatagaaactcaacaaaaactcttccagcacataagagaagggaatgcttcctaacacattttataaggccagtattgccaaaaccagaaaaagacgaatatccttgtgaacacagatgcaaaaatctttaacaaaatatcagcaaatccaatccaaatatacacaayaaagatattatgtcatggctaagtggggtttatcctagsaatgcaaggttgttttaacttttgaaaaataaaccaatgtagttcaccatgtcaagtggctagaaaagaaatatcatttcgatagatgaagaaaaatcatctgacaaaattcaacatccattcacaataaaaatctcttaacaaactaaaaatacaaggaatttctgatacctaataaaaggtatctacaaaaaaacctataactaacatcatactcaatgggaaagcctgaatgctttcctccacaagaatgtcgttttaccacttctactcaaggttttactgcaggtgctaaccaatgtaatagccaagaaagaaaaataaaaagcatatatactggaaaggaagaaataaagcaatatttattcacagatgacatgagtatctacacataaagtcccaaataatctacaaaagaactaataaatgagtttattaaggccataggatacaaggtcaatatacaaaaatctgttgtatttctatataagagcaataaatggccgggtgtggtggctcacacctgtaatcccagcactttgggaggccgaggtgggtggataacctgaggtcaggagttctagaccagcctggccaacatggtaaaacccggtctctactaaaaatacaaaaaatagctggtcgtggtggcaggtgcctgtaatcccagctactcagtggggggcagaggcaggagaatcacttgaacccaggaggcagaggttgcagtgagccgagattacgcatcacactccagcctgggggacaagggcgacacttcatctcaaaaaaaaaaaagttaaaaaaaaataagagcaataaacaattgaaattagaatttaaaaaacagtagcatttacaaaagcatcaaaaccataaaatacttagctatgaatctaacaaaataagcacaatatttatatgctgaaaatcacaatatactgataaggaaaattaaagaagagctaaataaatggagagttaaactatgagtcagaagactcgatattattgtcagttctcttccaattgacctatagattccacccagtcttaatcaaaatcctagcaggcctttctgcacaaattaagaagaagaatctgaaatttgtatagaaatgcacaggacctagaatagcctaagcagcttagaaaaaaaaaattagaatattcacaatacctgacatcaagacttataaaattgccaatagtagtcaagagaatgatatttatataaaaacagacatattagatgaatagaacaaaatagggttcagaaatatactttaaaatatgcaatcaattttttttcaatttttattggtttactctatcttcattgtcagatcctatagccatcacatactacaatctccctactctagttgactgaacctcattctctaaatttcttagggaaaactcctgggaacaatattttctgagttctttaattgctaatagctgcttgctatgccctttatacttgaaagccagttctgcttaatacgaagtccttggatcatatgtgctttccttgatatctgaaacatggtagtccatgttctcctggcataaagcattactatcagtgtaagaacataattttattctcctaatgatataaaggtcatgtttttgttttttgcctaaatacctaaaaaatgttttctttttctttaacatccagtattttgatgaaaaatatgccttgaagtgggtcattctaggttgatgttctcagccacacgatccactatttcaatatgcawtattttgcttttttaaggttctgtaaacgtttcttaaattacactgtttgtatttgtttcattcccttgttttcttcaggggcttcttttatctgtatattgtatcttctttacttatcttcaatactagtcattgtttcaaatccttttcatctttcctcattttgatgtttaaaagtttctgggaggctgagacatgagaatcactcaaacccaggaggcagaggttgcagtgaactgagatcacatcaccgcactctagcctgggccaacagagtgagactccgtctcaaaaaaaaaaaaagtttcttcsttttcaccttcatttctcattaaagcattatgtgttgagtttatccattcttcggttccttctgctttagtcttagtttataaaatatatttttctacttgtaattctttgttgagttctatcacctcatttctgatttttttctaattatgattcatgctattcgtgtcttatatcattttgttaatgtcttttggttaatttattttttcccactatttaaagtcgagatataatacacatgccataaaattcaccttttaaaacagtgtaattcagtggtttttagtatattcaaagagttgtgcaaccatcactgctaattccagaacatttctatcaccctccccctaaaaaaaccctgtacccattggcagtcattcccccattgctttgctctgcatttctttaagtatgagtgaggctgaatacctttttccatgtttattggctactagtattttttgtatactatcttttcatagcctctgcttgcatggtgattactttgagtctgggtatttgaaccagtgtctagtctctcaaggaagttaacagattgctggaactccatgaacttcaactttgcccaagtaggggccttagtcaaccaaagaggactgagaagcccttgtaagtttaagtaacggactattcctggagctctctgctgcactgctgcttagctcaaccagctgaccattccctactccttgatcatccagagttctctcaagttagagagcagttaccaccttttcccttcccccacctttgtgcataatatcagggatgggtatcaagggaactggccagactcaaagctaattaactcttcgggtaacaactgtggaaacacaaattgaagagttgttttattattgttgttgttttggggatagggtctcactatgttgcccaagcaggtctcgaactcctgggctcaagggatcctccctcctcagctttcccagtagctgagactacagacaggtaccattgtgctgggctttaatmaaaaagttttgatcctgtagttctactctgacccattcattgtactttagagaaccttccagaagaaagaattgcaattatttaaaaatgttatatacacaagaagttcatttgcaatgttgttyaaactaatggaaaactataagtagcctgtatgtctaatagtaagggaactgatcagtaaatcatcagtatttatttactgagctctttatgattatgaatacagagactaggggacaacacagaacatgataatgataaatgatctaatattttatgaaacaagtttatttaaactatttacatctatgtatatatattttaagttatacatttaaaaataagaatgtggccgggtgcgatggctcatgcctatattcccagcactttgggaggccaaggtgggtgaattacctgaggtcaggaattcgagaccaatctggccaacatgataaaaccttgtctctattaaaacacaaaaattagccaggagtggtggtgggagcacgtaatcccagctacttgggaggctgaggcaggagaatcacttgaacccgagtggcagaggttgcagtgagctgagatcataccactgcattccagccagggtgacagagccggacttcatctcaaaaaacaacaacaacaacaaaaaagaatgctaatagtagtgttgttaaagagcaggcagtatttctccatttttccaaactttttaaaaaattgagaagtaattcacatgccacaaaattaaccactttaaagtgtacaattcagcgtttttttttactatattcacagagttgtggaactattagcaccatttaattccagaacagtttcatcacctcaaacagaaagcctgtacctattagcagtaattccccattgtactctcccaatcgccctttgcaaccaatagtctactttgtttccatgattttgcctattctgaatatttcatatgaatggattcctataacatgtgaccttctgtgtctagcttctttcacttagcacaatgtcttcaaggtccatccatgctgtagcatatgtttgtacttcatttctttttatgcctgaatgatattccactatacggatataccaaattgtgtttatccattcatcagttagttgatgagcttttgcgttgtttcactctttgattattataaataatggtgctatgaacattcatgtaaaagtttttgtgtggacttgtccattttcttaggtatctatttaggagtagaacttctgggtcatataataactctatatttaactttttgaagaactacccaactgttttccacagtggctgcacaattttacatttccaccagcaatgtatgagaccttcaattttttcatataatgcttgttatyattgtccatctctttgactacagccatcctagtgagtatgaaaagatgtccaggtaattaaaaggagagaggagagagtcttttcaacaaatgatactagaagaaatagscacatracatttcctttaaccattatcttrcatcatatacaaaaaccrtgttccttttccacactagaaaaaaatccttgtaattctgtgttaggcaaagatttttcagaaaggatactaaaagcatgaaccaaaaaaattggtaaaatggactttatacccattttaagtgtctgtttttcaaaacacactattaagaaaaatgagatactaagccattacttactatcactaagctattattactattactattactaagccaatacttactattaagaaaaatgagatactagaaaaattagtgcaaaacacatctgataaaagacttgtatccagaatatataaggaatttttacaattcaagaatacaaataaccccatttttaaaaatgctaaaaggatttagacagatactttaccaaaaaataaatatggatrgcaagttaaataygtaaaaagatggtcaacatcattagtcattagagacatgcaaattagaactaaaatgaaatacaactacatacctattaatatggctaaaattacaaagattgaatatgccaaatggtggtaaaactgcagagcaagtagaacactcaagcattactggtaggaatgcaaaatggtacagtctccttagaaacagttcggcagtttcttaagttaaacatatgttgggggaggagccaagatggccgaataggaacagctccrgtctacagctcccagcgtgagcgacgcagaagacgggtgatttctgcatttccatctgaggtaccaggttcatctcactagggagtgccagacagtgggcgcaggccagtgggtgtgcgcaccgtgcgcgagccgaagcagggcgaggcattgccttacctgggaagcgcaaggggtcagggagttccctttccgagtcaaagaaaggggtgacggatgcacctggaaaatcgggtcactcccacccgaatactgcgcttttcagaccggcttaaaaaacggcgcaccacgagactatatcccacacctggctcggagggtcctacgcccacggaatctcgctgattgctagcacagcagtctgagatcaaactgcaaggcggcagcaaggctgggggaggggagcccgccattgcccaggcttgcttaggtaaacaaagcagccgggaagctcgaactgggtggagcccaccacagctcaaggaggcctgcctgcctctgtaggctccacctctgggggcagggcacagacaaacaaaaagacagcagtaacctctgcagacttaaatgtccctgtctgacagctttgaagagagcagtggttctcccagcacgcagctggagatctgagaacgggcagactgcctcctcaagtgggtccctgacccctgaccccggagcagcctaactgggaggcaccccccagcaggggcacactgacacctcacacggcagggtattccaacagacctgcagctgagggtcctgtctgttagaaggaaaactaacaaacagaaaggacatccacaccgaaaacccatctgtacatcaccatcatcaaagaccaaaagtagataaaaccacaaagatggggaaaaaacagaacagaaaaactggaaactctaaaacgcagagcgcctctcctcctccaaaggaacgcagttcctcaccagcaatggaacaaagctggatggagaatgactttgacgagctgagagaagaaggtttcagacgatcaaattactctgagctacgggaggacattcaaaccaaaggcaaagaagttgaaaactttgaaaaaaatttagaagaatgtataactagaataaccaatacagagaagtgcttaaaggagctgatggagctgaaaaccaaggctcgagaactacgtgaagaatgcagaagcctgaggagccgatgcgatcaactggaagaaagggtatcagcaatggaagatgaaatgaatgaaatgaagcgagaagggaagtttagagaaaaaagaataaaaagaaatgagcaaagcctccaagaaatatgggactatgtgaaaagaccaaatctacgtctgattggtgtacctgaaagtgatgcggagaatggaaccaagttggaaaacactctgcaggatattatccaggagaacttccccaatctagcaaggcaggccaacgttcagattcaggaaatacagagaacgccacaaagatactcctcgagaagagcaactccaagacacataattgtcagattcaccaaagttgaaatgaaggaaaaaatgttaagggcagccagagagaaaggtcgggttaccctcaaagggaagcccatcagactaacagcggatctctcagcagaaaccctacaagccagaagagagtgggggccaatattcaacattcttaaagaaaagaattttcaacccagaatttcatatccagccaaactaagcttcataagtgaaggagaaataaaatactttacagacaagcaaatgctgagagattttgtcaccaccaggcctgccctaaaagagctcctgaaggaagcgctaaacatggaaaggaacaaccggtaccagccgctgcaaaatcatgctaaaatgtaaagaccatcgagactaggaagaaactgcatcaactaacgagcaaaatcaccagctaacatcataatgacaggatcaaattcacacataacaatattaactttaaatgtaaatggactaaattctccaattaaaagacacagactggcaagttggataaagagtcaagacccatcagtgtgctgtattcaggaaacccatctcacgtgcagagacacacataggctgaaaataaaaggatggaggaagatctaccaagcaaatggaaaacaaaaaaaggcaggggttgcaatcctagtctctgataaaacagactttaaaccaacaaagatcaaaagagacaaagaaggccattacataatggtaaagggatcaattcaacaagaggagctaactatcctaaatatatatgcacccaatacaggagcacccagattcataaagcaagtcctgagtgacctacaaagagacttagactcccacacattaataatgggagactttaacaccccactgtcaacattagacagatcaatgagacagaaagtcaacaaggatacccaggaattgaactcatctctgcaccaagcggacctaatagacatctacagaactctccaccccaaatcaacagaatatatgtttttttcagcaccacaccacacctattccaaaattgaccacatagttggaagtaaagctctcctcagcaaatgtaaaagaacagaaattataacaaactatctctcagaccacagtgcaatcaaactagaactcaggattaagaatctcactcaaagccgctcaactacatggaaactgaacaacctgctcctgaatgactactgggtacataacgaaatgaaggcagaaataaagatgttctttgaaaccaacgagaacaaagacacaacataccagaatctctgggacgcattcaaagcagtgtgtagagggaaatttatagcactaaatgcccacaagagaaagcaggaaagatccaaaattgacaccctaacatcacaattaaaagaactagaaaagcaagagcaaacacattcaaaagctagcagaaggcaagaaataactaaaatcagagtagaactgaaggaaatagagacacaaaaaacccttcaaaaaatcaatgaatccaggagctggttttttgaaaggatcaacaaaattgatagaccgctagcaagactaataaagaaaaaaagagaggagaatcaaatagacacaataaaaaatgataaaggggatatcaccaccgatcccacagaaatacaaactaccatcagagaatactacaaacacctctacgcaaataaactagaaaatctagaagaaatggataaattccttgacacatacactctcccaagactaaaccaggaagaagttgaatctctgaatagaccaataacaggagctgaaattgtggcaataatcaatagtttaccaaccaaaaagagtccaggaccagatggattcacagccgaattctaccagaggtacaaggaggaactggtaccattccttctgaaactattccaatcaatagaaaaagagggaatcctccctaactcattttatgaggccagcatcattctgataccaaagccgggcagagacacaaccaaaaaagagaattttagaccaatatccttgatgaacattgatgcaaaaatcctcaataaaatactggcaaaccgaatccagcagcacatcaaaaagcttatccaccatgatcaagtgggcttcatccctgggatgcaaggctggttcaatatatgcaaatcaataaatgtaatccagcatataaacagagccaaagacaaaaaccacatgattatctcaatagatgcagaaaaagcctttgacaaaattcaacaacccttcatgctaaaaactctcaataaattaggtattgatgggacgtatttcaaaataataagagctatctatgacaaacccacagccaatatcatactgaatgggcaaaaactggaagcattccctttgaaaactggcacaagacagggatgccctctctcaccgctcctattcaacatagtgttggaagttctggccagggcaatcaggcaggagaaggaaataaagggtattcaattaggaaaagaggaagtcaaattgtccctgtctgcagacgacatgattgtttatctagaaaaccccatcatctcagcccaaaatctccttaagctgataagcaacttcagcaaagtctcaggatacaaaatcaatgtacaaaaatcacaagcattcttatacaccaacaacagacaaacagagagccaaatcatgagtgaactcccattcacaattgcttcaaagagaataaaatacctaggaatccaacttacaagggatgtgaaggacctcttcaaggagaactacaaaccactgctcaaggaaataaaagaggatacaaacaaatggaagaacattccatgctcatgggtaggaagaatcaatatcgtgaaaatggccatactgcccaaggtaatttacagattcaatgccatccccatcaagctaccaatgactttcttcacagaattggaaaaaactactttaaagttcatatggaaccaaaaaagagcccgcatcgccaagtcaatcctaagccaaaagaacaaagctggaggcatcacactacctgacttcaaactatactacaaggctacagtaaccaaaacagcatggtactggtaccaaaacagagatatagatcaatggaacagaacagagccctcagaaataatgccgcatacctacaactatctgatctttgacaaacctgagaaaaacaagcaatggggaaaggattccctatttaataaatggtgctgggaaaactggctagccatatgtagaaagctgaaactggatcccttccttacaccttatacaaaaatcaattcaagatgaattaaagatttaaacgttagacctaaaaccataaaaaccctagaagaaaacctaggcattaccattcaggacataggcgtgggcaaggacttcatgtctaaaacaccaaaagcaatggcaacaaaagccaaaattgacaaatgggatctaattaaactaaagagcttctgcacagcaaaagaaactaccatcacagtgaacaggcaacctacagaatgggagaaaattttcgcaacctactcatctgacaaagggctaatatccagaatctacaatgaactcaaacaaatttacaagaaaaaaacaaacaaccccatcaaaaagtgggcgaaggacatgaacagacacttctcaaaagaagacatttatgcagccaaaaaacacatgaaaaaatgctcaccatcactggccatcagagaaatgcaaatcaaaaccacaatgagataccatctcacaccagttagaatggcaatcattaaaaagtcaggaaacaacaggtgctggagaggatgtggagaaataggaacacttttatactgttggtgggactgtaaactagttcaaccattgtggaagtcagtgtggcgattcctcagggatctagaactagaaataccatttgacccagccatcccattactgggtatatacccaaatgactataaatcatgctgctataaagacacatgcacacgtatgtttattgcggcattattcacaatagcaaagacttggaaccaacccaaatgtccaacaatgatagactggattaagaaaatgtggcacatatacaccatggaatactatgcagccataaaaaatgatgagttcatgtcctttgtagggacatggatgaaattggaaaccatcattctcagtaaactatcgcaagaacaaaaaaccaaacactgcatattctcactcataggtgggaattgaacaatgagatcacatggtcacaggaaggggaatatcacactctggggactgtggtggggtgggggaaggggggaggggtggcattgggagatatacctaatgctagatgacgagttagtgggtgcagcgcaccagcatggcacatttatacatatgtaactaacctgcacaatgtgcacatgtaccctaaaacttaaagtataaaaaaaaaaaaataaattccttaattggcaaaaaaaaaaaaaaaaaaagttaaacatatgtttaccatagacctataaccctactcctaggtgtttacttaagagaaataaagacatatacatccaaacacctgtatgtgaatgtttacagcagctgtattcgtaattgccaaaactggaaacaacccaaatgaccatcaactagtgaatggataaacacatcatggtgcacacgtacaatggaatactactctacaataaacaggaacaaactatagatacagacaacactggtgaactcaaaagcattctaaacgatagaggccattcactaaaaactatacactttatgtcatactatatgatgctctaaaataggcaaaactaaaggtccagaaactatatcagtgattgccagggcttagagtttgagaagaagacagactataaaggcgcaggagggaaatttctgaggtgatggaaatagtgtttatgttgattgtggtagtggttacggaatcatatatatttgccaaaactctttgaactaaacacccaaaagggtgacttttacatatgtactcaattaacttgaccaaaaaaawtttttaaaaagtgccttgcaggccaggcacagtggctaacacctgtaatcccagcactttgggaggacaaggcaggcggatcacttgaggtcaggagttcgagaccagcctggccaacagggtcaaacactgtctctactaaaaatacaaaaattacccaggcatgatggcacrtgcctgtagtcccagctacttgggaggctaaagcaggagaatcacttgaacctgggaggcagaggttgccagtgagctgagatctcaccactgcactccagtgcagtgagactgtctcaaaaaaaaaaaaaaagtgccttgcaaccccaaattccaaaacatacaaagaaaactaagaaagacagataacaatatcaatggtcaaaagaccaatttagtctggtaaaataaaaatgataacaccatgtgaaagacttcagatttcttatgtttaggattgtcaaagagatgaaatgagaataacatctattttttaaaggacaagaattgaaaaaaaaaagaagaaaaacagcagggaggtgttaaacaagaacgaccaggcgagaaaataaaccagtttaaagtctttgccaggcttggtggctcacgcctgtaatcccaacactttgggaggctgaggcaggcagatagatggcttgagcccaggagtttgagaccagcctgggcaacatgacaaaaacctcgcttytaccaaaaaaaagaaaaaaatatatatatacaaaaattagccaggcatggtggcacacacctgtattcccatctactcaggagactgaggtgggaggatcgcttcagcccaggaggtcaaggctgcagtgagatgagatcaagtcactgcactcaggcctaggcaacagagtgagactctgtttcaaaaaaaaaaaaaaaaaagaaagaaaaaaaagtcttaaaaatttagaaatacatagtcactgaaagaaaaaactcaatagatggttcagtagccagcctctaaatgtctcgcaatgatcctcaccttctggtaatcacacccatgtgtagttgcttccttcacaacatagggctgacctttgcaaccaacaggatattgtggaaatgatgaagtatgacttctgagagtaggtcataagacgcactgcatcttccaccttgcattctcttggatgacttgctctgggggaagccagccaccatgttgtgagaaccctcaagcagtcctgtggagacatccacacacttagggactgaggcttcctaccaacagccaatacccatttgccaacaaccattttggtgaaccattgaaagtgaaccctccagctccagtcaagccttcagattactacatcccaggccaacattttgactgcaacctcatcagaaacataagctaagttgcttccaaatttctaatccataaaaactgtgcaagataataaatgcttatagttgttttaagccatgaaattttggagtcatttgttaatacagcaatagataactaatacagatgaagtaaactatactctgaacccagtagaagagagagctcataacatgaaaaatggtacaaacaattcatgtatcatttaatacacgtaagtgtgaaaaatataaattaccagatttaagagacatgcagagacttcaaagtaatgggaaggagcagaagaaaacaagtgagtaaataggaatagcacaattatgctgaaagataaaagtacactccctgtataatgcagaataattgcctaaggcctatatgttttattttaaaaaatgaaatgaaagctcaagataataatacaaaggaagatgaagaaatattcaatgggtagttgaataatgtgaagatcactgttcagaagacagaaaatgatattgtgttaactttacsttctgcaaggacaatttatattatgtatgtgtgttataatttaaagtgtaggcacaattgtagatacrgaagaaggagggcaaaacttactgtttacccttaaaattttaagacacacaggtaatataaataattatctgcsccaccctacaccagtctgcccggtatctatcaatgctgcagataytgggaatacatttagagatcatcttctgcagaggtaggtccaccttcttgaagtacagacagacctgcatggtgcactacatgtgaaacttaaaagataaaaacaattcaatttctcaatagacagaaacaagtttatgctagacaaccagaaggtgatccagtaactcctatcccaygtgctctttttccatgggatgtcctccatcaagagataaaagatatttccccttcccttaaaactgggccaccctgtgatgggctttggttgttagaatgctttgtaccttttgagactgggcctgaagagatttgcagcttmcacttgctctttcttggagccctgaatcaccatgsacagagatctggctaccttgggagcggtttagtagggtggctcagatagtttccagttgtttcaccactcccagctgaggcatcagatatgtgagtgaaatcaaggtgtggcggcgtgcacctgtaatcccaactacttggaagcacctgtaatcccaactactaggagggctgagatgggaggccaggagacctagacatccaagtgaaatcatcttggatatccagacccagctgtccgagcacccgcagtgagtccaccctccagctgatttgccaactgaatgcagtcacatgagtgatcccattcaatgccaaacagagtaaaagaaccaccaacagaatcatgaacaaataaaatgattgttaattgaagccactaaggtttttttgttttattttgttttgttttgtttgttttttgacacgragttttgctcttgttgcccaggctagagtgcaatggcgcgatctcggctcactgcaacctccacctctcgggctcaagcgaktcttctgcctcagcctcccaagtagctgggattacaratacttgccaccatgcctggctaattttttgtatttttagtagagacagggttttaccatgttggccaggctggtctcaaactcctagcttcaggtgatccacccgcctcagcctcccaaagtgctgggattatgggcgtgagccactgcacccagcccactaaggttttctctaatggacaaaaattgtatatatttgttgtgcacaacacgatgtttttaaatatgtatacatcgtggaatggctaaatcaataaagctgctaagttttgaggtagttttttatgcagcaatagataactaaaccccaaggttagcctgttatgtgtagatctgtaaagataatcctctgactattcctgtgatcatctatctggtcatcattccactggaagccactctcattttgacatgcagcttctaggaatatcttcatatcttctcttagctctcagtccttggatgtgaaatggagaaattcagtgtctcagcttcaagaattatactcataaaaagtacagagcttttcctaactttccattccacaaactgtataaacatataccaaaaataaatgtattacacagatttgctttgttttgaggcaaaaaaaatgcccatttaaattgttaagataggctgggcacagtgactcatgcctgtaatcccagcactttgggagacagaggcgggcagatcacttgaggtcaggagttcgagaccaacctggccaacatggcaaaatcccatctctatcaaaaatacaaaattagccggcmtgatggcacacacctatagtcccagctactcgggaggctgaggcataagaatcacttgaacccaggaggtggagattgcagtgagcygagatcatgccactgcactccagcctgggcaatacagcgagactctatctcaaaaaaaaaaaatcactaagatacattccagattaaatagatgatgaagtattaatggcacaatgataagttaacctttagaagaaagatttttctgaacaaagaatgtgtatttttttcttttcatgaaaatgcatctaatattacaaattaaaagtctgctgctgttgcaaagctcaaggagytgttgagggctgaattactctcccagacgaaaaatctcattcmgttgtaataatcatcctaccccaagtgagatttccaacccatccccacacaaccttaggctttcaaagtaggtcgttttgtgatcatgttggaaaaaccactagttctttctctaggacaaggtgggacatctgaagtctttctggttgcctgccatttttccattctatggtttctaatggatttacacaacatttagcatcttccattgtccatcaaagatacataattacctaaattttaagagcttcatgaaagttyaaattgaaggtgctggtttstgttccagaaaatgcctagtttctaaagtgttatctaaagaaaaatcaatcccagctattgtaagactttcagcagttcctggttttgatactctgctctccactgctcttgatttcctaacctttccttcaccaaatcccccaccactacactatcctatacagatatttttttgttgtttttaattatccccaacatttccttgccacattmcagtttcaagttctattctgttataaagtatttgtgcgggcctttattattattattattattttatttttatttattttttagcccaggcatcattatagcactgcagcccccggaacttctgggctcaggcgatcctcttgcctcagcctcctgagtagctggggctacaggtgtgcacaccacacctggctaattttgatttctttattttaatttttttgagatggagtctcactctgttgctcatgctggagtgcagtggcatgatctcggctggctcactgcaacctccatctcccaggttcaagcaatacccccgcctcagcctcctgagtagctgggactactggcgtgtgccactgtgcccaactaatttttgtatttttagtagagatggggtttcaccatgttgtccaggctggtctagaactcctgacctcaagtgatctgcccacctcagcctcccaaagtgctgggattacaggcgtgagccaccacgcctggcctatttttttaattttttggtagagatgcggggggggggtgtcttactatgttgcccaagctggtcttgaactcttggcctcaagcaatcctcccatctcggccttccaaagcactgggattacagacatgagccactgtggcagccaatgctggccattaaaaaaaaaaaaaaaaaagttaaggagttaagagttttaagtggttacacttaaagaacagaaattcagtgtataaaaatcaacacctggccgggcgcagtggctcacgcctgtaatcccagcactttgggaggccgaggcaggcagatcacaaggtcaagagatcgagaccatcctggccaacatggtgaaacctcatctctactaaaaatacaaaaaaattagctggatgtggtggtgcacacctgtagtcccagctactcaggaggctgaggcaggagactcgcttgaaccggggaggtggaggttgcagtgagccgagatctcaacactgcactccagcctggcaacagagcaagactccgtctcaataaataaataaataaataacataaaatgtcaactacttccaaaaggtttattaataaaagtaaatgtactcttttagccaattcttttaatatttgccttcatgttttaagtaacatgcttctgtttcttttgacttttttagtttagtgatttcttattcactcacttaatgaaaaatgaggatttagytctctgttctccttgccatccatccaaacaaatacacttcctatctcccattctcccaatatgtttatatcttacctttggttaaatcattgttcagaaatagtattattgtaactatgtgtgatattcagagctgaaccatgtaaaaccatgtaaaagaactgtttactttttcctttcctgtcttttttttcctagagttaaatgtcttttattcagcttctcatgaatgaatcaataattcaactccaaattcccaccactgtgtaaattgtctctcaaaatgtttgttcacgtctggttttctaccaatttcatgtttttaagccactcccagaactgacctgtgccaggctcaattggttcacctstctgcctgggcacagctgacttcttggggagacccctcaactttctcccatatagaatctcttgtttcctatatcccatgccttcctcgttcttggtttacttmctccttttaataaagcactccttctggagagtcctcagagaagttacatgggaccttgaatgtcttcaaaatatctttattctaccttcaaataaaattmataattggcctcggtgcagaattctgggtttgatataattttccttcagaattttgaagacattttttcattatcctctaatttctagtggtgcttttgaaaggtctgaagccatttcaattcctgatgctttgtatgtgaactgttttttcctctgaaagcttgcagaatcttttctttgatctctatattctaaacgttcattatgatgtaacttgaggtggaaattatgttaatctgttatggtaggttcttggtagacacrttcaacttggaatcttgtatgcttcaattctaggaaactttcttgtattgtttcatttattttcttccctccagtcttcctattacttggatcttggacatattgaactggacctctaaatttctcatcttttctctcctattttccatctctttaatgttttgctttacatcccaggaactttcccttagtttatatttcaaccctgctcttaggtttgccattttttctaccatgtttttggttttctaagagctcttatttattctctgaatattccctgtgtcatggatgcactatcctttcctttctctctgagaatattaaatgatagagttttgctcrttttgttttgcttacttttccccacataggcaatgctggttttttctgattgtgccctgtctttcgtgttagaggctttcttcagatgtctggtcatccatgatgtgatacgtaggtttaagggtgaaggactaaaaagctgactagaaactttggcacatatgtggggtttgttaaccagaaaacctaaccttgggtgttctggctgggctccctgttggggaactactgatgtcagcatcactatttctttcctcctggactcatggagtccctagagacttctatctcctcctgtagaataaagggtggctgctagcattttaggagccaagtgggagaaaggaggttgggggtgaagggccagcttaccattaaatatgcatacagtcagttagttcccctatttttagtgtagcagagttctggatagcatagcctagaataaggcttggagaataaggcttgagctcctccttctaagggccaaatgccctgcagagccctgtaaagacctagaggcggagtgacatgaaagactgaaaacagtaggtattaatgtaaaatctgtggcccttagagtcaactaattcattgaaaccttctctcttaaacccatctgccaaatgtctagcaactaagcatttacttcctgctaaaaaattgaaaagttattctcttacaaaattgaataagtgaattggagtgcactagtccaacagctatggcatctatgacctcaccgcccagcagatactctcccaccctctcacrctaaagaaaagattgactgctaaccagcaactgaccatttatacataattgtcagtttactttgcaggtgtcctattcttaaatataaatagaccactaaaaatcatcagacatttgagaaaagtttgcaacctgaaaagtaattacaaacataaaaacaggaaaataatcctagaagaaagaaagataattcagggaacagaagataactttttaaaaattcaaattagtgtttaggaaccaggaactttcaaatacattatttcacagctatgctatgagacaggaattgttattcccattacagagattaggaaattgatgttcagagtgaatatgccttgttcatggctgggatttcagtcttcatgttctgattccctaatgcccttttagttgaaccacaggtgctatagaatttatatgccagacgcacacagtgtatagttatacagaactatatgaaaatcagagtcccaaatacaaaaaaaaagacacaaaaatcttagctgaaaagcatttgtcttgatttctgtcctttgctatttgttcagcctaggaatcttttatctgtaacttaaaagcataacattcataataggaaaaatgctaagttacatgttatcagggaacttatcacagaaagaaacaaagggatagaaatataaccaagagaggctaaatttgaaatttgagggccgggcgcrgtggctcacgcctataatctcagcactttgggaggccgaggcgggtggatcacaaggtcaggagttcgagaccagcttggccaagatagtgaaaccctatctctactaaaaatacaacaatggttgaggcaggcataatgaatacacataacagaaactcaatgtttgctgaacaaaatgaataaatgaatgaatgaatgaatgaaaagattttaactccaaaaaattatgttgtgaggataaactttgataaagggtaatcactacattttcacaatctatattacagattataaattctgaacacttcacattgcattaatgtaaatatacattaggtatatccaataaaacttagattattttaaaaccagtttaaatataacagtagtaggaaaggtaatgctggccaggcgcggtggctcatgcctgtaatcccagcactttgggagcccaaggtgggcagatcacaaggtcaggagttcaagaccagcctggccaacatagtgaaaccccgtctctactaaaaatacaaaaaattagccaggcatggtgatgcatgactgtagtcccagctacttgggaggctgaggcaggagaattgcttgaacccgggaggtggaggttgcagtgagtagagatcgtaccactgcactccagcttgggcagcagagtgagacttcaacttaaaaaaaaaaaaagaaaaaagaaaagaagaaaggtaatgctttgcttttgagtgattatttgtttctattaatataatcattcaagctggacaataactttgcaaaatactcaaaaaagcaatgcagacaatattcatgtaagtttttactttcacaatatagactataatgtaaaccttgggtcaattccatagccaatctatattaagtcagtaaaagaaacctgaaatggccgggtacagtggctcacgyctgtaatcccagcactttgggaggccaaggtgggcagatcagttaaggttaggagtttgagaccagcctggccaacatggtgaaaccccatctctactaaaaatacaaaaattagctgggcatggtggtgcacacctgtaatcccagctactcaggaggctgaggcaggaggatcacttgaacccagggggcagaaggcaccactgcacttcagcctgggcaacaaagcaaaactccatctcagaaaaaaaaaaaaaaaaaaaaaaggaaagaaaaacaaacctgaaatgatctatggtcccatatcaggctttagacaaaaataagtattttatgaacaggccaattatgtaataacaaaatgaagcagcaaattctaagtgcttaatttactgctacagaagtaccctctgtagccaaagtgaacttagcagcaagtggcagagggaaatttgccactgagcctgtatacttayagagcctctcattgttaaagggattgtatacaaataaatttgtttaatggattggttaatttaggtggaatcctttaggaccttcacacccactgatgtggacagcagttccctgccacgtgtctctcttcctgacttttcccccacagascccatgaaagattctaccaccaaacattatttgatgttgttataataaataatatcttcaaccagtaaccaaagatgtgacatttaaattagcctatacggtcccattgttagtatatgtagaatttccattagacactgtgaaacattaggcaagccagtagagtaactgagggaatgtataatttaaataggttaatcatgatattgtactggattgttgggtaaaagcatatactatgctgtccaaggactccttattcctatgaggcaatccaagtctgcttcaaggggatcacattcacaaaagaaatgccaagtggcaggaaattccagatggcaatgccacatcaggtagaggtagcatgaggttatgcgagcaatgctgatgtccaaagggaaaattcttcatatttttctccctttccttttcaccgaaaatctaactcataggaaataacatttcacttcaactgacaaagaaactttcctttttccctccctgactcagaaactaactagtaatattgtaaagtaggaaaactacttaaatctcagcttccctgaagagtttatatttggcatactagggatatttccaacaccattccttaaattcctctaaagacctctcccacttacagcagcacttgcccaagacttcaataaggcctttttcttcacaagcttcaatattctaagttacttggaaactgtgatgaaaaaaaataggtgcaaaacaacttttctaaaagatcccatgtattatccaacttcatctccaaaaatatagggcatatataattgaaattcatctctaattataaaaacacctagatcatctcacatatttttcctttaaaaattcagaaatacatctgctatcaatatgtaattacatttaaggccaggcacggtggctcacgcctgtaatcccagcactttgggaggctgagatgggtggatcacttgaggtcaggagttcaagaccagcctggccaacatggtgaaaccccgtctctacccaaaatacaaaattrgccagatgtggtggcccatgactgtaatgccagctacttgggaggctgaggtgggagaatcacttgaatccaggaggtggaggttgcagtgagccaagattgcrcaactgcactccagcctgggcaacagagtgggaccccgtcacacacacacacacacacacacacacacacacacacacacacgaatgtaattacatttaggtcacctcccctgttcacttaaccagtgtgtccattcagaaagacacaggaaaaaaagctgggcacagcagctcacgcctgtaatcccagcactttgggaggctaaggcgggcggatcacaaggtcaggagttcgagaccatcctggccaatatggtgaaacactgtctctactaaaaacacaaaaattagccaggcgtggtggtatgtgcctgtagtcccagctactcattaggctgaggcagaagaatcgcttgaacctgggaggcggaggttgcagtgagctgagatggcgccactgcactccaacctgggcagcagagcaagactctgtctcaaaaaacaaacaaacaaacaaacaaaaaaaaccagaaagacacaggaaaataataaygagttacttctgtgtgccagacgctctattagctgcatcacaagtctgaaagatctacggtctaacggcagctctgctttttgttagctgtgtgatattgggcatgctactcaattactctcagccttaatgttaattctctagattgaggataataacaatcacctcatagggttactgtggggtttaaactagttgatggttgcagtaaagacttaggaaccatatttggccgctagagtcagcttcctatagccataactaataaaatggaactaagaactagaactgttgcaggaaagagaagttggccacaattccgggcaaagagctaaagaaccaaattagtattctctcaagaatcttcacccttgggcctgcatccatttagggggaaggtatagagcactattagggagaagccctggggctgactggtgctaacacaaaaccaaagaggtggataggaccagaccagtctctggaatgcaacatttgactcgagttggcacttagaagcaatgccatacggtttgcattgaaaaatacataatgttaggtaaatcgttattactacatacatacatacacacacaggtagctgcccccaagcagaagtggatttttatgttgcatggctgaatagaggacagaatggatgagtggatagatatatcagagaaggcaaggaaggtgaaaattagaaaggccatataggctgatagctaagccttcaggcttaaaaagacagaatgcctgggtttgaatcttggctccactactcactttttagtgtgaactcagtcaagttaaataacttttctatgcctaagtttcctcttctgtaaatgtggataatattagtaactacctcataggatagttataaggatttaaaagtttatatatttaaagcacttagaagatttcttggcatagtaagcaacagtttcctaatctataaaatgagcacaataaaatgtmttacttcacaagttgttataagaattaaataaatcataccatacctatacagagcttatcctatacataataaatcaataaatattagatattttcattaaaacatggatggagaccaaaagaaatttttaaacctgagaaaaatattcataatggaatataacagaaaatattgtgaaaatccttrttcatatttttgtgttgaatatatttattgggaagccatgagtaacttggcacatttatctactttccaatgtgtaaaacacatcagaataattccatctcttagatctgccaaagaatttatgtcacagatacgaaatacagaccaaaaaaaaaaaaagaagaagaaaattaaagaaaaagaaaccacaactagaacagcaattccgaaataacattcctatcaatgttcattcactgrcaaagaaaacatttaatctgatagcataaaaattaataataaaaaagctattttacttatagagaaattactggagataacaacacttttattatttttaaaatgggcactcattgagaaacttgctgcaacatgctttctaaagaacagaacaaatgttgccataaaatttagaatttaaaggtcaactaattgcaacccaaataagctaatatcttctatttagtccataaggaagccaaacgagtacagaagtcaagaaaagcaggaaaattttgagagggatcctgtggtcaacagtgtcaactgctgagaggcttaggcaacaaatgggaagtgtccatgaggtttagtaataaggacataattggtggatcctgacaaaaatcactgtatggggcagttggggttgttggaaaataccggataaatcatagtacaacatggaaaatgattttcattgacagaagagcaaaagataaaagatgagtcactaagttacgttagaaaaaacttctccaacttggagatactcaaactgggattttataagctataattttaataattttgatgtaatatcaataaataaagcacattgaagttcaggattcattgactgattgattactgagtcatccttgacccaaagtgagtaaggataactttagtcttctacctaaaagatgttaaagcccaaaagtttgagatgatatatatgcaagtttagacttaatgatgttttgctgaatgttattataataattctgtactaagagattcttggctagcaatgaaaggaagatttaataccttttttggagatatgatacatgtaccaatctccatcccaaaaggattatgcagattagtgtttcagaaaccacctgtaagttcttctgatcagttctgaataaccactaatatcattcatccattcatccagacagtgctttccaatagaaatataatatgagccacaggtgtgattttaaattttctaatacacacgtttaaaaagtaaaaagaagtgggtaaaattaattttaatattgcctatttaacccaatatccacaatatcatttcaacatataatcaatataaaaattattgctgagatattttacattmtttcatgctaaaactttgaaatcctgtatttattctacttttacaacacacctcaatttgaactagccttatctgaagtgttgaacatccacatgtggctagtggctactgcattgggacagcagaggtctagaattcaagttccctggaaataggaatatgggttgtcttgttcatatatgtaactgtagtattaagaacggtgtctaacacataattagccctcaaagaatatttgttgaatgaataaatgaacaaatctattggttttatacacatacttgcaaaaaattcctgtaatataaatgaaattctaattacatgattagaaaagcatataattattttaaactcaattctagcccaggcaagaatttagcaatatatacttagtcaacacagattcctaagtagatacatctttcaaatacggtataaacacattttactatcaatagataatttttttctataatcccttcaatatgatttttgtaaacatttagtagatcaaagctgtcatactcctctaataaaatcaaataaattatagctttctctctggaatgaatgaactctacattcaccaaacatacacggttctcacatatgccactagcatttgcaaataaatattttttgtcttaaagtccaatctaccctaacactggcaaaagaatatgccaaatatagcttcaaatacttgacaaaaaytaaatcaaacccccaaagtactgagattatttaatataaatgaagcagrccctaaatagctgacatttaataacaaagcttagggagaaagcttaccttctctgctaaaagctctcgtatcttgcttgcttgaactctaaatttcatgagttgggactccagagctacacatcgttccttccaatctactggtccctctggctcagaaagctctgccatattctaaaaaaattaaataaataaacaaaaaattaaaaagtaaaacattcaaatgctacaacacaattaatattcaggataatttgttaaattacccaatgtacacattataatcactgtctartgagatccatgtacaaattttaaattctaagacaaattccagaactggtgagaacttatggaaagaacttaatgggaaataggagactaaggctggatggagcccaactgtgctacttaacctttctatgtctcagtttagccaatccagaaaagggggcatgttgacaacaaaccattattccttgtgggtatgtagtgagggacaaatgaaatactgctatttctagtagaacagacagtataacaacaccacacaaacacagagtgttattattttagctgtgcccaacagataagattgtttgaatctatcagctcataattttaccatattctgaaatttaaggaagtattacagtttgattcaattgctacaattcacggtttggatttttactataatgattccttwtcatcactctcaatttggccaggtccaggttaagtctttcaagccagaggtcctttggcgtatttaagggtaagttgttgtgatcctgacaagtttgcataatttttatttggtgtaagagaaggcacatatacatgcaatttggagttagccatatgaagtaaatctggaattagtgttttccatattaactttcctttgggaggatattaattgcagggagaagcactgtaagggggaggacaagatgcaagggaattggttttgaaattttgaagtgttacttgattttggaagcatgatggtttctggctctgakatacataaaagtagttttaaatgtttggtaatattttatcaggctatttttaataagcagcctaataatgtatttctgagttccccttgctrtgaactgccctgctatgaaatttacattaggaatggaaagcctcagttatgaagaacggtgacagcaaaactctcagagccctggaatggaactgcagttgaagtatactattctattcttttgttttctaaaaatataaccacattgattttcccagtatttagcgtaatatagaatcctccctaatcctacaccagtttttaaaaactttatgctgctaaaaacccactaaaagattattttcctagcatgaagattgttttgtacttaaatcaattttcacattaatactgacaatattcagtacgttagaaataaatataagcagaatcgttcttaaaagactacaacatttattaagtgcaccccagcktcttaaagccttcagatgtccccaaattctagccttaatttaaaggaaacatattactgtagagctggaagtcattttattttcatttctttgttttcatagaatccttgccccattgtttyctgaggtttttcctaaggagattaaccttgttaataaccttttccattacccatattagcatttatgattaatgattcacattggcatttactagcaatgatttaggagtagataatgcagtttgtcgatcacaaacacgttcacagttctggggctgcttcatttttctccttattagctttagagcgaacagggaaagaaaatatggatgcaatactagaaaataaaaagtaggcctgaaaggggcatctttacgtcttgaactaccatatcattccgcagaaatgtagggatactcttctagcttaaggaataagaggagtctatttacctatttgttaataggttaatactggttaatttttgctctacatgtaaaataacttgcctatgtcctacagtaaaatgtccacagttttaaaaataacatgaagagtggatatttttcaacaaattgaaatcaatcaatgtaatgcaccatgtgaaaagaataaagaacaaaaaccgtatgatcatttcaatagacacagaaaaatcattcaacaaaatccaacaccccttcatgataaaaatattcaagaaactacaaatagacaggaacttcctcatcctgatagaggacgtttactaaagcccacagctaacatcatacttactgataaatgactgacagttttctccctgaaatcaggaacaagacaaagatgtcttttctcaccacttctattcaacactgtaatagagataatagccagggcaagacaataaaataaaaaaccatctagattggacaggaagaaataaaactatctctacttacagatgacatgatcatgtgcatagaaaattctaaggaatccacaaaaaaatactaaactatagagtttagcaaggtttcaggaaatcagatcaacatacaaaagtcagttgtttttctatacactagcaaggaaaaatccaaaaatgaaaataagaaaatattccatttacaatagcatcaaaactaataaaatatttaggaatgaatttaacaaaagaagtgcaaaatgtgtgcactgaaaactacaaaacatcactgaaagaaatttaaaaatacctaaataaatggaagaaattgtatattcatggattagaagacttaatattgtgaagatggcaatacttgcaaatggctatatacacacaatgcaatctctatcaaagttgcaactgcattttttgcagaaattgacaagctgatcaaactttgcctggaaattcaagggctgaagaatagacaaaataaaattgaaaagttggaggactcacatgttactatttctaaacttactacaaagctatacagtagcttgattacacagtgtggtacttgcataaagatagatatatagataaacagaataaagttaagtccagaattaaagcctcacattgatttttggcaagagtgataagatcatccaatgggggaaagaatagtcttttcaacagatgatgctgggacaactggatatccatatgtaaaagaatgaatgtggacccatacctcataccatatatacacagtaacacaaaatggatcacaaacttacaggtaccagccaaagctctaaaccaggggtgtccaatcttttgacttccttgggccacgttagaagaagaattgtcttgagccacacataaaatacactaacactaaaggtagctgatgagctaaaaaaaaaaattgcaaaacaaatctcataatgctttaagaaagtttacaaatttgttttgggccacattcaaagccatcctgggctgcctgtggcctgcaggccacaggttggacaygcttgctctaaactcttagaagaaaagaggtataaatcttcatgaccttggattaggcaacagattcttagatatgacacctaaagcacaaggaatcgaagaaaaaatagataaattggacttcataaaaatttttaaatttttgtccttcaaaggacactatcaagaaagtgcaaagataacccacagaatgggaaaaatagttgcaaatcatgtatctcagggatttgtgtctagaatatataaaggactcttaggactcaacgataaaaaaagataacccaattaaacaatgggcaaaggcctggacgtggtggctcatgcttataatcccagcactctgggaggccgaggcggttagactgcctgagctcatgagtttgagaccagcctgggcaakgtggcaaaaccctgtctttattaaaaaaaaaaaaaaaaaaaaaattagccaggcatggtggtgcaggcctgtagtcccagctacttgggggttgaggcaggaagatcacttgagcccaggaggtcgaagctgcagtgaaccatgttcacaccactgcactccagcctgggcgacagagggagaccccgatctttaaaaacaataataataataaattaaaaataaataaataaaaatgggcaaagtatctgaatagagatttatccaaagaagatatacaaatggccaataagcacattatttgctatgagagaaaatgcaaatcaaagtcacaacaacattccacttcacatcaaataggatgttctaatgaaaaagacatctaacaacaagtgttggtgaggatgtagagaaatgggaaccctcatacattgttggtgggaatgtaaaaatggtacagctgctttgtaaacagttttacagttcctgaaaagtttaaacaggccagcatggtggctcacgcctgtaatcccaacagtttgagaggctgaggttggagaattcatctctgagstcaggagttcaagaccagactgtgcaacatagcaagacctcatctctatcaaaaaatttaaaaatcagctaagcgtcggggagcttacctgtggtcccagctactcgggagccctgtgtgggaggatcacttgagcagtgagctatgatcatacactgcactccagcctgggtgacaagagtgagacaccgtctcaaaaaaaaaaaaaagtttaaatataaagttaccaagttattggagtaactttatatttggtatatcaatataaagtattggtaactttatacttggcattggagttgctgggtcatatgccaagggatggggtcatatgccaagggatgaaatacacrtccacaccaaaacttgtaaataaatgttcagagcaacattattcatgatagccaaagagtagaaacagcctgtgtccaccatcagatgaatgaataaaatgtagtagatctggctgggtgcagtggctcactcctgtaatcccagcactttgtagggcaaaagcaggtggatcatctgaggtcaggagttcaagacaagcctggccaacatggcaaaaccccgtctctactaaaaatacaaaaattagccaggcatggtggtgcaggcctataattccagctactagggaggctgagacaggagaattgctttaacccaggaggcagaagttgcagtgagctgagatcctgccaytgcactccagcctgggtgacagagtgagactctgtctcaaaaaaaaaaaaaaaaaaaaaaaagtggtacatccatacaatggaatattattcggccataaaaaaggaatacagtactaatacacgctatagtcatggaagagccttgaaaacattatgctaagtgaaagatgccagacacaaaaggccacatattgtatgagtccatttacatgaaatgtccataagaggcaaatccaaaggacagaaagtaggttagtggttgccaagggctgtgaggagaaggtagcagatactgactacaatggatagggggtttctttttggggtgatgaaaatattctagaattagatattggtgatggctatacaaccttgtgaatataccaaaacccagtgaactgtatactttaaaaggaaaaatcttatagtttgtgacttatattaagatctcaataaaaaagatcacatatttacaaatgactaaagaaaaagtcgcagtttaaatggatgtatactaggactgcatttacaaatttaatcaaccattatttgtggttatccctgccaagaatttcacaattagctcaaaaaattgagaggtaactgttaaccccaaatatgaaaagtatcatacatatatcttacctagcgcactttgctatgatgacataataaattaattcaaagtcaaacatacctatttctttagttatgctaattatatattttatagtgaagtagcaaagccttaagaatattattaaattggcatttaacatctacattccctattaatgggtcataataaatcagaactgcaaattggttggataatggtctgcactgagatccagacacctgattccctcatttcattctgtaatttcagttagttaacaagtacaaagcaactgttgtattagtgcaccatcttgggtagttaaaaattctaattttaaacaatatccgccatccttttcattaccactaatgttatagaactatataacattgggaatatatatataactatataacatagccgactgctaaataaagaaaataccacatmtagattctgaatttgaaaggaatctatcatgtctagattctgcatttgaaaataatctatcttcacttcaggggacaggaaaaagtcttggagttccaaatacccccagtgatttttggaagtatttactgacataagataaactgtttacaattgtggagtgaatgctcttttctctgaatctctgacttcctgtttctcttccaaatcccaaaaaggaaagaaaaagaaatgaaagaattattctacttaggcttaccctgatgaagcgcagcgttagtctctatgatattctttagtttttgcctcttaagggacagcttaactgggctgggtaatcgtgtgtgtgatgtgtgtgtgtgtgtgtgtgtgtgtgtgtgtgtgtgttaaaagatctttctcgacgagactgaggcatgccttgtttaaggaaccttytgaccaccacctagccacctagccccacttgggcaacgcctgcccttcggtgaccctgcccagaacagccgagctcctcactacatactcctctgggacacaccgctgtgcgggccaggcttccaagactggcattttcacaaagaaagcagtgaccctcaggtagcccaccaccagagcttttccaatgtaagtggttcgacttctatttccacagcgttacgcacaacaatatcgacgggtaaaaagtgttgtcctttaaaaagtgccccactaacttcggggacagtggtttccgggtaggtcaccttagggtgctttgacgtgccagcaactcgaggtgtacaaaatgcttctttaaagttttgagtttaaagtttcgccccggagatcctggtggatctcccgaagcctaaggcgagcgcggcatccctgaccgcgcgggtccctcggctcggggaccctgggctgccccgctgcgcccccgggaccgctcgcgccgcgccagaagcccgggcccagtgtttccaaacagaacgtcacgggagcccacgggcgcgagggaccgccggccaccgccccctgcccacctctcccggcgacatccagacttgggggccgactctgggctgtggcgggaggtgcagcggcggatcccgagtcagcccgctycgtccctctcgtccccgccttcccgctcctcccggcgccccaaacctcggccccgcgagcccccctggacggggcgccctcaagggggcggggatcccagggtggcaggractctggagtggcccctcgtccccgggcyttctcacctgtctatctcagcagcgggtccccggccgcagcgcccgatgtcccggccgcgactggcccccgggatccccggactctcagcccgcgcccgcctcaagccgagctcggagagggcggggaagggcaccgcctcctccagggactggcagccggtgtagccaatgggagaccacagccgaccaccgggcgtcaccgggggtgtggctataactttggctcctcccagtccctgccccaggagggagctctgtcctggagtggtacccctaacgtcccaactgcgagactccagagcttgctgcagcggccggtcaccttcattccactccgtctgcctggactgttgcagcaccctcccttggtctcccagtctgaagtctctcctcttgccaatccacccttcatcttcctgccaggttaatttccttaagagcagttttgatgaacagtgtgccaaagactttcattggcttccgtttgcttaaattatcaagaacagattccctagtctagtgttcaaggtctccatcccgtcttttcaggtttatttctcacagctgcccttcacacacctgagactactgctgtgcacctcgccacccgaaggaagtggcactaggagcgtttacatgctatttcctgtctccacttcaaaaagctcagaataatcttctcaccgggcgcagtggctcacgcctgtaatcccagtactttgggggaccgaggcaggtggatcacttgaggccaggagttcgagacgagcctgggcaacatggtgaaaccctgtctctaccaaaaaaaaaaaaaaaatatatatatatatatatatatatacacacaaaaaaaaaaaattagctgggcttggtggcgctcacttgtagtcccagctactcaggaggctaaggctggaggattgcttaaacacaggagatggaggctgcagtgagccgcgatcatgccactgcactggatcctgggcgactgggcgagatcctgtctcaaatcatcatcattatcatcatcatcatcatcatcatcttctccatgtaactatgtctgtcgctccacctggcagaaatgtcgtctctgggccgggcgcagtggctcatgcctgtaattccagcactttgggaggccgaggagggcagatcacgaggtcaagagatcgagaccatcctggccaacatggtgaaacctggtctgtactaaaaatacaaaaattagctgggcgtggtggtgcacgactgtagtcccagctactcgggaggctgaggcaggagaatcgcttgaacctgggaagcggaggttgcagtgagccaagatagcaccactgcactctagcctgcctacagagcaagactccatctgagacaaaaaaaaaaaaaaaggtcttctctggtttctgctccctgaacatctagatttttgcctctcttggggcttagctccctctgccttatgcacagctcctcacatctcttttagactgtgagcactttgaaaacaaggatttgtggttttttttttttttttgcattctcctcagcacagagcatattgcataagtaaattagtgataatttaaatccaggtgaattttacatcccaacttagggtctggagaggtcaatctcagggtaaaataaagagaattctgaatgttatggataatcgttccccaggtcacaaagctaggtcagacagattattctctttggttcacagttggccaatagagagtatcagaaaaactttttctactacaatctttttttttttaactttatctcatcttatataaaacacacacacacacacacacatacacacacacacacacacacacagaggatgggcacagtggctcatgcctgtaatcccagcattttgggagaccaaggcgggcagatgacttgaggtcaggagtttgagaccatcctggccaacatatcgaaaccccatctctactaaaaatacaaaaattagctgaacatggtggcatacgcctgtaatcccagctattcaggaggctgagacaggagaatcgcttgagccaggaaggcagcagttgcagtgagctgagatcgcaccactgcactccagattgggtgacagagcaagactctgtctcaaaaaaaaggaaagaaaaaaccacaaaagagataaagattttcaaagtttctcagaggaaaagcaataagtgaatacaactaaaagtccagtaagcaagtatcaggctttcatatttcttccagatgagcattaattttgaacaggatcccagactacccccacacatcaaattccttttgccttctgtgggagctgatgatgcatatcatatgaaaaattgtcttcaaacagctttggcaaacaagcagactggactgggcttattttatagagcacgcaggagttaaacaaacagagtttcagtaacttgcataatttaacacagcaagtcagtagagaccaagcaggagaaagagagaaagaatgccaaaatagaatcacttccgtttgtgagtcagaaatactaattagactaaaagaactgagtgaataaagtcactcatgaaaagccgctttgtaaacacggctgccacccttgtaaggcttagccaatatttacttactgtcacctttttctagaaacatgacaaactgaatttgtctgggtatggagaatacagcggaacagcatcctatctttgtctatgctgagaaaaacacatggtacaatggaatattattcagtggtaaaaagaaataaagtactgatacatgctacaacattgataaaccttgaaaacattatacttaatgaaagaagccagtcatttaaaaggcacatactgtaggatcccatttacatgaaatgttcagaacaggcaaatccatagagacataagtggattggtggttgcttagggctgggaaggatcggggtgatggctaagacaagtgaggtttatttttgcgataataaaaacatttatggtgatgattacacaactttgaacatacaaaaagccatggacatacgcaatttaaatggataaactggatgttattgaattatatctcaataaagatgttttaaaaaagaaaaacatgttgaattttgtgtttttacgttaggtagcagggatagaaaatgttagtagcaataggcacctttgttttataagcattaatctaaattgtgatattatgtttatttgtgattattttgtctgttttcccccccacaagactgtaagtgccagaaaagtagaacaactgtttttgctctttaatgtatatccagtatctagcaaaaatcataagtcaaaccaccgtaaatcaggaactgtttatacatctcaacttctttcaagaaattgaacctacaaggtctaacagctgattagaaggcggattagaagggaggctttgtgtctgcattatcaggaaatgatggtgccatttacaaaagtaaggaagcaaggagagggaacaagaagaatgagatctggcttggaggtactgagcacaacttgaggtgcgagtgaaatatccaggagagagccaagagaaaatcagtcaggctgagctggggagaaggtttgaatttgggtgtacatttcaacgtatacttctgcatagggggagattactgtaaattgtagaatgattgctggccatgtggccatttggcacattgggagcaaggacagaggggttgaagggaaaagaggtacggagctgggtaaatatcagggaataagtatctgatcctttaatccaccacacataaaatccaaaaagaaagaaggagggcggagacactatctccactagaataagcttgtggcttctggcacggagaaagtataaaccccagcacctgggaaaagatatcaaagacaaggggaagatttggaaaaatgaatagagctagcaggaacagctctctctagctgaggagggtacaggtctgggcactccaggctgtttacctgcaacctaggagaccagaaaagccttggcatgaaggaggccctacaaacaaggagacagacaagcatcctggccctcccagtgggggtggaccaggaaaacagtttctttgatgtgtccccagtgtccagagcatactggcttgctcagtcctttgggtctgcaacgaaggcaggatttgcttcaatctcacctccccaggtgagctgggcccccactatcacagattggttgggggtagcataggtggtgccagaactggtgaaggtgagagactaatgggcattgctaaggtcatgaaaagaaaacaagtgtgtacagaagcataacaaaagcacagaggtgggtactttgagcaccacttattttaaggcaactgaaaagaggaaaagaattgttgaaccagactgagggagagccagtaatagtttgttcaggacccatgaagttaaaaaaaagaaaaaaagacactggacattaaaatcacacaggaaagctgggcagggtggctcacgcttgtaatcccagaactttgggaggccaaggagggcggatcacgaggtcaggagttcaagaccagcctggccaacatggtgaaaccccatctctactaaaaatacaaaaaaaattaggcaggcgtggtggcatgcccttgtaatcccagctactcaggagactgaggcagggagaatcacttgaacctaggaggtgaaggttgcagtgagttgagatctcaccattgcactccagcctgggtgatagagtcacactctgtctcaaaaaaaaaaaaaaaagaaaaagaaagaaagaaaaagaaaatcacacaagaaaacagtgatccagacagtaaaaaggtgttaaatgtgaacagattatttttcttgcttggggtcagtacctaccaggcaaaggcagccattctggtacagaatcttattacggctgacagctaacagtcctccttctctctctatatggtgcatagagacagcttatgccagaattaagggaacaaagcaacgcagcaaaactgaccacgatatcccctgatgctaacggttagagaaaagacacactataagaacattattatgtgctgtgtaataattgtaaaatgaaactgcgtcttcaaaagactccagagaaagctgaggtcaacaggatggtaacaagtacagaatgctcaatggggaggcaggacttgaactggttaatcagaaggatctggttactgcattgttagggttagggtgaggcaaggtcacaacaggaggcactagcctgtgagcacgagtgaacggatgaatgaatgaatgattgatggtggtattcacgagggagattgagccgtcttgcccagctggaggggaaagaagtttggcatcagctgatatccggttctaccagatgacatcgaagtattgggaagcaggtccaaaacaacataatcagaagtgactgttacagtttcttctattatatcattgtctgtggaatatactatggagatttcagaacttggcagagtggttgaagacatacaagttgagcatctctaaatggaaaatccaaaatcctaagtgctccaaaatctgaaagtttttgcatgccagcgtgacatcagaagcggaaaattccacaactgacctcatgttatgagtctcagacaaaatgcaggtgtacaacacagtttatttagcatccccaaaggaaaacgaccctcccagccctcttcaggtatgatacaacttttctgtgcacacacagattccccatgcaaacatacccacaaagggtaattaaatggcacatgttcaggttgaacattccaatagcaggtttcccacaatgccccacatggagccaagatctatgtgcaatattcacggtggttttgtttttgtttttgttttttattctctgctctgtggtataaagttattgttgcaaatgtaaaaaaggcctgcaggtacccccgggtaacagtgataagaaaaagaggatgcctttttgttgatctatagcaccaaaattcaaaccattggaaaaactgcacgagagtgtgtgaaat

SEQ ID NO: 97463 - DNA, 12783 bp, Homo sapiens
aagggacgcttctacacagacagcaatggccgggagatcctggagaggaggtggggggtgactgagagcactgagggggtggtctgtggtgtgttggggcccaggggtggtgagggaaatttgctgattacatgagtgtgggagacagaggacgaagggagagtgaagggcgggggagccaggcagggtgcagtggctcacgcctgtaatcccagcactttgggaagccgaggcgggcagatcacaaggtcaggagatcgagactgtcctggctaacatggtgaaaccccgtctctactaaaaatacaaaaaaatcagccgggtgtggtggcgggcacctgtagtcccagctactcgggaggctgaggcaggagaatggcgtgaagccgggaggcggagcttgcagtgagccgagatcgcgccactgcactccagcctgggtgacagagcgagactccatctcaaaaaaaaaaaaaaaaaaaaagagtgggggagccagatcccaagcctgatcagctcacccccaaccccaggcgggattatcgacccacctggaaactgaaccagacggagcccgtggcaggaaactactatccagtcaacacccggatttacatcacggtagctctcccccatcctgcacctccccacctcgatagaaagggaatcaccccttatctgcagcatctcaaagctgcctggggttggggttgactgccctctactttcacccttcaactcccaggatggaaacatgcagctgactgtgctgactgaccgctcccaggggggcagcagcctgagagatggctcgctggagctcatggtgagtgggtcagagccccatccgagccagggtcctcccaacctggacccctgctggaccttgaaggctgtttctggcccagttctctgctttcaggccccactaagctgaggactccgtttctttcttttcttctctttgagacggagttttgctcttgttgtccaagctggagtgcaatagtactatctcagctcactgcaacctctgcctcctgggttcaagtgattgtcctgcctcagccttccgagtagctgggcttacaggcacacaccatcacgcccggctaattttggtatttttagtagagatggggtttcaccatgttggccaggctggtctcgaactccttacctcaggtgatccactcacctcggcctcccaaagtgctgggattacaggcgtgaaccaccgctcccggccaaggactccatttctgtgtgtggcttttcctctccgtttttctccatctcctgcccaggctccctccacgctctggcgtgccatatccaggcccccctgttaggcatttacctccttccggcctggttcccatgcctacttggatcctgcctctgctggggttgccctaccagaccctcaccttcatcctcatccgttcctcccaccctttaatttcttttgacattcccacacgcccttacccagtttctggcccaaggacacccacaaacccacgactctcaccccctcctggccactctccccccaggtgcaccgaaggctgctgaaggacgatggacgcggagtatcggagccactaatggagaacgggtcgggggcgtgggtgcgagggcgccacctggtgctgctggacacagcccaggctgcagccgccggacaccggctcctggcggagcaggaggtcctggcccctcaggtggtgctggccccgggtggcggcgccgcctacaatctcggggctcctccgcgcacgcaggtgaggggcagcggggtaggcagagaggaccggattgaagtctaccagggagccgggtttgggtgcggagtttcctaggctcagcggggatccatttggccataattagccccaaaccctcgggccaaccccatcccctgggcagtccccgcccagtgccagcccagtcccaacccccctggactgtgtagaggcacagccctagctcatgcccctaaaccaccaactcacctccggccccgcccatttcactttagccccgccctctcaccgcccccaggctctgtcctgcctcacccagccccgcggcttcagccccgccgtaactcccaaagtctcaggtcacatcagttctgctccatcgggactcgaaccctaagcttgggaccgacccatctccccattggctcagtcctccctgtcacggccctggccgctcctctcggctgagccttgcccctctccggcgaaaccccgcccctacaacctagccctgcctcctgacctggctcggccccgcccttctccatccaggccccgcccctctccaactcagccccgccctctctcccgcagttctcagggctgcgcagggacctgccgccctcggtgcacctgctcacgctggccagctggggccccgaaatggtgctgctgcgcttggagcaccagtttgccgtaggagaggattccggacgtaacctgagcgcccccgttaccttgaacttgagggtgagaagggcaaaattgagaaggagatcggagagaggcaagagagagggagagaagagaaacctggctttgccccaactcatctgggcccatccccttccccgcaggacctgttctccaccttcaccatcacccgcctgcaggagaccacgctggtggccaaccagctccgcgaggcagcctccaggctcaagtggacaacaaacacaggtggggccctggtcaggggtagggaaggggtggagtcttacctggggccggcaggtgggggcaatgtgtgaggcatgggatgttggccaggacccaaaaaggtcatgagggtatggggcagagtccagacccaggttaggggcttaaaggatctgaaatgggtgcggcaaaccaggaatgggtcttgaggtttgtgggtgctgtttagtcccaagaacaagatttgaaaatccccatccatgtctagttctgggagggtgttcatcacccctggggtcagattgagggtacgaggacagtggccagattgagggtatgaggacattggacctgggggtggtattcggggccggggaagcaggttaagagtctgggattgaggccctggagacagattcggggatatgcagctgtgtctagacccaggggaggaagcatcgtggggtgagtcagaggaagtctgcacctcctcactcctccttccccctgcacctctccaggccccacaccccaccaaactccgtaccagctggacccggccaacatcacgctggaacccatggaaatccgcactttcctggcctcagttcaatggaaggaggtggatggttaggtctgctgggatgggccctccaagcccaagcctcctgctccgggggcagaccagactctgactctcctcttggggctgctgccattaaaacgctactactaagactcaggtcgctctgtgactgagtgtgggttttttttgtctgttatttgcttgttagagggggacagaatttatgacccagagccgggtgtggtggcttgctcctgtaatcctaacaactctggaggctgaggagagagaatcacttgagcccaggagatctagactagcctgggccacaaaatgaggccctgtatgtacaaaaaatttaaaaaattagctgggtgaagtgtctgtattcccaactacttgggagaattgcttgagcacaggaggtcaaggctgcagtaagtgataatcacaccactgcactccagcctgggcaagagagccagatcctatctcttcgtgtgtgtgtgtgtgtgtgtgagggacagagtctccctctgtcgcctaggctggagtgcagtggcgcaatcttggctcactgcaacctccgccttccgggttctagcgattctcttgcctcagccttccgagtagctgggactacaggcgccccccaccatgcctggctcatttttgtatttttagtagagatggggtttcaccatgttggccaggctggcctcaaactcctgacctcaagtgatccacctgccttggcctcccaaagtgctgggattacaggcatgagccactgcaaccagtctggatcctatctcttgaaaaaaaaattaaaaattagaaaattatccagataggatggcgtgcatttataatccccagctactacttgggaggctgaggtgggaggattgcttgagcccaaaagtttgaggctgcagtgaaccatgatggctccactgtactccagcctgggtgacagagtgagaccctgtctctagaaaaaaaaaaaaaaagtaggcagtgcgtggtggctcacacctgtaatcccagcactttgggaggctgagtcacatggatcacaaggtcaagggattgagaccatcctggccaacatggtgaaaccccttctctactaaaaatacaaaaattagctgggcatggtggcacacacctgtagtcccagctactcaggaggctgaggcaggagaatcacttgaacccaggaggcggaggttgcagtgaggcgagattgtgtcactgcactccagcctggtgacagagtgagactccatctcaaaaaaataaataaatacaaataaaaagtttttaagtgttctggggtcagtttgcaagcaccaacagcatatgtttcttaggccccctctgatgacaaggactggcccagggtggacagggaagcccagggagggtggtatcatgttggtcctctaatgtttcctctgagaacccctccaatgggccagttagcatgggccacctagggatgccagggtggggtgccaggggacactctgctgtggtcccacttggggcatggtcaccagatgtgctctttttcttttttttttttttgagatggagtctcgctctgtcgcccaggctggaatgcagtggtgcgatctcggctcactgcaagctctgcctcccaggttcacgccattctcctgcctcagcctcccgagtagctgggactacaggcgcctgctaccatgcccggctagttttttgtatttttagtagagatggggtttcaccgtgtaaggcggaatggtcttgatctcctgaccccgtgatctgcctgtctcagccttccaaagtgctgggattacaggcgtgagccaccgcgcccagcccagatgtgttctttttcaagtttccttcttgacggagggctgggccagcttgtgaggcctgaaaagggctccctgcacctgtctgccgtattggacctgttactggaggtatcacccccaccaaaaatatttctaagtccctctcctatggtagtgactggcctgggctgagtaaggaggactgtggagtactcttcaggctcagccctggtcccacatgcgtccctgttttaacatgtgactcctccgcagaaaacttttataagtccctctccaggaagagagattggacctggccaaccagagaggcctggagagggtgacctgagtttgcccacagccccatgtgggctccttcataggaggctctgagtgcaaagtttcctgtgtcccagccagtggtagggactggtcgcagccaaagaaggaggccagcagaaggaccacaggtgggctgtcatcctgcagaggcctctgattgtgggatgtgcctccaggaaatatttgtaagtccttggggatggggtggggataaggaaacagcttaggtcagctaggaaccatagggcagagcaacccaggcttagttttggtcacacatggggcctggttcctggatgtgctccttgaaaatttgtctaagtcaccctctaaagacaaggattattacaggtgagccagagaggcccgagaagggcaccccagcatagttgtcctgctgcatagaatctggccacaggatgaaccccctgaaaaccttaaaaagtctccggattgagaccatcctggccaacatggtgaaaccccatctccactaaaaatacaaaaaatttctctttcccttcagtgtgccactgaagatcctggtgtcgccatgggccgccgccccgccygttgttaccggtattgtaagaacaagccgtacccaaagtctcgcttctgccgaggtgtccctgatgccaagattcgcatttttgacctggggcggaaaaaggcaaaagtggatgagtttccgctctgtggccacatggtgtcagatgaatatgagcagctgtcctctgaagccctggaggctgcccgaatttgtgccaataagtacatggtaaaaagttgtggcaaagatggcttccatatccgggtgcggctccaccccttccacgtcatccgcatcaacaagatgtcgtcctgtgctggggctgacaggctccaaacaggaatgcgaggtgcctttggaaagccccagggcactgtggccagggttcacattggccaagttatcatgtccatccgcaccaagctgcagaacaaggagcgtgtgattgaggccctgcgcagggccaagttcaagtttcctggccgccagaagatccacatctcaaagaagtggggcttcaccaagttcaatgctgatgaatttgaagacatggtggctgaaaagcggctcatcccagatggctgtggggtcaagtayatccccartcgtggccctctggacaagtggtgggccctgcactcatgagggcttccaatgtgctgcccccctcttaatactcaccaataaattctacttcctgtccacctaaaaaatacaaaaaaaaaaaaacaacaacaaaaaattagctggtcatggtggcgggtgcctgtagtcccagctactcgggaggccgaggcaggagactggcatgaacccgggaagggagactgggactccctctatcacccatgttggagtgtgctggcctgatcaaaacacactgcaacctcagaatcctgggctcaagcaatccccccgtctcagcctcccaaagtgttgggatgacttgcttgagctgccatgcccagcctctccctaatttttctaagccagcctgtagaggctgggaatcagccctggccattcagggaatccgtggagggtggcccgggcccagcaggctaccctctgactgctttgggccgagacacaagttggagtgagaccctgaccaggtggcatctggtccggtaggggaaggtccaggtccggcgcagtcccaccggtggtcgggcgccactttgtgatcactctgatatcgtccccggagctcggttgtcgcgtgtgtgggacaagatccggccggagagcccaggacagtgttccaggagaccgaaggagatggcaaggtcttctcggccggccacacgcggtgctgcataatggactctcctgagatagttactgcgggatccgggggagcctgagatcattactgcgggatgggaatctttgagaatcgcggaagaagagtggcgtatgaaggtccctctgcccttggagaccgactggtgccgtcgcaggtgaatggggtagggcgccctgggctcagccgctttcccatctggtgccgggttgttcacagcatcactggatacattttcgttcttttttttttttgagatggagtctcggtctgtcacccaggctggagtgcagtggtgctcactgcaaactccgcctcccgagtagctgggactacaggcgcggctttttgtatttttagtagagacggggtttcaccgtgttagccagggtgttctcgatctcctgacctcgtgatccgcccacctcggcctcccaaagcgctgggattacataggcgtgagccaccgcgccgggcctctttttttctttttcttttcttttttttttgaagacagagtcccgctctattgcccaggctggagtgcagtggcgcgatctcggctcactgcaacctctgcctcctgggttcaagcgattctcctgccttagcctcccgagtagctaggattacaggcacgtgccaccacgcacggataatttttgtatttttagtagagacggggtttcaccatgttggccaggctgggctcaaactcctgacctcaagtgatctgcctgcctcggcctcccaaactgctaggattacagtcatgagcccatgcccagcctactggaaaagttttctaggtccccttcctggggccaggatcgcagccagggaccccagagggcacacagctcctgcccaccgactcacataaggtaccgtcgcagaaagtgcgtcctgaaatttttcccaaggccccttttaagaagggacactcgcccaggcatacagggaggatgaaggagggcacccagaccccagctgcagtttccatggcgaccattcatcggacaccttcagaaaacgtctggagggatgactggggccaaacagggagggctaagggtgggcgacttggacttggtcacagtcctatgcagacgcgtctgaagcacctgctgaaaacgttgccaattctgagtgataggagataggaataggggcatgaagagagggacggggagggtaaaaggagggggatcactgggagccgcagaagcagtggcggggaaagcagggggaagaggaggtagagggatggttttgatgggagaaggaggttctgagtaggatattgttgtggcttcattcccctgtgggccttcccaaatgttccttttttttcttttctctttctttttctttccctccctcactcctttctttctttcccttccctcccttccttccatcttgaatgttcttcttcattttctttccttttttttgagacagactttcactcttgtgggttattttttattttttatttttttggtgttttgttttgagacagagttttactcttgttgcccaggctggagtgcaatggcgggatcttggctcactgcaacctgctcttcccgggttcaaacgattctcctacctgagcctccctagtagctgggattacaggcatgcgccaccacacccagctaatttttgtatttttagtagagaagggttttctccatgttggtcaggctggtctcgaactcccaatttcaggtgagctgcccgcctcggcctcccaaagtgctgggattacaggcgtgagccgccgcgcccggcctctttttccttttctctttctttttccctccttccctccctccctctctcccttccttcctccctccttccaccctccctctccctctctctttcattttttttggtttgtttttgttttttgttttatttttcccgcgaccgagtctcgctgtcacccaggctgctgtgcaatgatgcgatcatagcgcactgcatcatctccagggcacatctctcctcccgcctcggcctcccaaagtgttgaggtggtaggcatgaggcatccagcagggcttcattcacattttctgtctgcctatggaggctgggatcagccctggccattcagggagttccgtggagggtgccccgggcccaccaggccatcctctgaccgctttgggccgagtgtattacaggttcatgtgggacccgaaccaggcggtgtagactggggaaagtgcctgtctggtgaggtccggcgggtgttcgagcgccacctagggtcagtctgatgccatcccctgagcttggctgccgcgtgtatgggaagtgatctggctgcaaaccgcaagagagagttccaggaggtcgccggcgatgacagagtcttctcggctacgacacgcgccgccccatcatgggctctcctgagatcgttactgcgtgttgcgggcgagcagtctctgagaatctcgcgggctgaatgtcgcatgaggtcccctccgcccgtggggactggctgctgccgtcgcaggtgagcggagtagggtgccctgagcttggccgctttcccacctggtgcctgcttgcccacagcttcattggcgttttctaggtccccctgctggggccaggatcacagtcaggaaggtcctcggactgctgtgggaagggccccaggttctgcccaccgccagattgggcctggtagttagatgagtcctgaagacacttctaagcccccctacacagctggggccaggctggccctggaggctggagggattaagtattcctgtgattctttgtgggcccagttatatttatccgttgaacaagtttccaagacctcctgcaggctggctagggatacctgaagaaggcttcctggcttggctgtggtcacatgcgaggggcctttttgatgaatacacttgaacaaaagtttgcttttattagaaatggtagccagttgcggtggctcactcctgtaatcccaacactttgggaggccgaggtgggtggatctcttgaggtcacgagttccagaccagcctggccaacatggtgaaacctgtctctactaaaaataaaaaaaaaaaggctgggcccggtggctcacgcctgtaatcccagcactttgggaggctgaagcgggcggatcacgaggtcaggatatcgagaccatcctgtctaacatggtgaaaccccgtctctactataaatacaaaaaaacagccgggtgtggtggcgggtgcctgtagtcccagctactcgggaggctgaggcaggagaatggcatgaaccccggaaggggagcttgcagtgagccgagattgcgccacggcactccagcctgggcgacagagcaagactccgtctcaaaagcaaaaaacaaaaaacaaaaaacaaattagccgagcgtggtggcgggcaactgtaattccagctacttaggaggttgaggcaggagaatcgctcaaacctgggaggtagaggttgcagtaagctgagattgcaccactgcactcccgcctggacgacagagcaagactcagtctcaaaaaaggatggggtcttgctatattgcccaggctgatcttgaactcctgggttcaagccatataacgcctcggactcccaaaatgttgggatgacttcccttacccaccgttccctgccttctccacgtttgctgagttggcctattgaggccagggccagccttggccattcagggagttctgtggaaagtgccccgggtccaccaaggcagcctctgatatcttggggccgcggtacaggttagagtgagacccggacaaggtggcctctgctgagggtcggggtccaatccggcggggtcttgccggtgattgggaattacctgtttgttggcgtttatattttcttttcttttttttttttttttttgagacggagtctggctctgtcgcccaggctggagtgcagtggcgccatcttggctccctgcaagctccgcctcccgggttcacgtcattcttctgcctcagcctcccgagtagctgggactacaggcgcccgccaccacgcctgaataattttttgtatttttaatagagatggggtttcactgtgttagccaggaaggtctcgatctcctgacctcgtgatacgcctgcctcggcctctcaaagtgctaggattacaggcgtgagccaccacgcccggcctgacgtttatattttctccctggagctagcctgctgcataggtgggataagattctgccatgatgctcagaatccagttcagttcctggaagccaggggcaatggcaggatcttctctacaggcgccagtctgtagacaggctctcctgagattgtcactgcaggacgggggtgagtgatttctaagaattctgaaggcctactggcccgcggaggtcccctccgcttctgaggaccgccttgagcggtcgcacgtgactggggtcgccctcctgaggacaggatcgcagccagggaggcccaggaaggcaccttgctcctggcctccaactcacgtggggcaccgtcgctgagagtgagtcctgaaatcttttccaagtcgcccaccccgttttttttttttgttttttttttttgagagagtctcgctctgttgcccaggctggagtgcggtggtgtaatctcggctcactgcaacctctgcctcctgggttcaagcgattctcctgcctcagcctcccaagtagctgggattacaggcgcccgccaccacgcccggctaatttttgtatttttagtacggacggggtttcatcatgttggccagctgctctggaactcctgacctcatgatccacccgcctcggtctctcaaagtgctgggattacaggcgtgagccaccgcacccagccccaactctccctcttaagaggacacgggctcaggctgacaaagaggcttttaggatgccacctaaagctcagctgcagttcccactgtgcgtattcatcagacacttacagaaaaccttggtgatatggtttggctgtgtgtccccaaccaaatctcatgttcaattttaatttctaataccaggagagggacctgctgggaggtgattagatcatgggggcggctttccccttgctgttctcgtgatagttctcaggagatctgatggtttaaagatgtgcggcacttcccacttcgtgctctctcctgatccctcctgcttcaagtgaagactgactcgatccccagtagccttccgccttgataagtttcctgaggcctcccagccttgcttcctgtacagcctgcagaactgtgagtcaattaaacctcttttattcgtgaattacccagcctcaggtagtttttttcttttttcttttttttgagacggagtttcactcttgttgcccaggctggag

SEQ ID NO: 97464 - DNA, 34673 bp, Homo sapiens
atctccacaagccccctgggtaccagtgccctggtctcaaggctagactgaccacagaggactggtgttttatataaaggaagtgctaaggccaggtgtgatggctcatacctgtaatctcaatactttgggaggctgaggtgggaagatcacataagcccaggagttagaggctgcagtaagctgtgattgtgctgtcgcattccagcctgggtgacagagaccctgtctcaaaaacaaaacaaaaaacagagatgttccatttgagaaatggggcactgaagagtagaggagagggataagactcttggaagaaaaaaaaaacttttttttttttttgagatggagtctcgctctgttgcccaggctggagtgcagtggcacaaactcggctcactgcaagctccgcctcctgggttcacaccattctcctgcctcagcctctcgaatagctgggacttcaggcgcccaccaccaagcccagctagtttttttgtatttttagtagagacggggtttcaccgtgttagccaggatggtctcgatctcctgacctcgtgatccgcccacctcggcctcccaaagtgctgggattacaggcgtgagccactgtgcccggctgaaaaaaaagacttctgaagtggtggcatttgaactgggtctcaaaataggcacagtgtcacttggaggatgcaagattgaacattttttttttgtttgttttttgagacagagtctcactctgtcacccaggcttgagtgcagtggcaccatctcagctcactgctgcaacctccacctcccaggcccaagcaatcctcctgcctcagcctcccaagtagctggaaccacagatgcacgccatcatgccaggctaatttttgttttttttggtagagacagggtttcgccatgttgcgcaggctggtctcaaactcctgagctcaagcgatccattcgcctcagcctcctaaatgctgggattacaggagtgagccattgcacccggctttattttatttttttattttttttttgcagtggcgcgatcctggctcactgcaacctctgcctcctgggctcaagcaatcctcccacctcagcctcagtcccgagtaactgggacctcaggcgcatgccaccactcctggctaattttttgtattctttgtagagacagggttttgctatgttgcccagactggtctctaactcaagtgatcctctcgccttggcctcccaaagtgctgggactacaggtgtgagccaccatgtgtggcttttaccacaatttaaacgaaatgcatcacgttgtgttatatgcaacgacagatgtatgttcaaaacaaaaaaaagtcaccaatttcagttgtacaatccaacagtattgtatttatagatgaagttccatgtatttatagatgaagtttgctttttcaggtgtgttccagatccccctgttctcctggctgcccctgagctacctggaggagctcctctggcctggacacccagttccctgccagctgcctgggatctcctccctccagctccacccatccttgagggatggcctctcttcctccatgaaagcccttccctctgataaaacccaagctctccacccaggacagagtcaaaagccgcagcccccgggccacctctgtgatccctttctcaccccagagggtgggccatccctggggggagggagatactccttcagggcccctgaggtctgaagcacacagtttgcctgatgagttttcacctaatctaaggtgggaaggatgccccccggcctgggcaaagcctggccctccccattttctctctatggggaggaatcctgaccccaaacttcccctgacctcttgactggaatccagttgtccagtagaagaagcccctaaatgcagtgcccagggccagtgtatttgttagaactgctggacctaggccaggtgcaggggctcatgcctgtaatctcagcactttgggaggcagaggcaggtggattgcttgagcccaagagttcaagaccagcctgggccacatagtgaaactccatctctacaaaaaatagaaaaattagctgggcatggtggcacgagcctatagtcccagctactcggggaggctgaggtgggaggattgcttgagcccgggaggcagaggttgcagtgaactgtgatcatgcccctgtactccagcctgagcaagaatgaggtactggctcaaaaaaaaaattacatatatatatatatatagaactgctggaccgaaggctgggcgcagtggctcacacctgtaatcccagcactttgggaggccgaggcgggcagatcatgaggtcaaaacttcgagaccaacctgaccaacacggtgaaaccccatctctactaaaaacagaaaaattagccaggcgtggtggtgcacgcctgtaattccagctactcaggaagctgaggcaggagaatcacttgaacccaggaggcagaagttgcagcaagctgagatcgcgccactgcactccaggctgggagacagagcgagactccgtctcaaaaaaaaaaaaaataactgctggacctaaagtggggcttgggacttcgttgcagaatgtcccatggggttcccaacaccccatttcctcccaagagaatatcgtcccctttactgtgcgaggattttttgctcactcctttagctcctactccgaggctaggttggagaatgactgtctctggagttggttttctacagagcttgtctggggaagtatctttgtgtcctctcagtcctgtctaatcttctgctgtggtacacacatggcactgggaactggggctcaggaatggacctgcaggcaccaacccctaagagacggatgtgcccaccagttcagttacaacagacagatgtgagtgcagcctgaccctggggtctccctcactggaggagagcaaactcccagagtggctccaggggcctagaaaggataacttttcttggaccaagagaatatccccttctatccccaccacctttggaaggaggagaagtggtgttttttcttttttctttcctttttttgtttttgaggtggagtcttctctgtcacccaggctggagtgcagtggtgcaatctcagctcacggcaacctctgccccccgggatcaagtgactctggccacctcagcctcccaaaaatgctgggattacacgtgtaagccactgttccaagcctcttttttctttttatgatttctgaatcttaatgctttttcattcattcgctccgcagcatttaggcacgtagccttggtctcctctcccttaagaatggggatattaatagaacctccctcatgagcatatggtgaacagcagagcagatgagatcgtgcacgtaaagtaacaagcccaaggcctaggacatcacacaggcttaattcatggtggcaattatatttactattaattttttttttagacaagatctccgtctgtcaccgaggccggagtgcagtggtgcattcatagcttcactgcaacttcaaactcctgggctcaaatgaccaaaggcacacaccaccacgcccggctaattttttgaaacatttttttttttttgtagacacagggattcagctatgttgcccaggctggtctcaaactcctgggctcaagcgatccttctgcctcagcctcccaaagtgctgggattacaggagtgagcaacccaacccggtatattattattaatgtaataatcagttggtgagcacagtactgcccccagcctgccatggaagaaggcagagctctcgattccttccacaagcagtttcttcttttttttttttgagacagaatctcgctctgtcagccaggctggagtgcagtggcacaaacttggctcaccacaagctccgcctcccaggttcacaccattctcctgcctcagcctcccgagtagctgggactacaggcgcccgccatcacactctgctaattttttaaatattttttagtagagatggggtttcactgtgttagccagggtggtctcgatttcctgacctcatgatccacccgccttggcctcccaaagtgctgggattacaggcatgagccaccgtgcctggcccataagcactttctgaatggctgtcctatcagcctgcctccctgaatggagcctgctccttccaggtaatgaactatctccacttactaacccaaccccagttacataggataaaactgagggtcacaagaggagaagaaaccacccatgggtgggactggaatacaggtccctgcccggtgggccagggcggttgcccttgcttcaggctgagttttggcattagaatgtaagagtccagctcccaagtaagattaaaatagaaacacaggctaggtggggtagctcacacctgtaatcccagctactcaggaattccttgaacccaggagccagaggttgcgtgagaggagactgcaccactgcactccagcctgggcaacagagcaagactctgtctcaaaaaaaataaataaaatagaaacataggccgggcacggtggctcgtgcctgtaatcccaacactttgggaggccaaggcaggctgatcacctaaggtcaggagttcgagaccagcctgcccaacacggtaattagctgggtgcggtggtgcatgcctgtaatcccagctactctgggaggccaaggcagcagaatcatttgaacccaggaggcagaggttgcagtgagccaagattgtgccactgcactccagcctaggtgacagagagagtctgtctcaaaaagaaaagaaaagaaacataattacctatggctgttcctgaagtcgcccatgatgtaagaggttttgtgtggctgccccctacagagcagcggttggcaaactttttctgtgaagggccagaaaataaatattttaggctttgcaggcctctgtctcaagtactgaattctgctcttgtagcaagaaagcagcccggggcagaacttaagcaaatgagcaagactgtgtgacactaaaacgttatgtataaacactggaatgtgaatttcatatgatttttcacatgccatgaaaagttcattcttcttttgatttttcccctaaccatttaaaagacataaaaaccatacttagctcaaaggctgtacaaaaacaatgcccccctgcttaaaggaggcagaatccattctttgattttaggactagagatatgaaaagctattattatttcagagaggtgcctaaggcctgaccgacggcagagagaagggagggtcagttaatctccctctgagcattccggggtgaggaggggaaaaaagaccttccttggtgatggattcagagcccttatttatttttgtttgtttttgaggcagggtctttctcgtatcttaatctgttttcttacctgtaaagcggtggcaataatccctaccttgagcgattattaagagggctcaatgagataaaggatggtaaaagattttgcaaaatgcgaatgtttactcacttaattgtttccacagatgcgcgcttaagatcgcgcactgagtttactcctctggggaaggcttctacgaagtttgatgggacactgtccctttaaatcctccccaaccacttaaagtggttggacgaatcagcacatgcgcattcctttgaggggccggcacctggagcaacagccttcccagagcctgtagaggggaggttaaaggtcctcccacacagtactttacgcaagcgtaaatcatgattgagagccctatatcatgcagagagcccagtccctttttcgcgcccgaaggctccgccccgcgcagccaatcagtaggcctcgccctttgcaatagccaatgacagtgagcgtagggggcgtggctgggcgtccgggggcgcggcctggcgcctagagaagcggcggggcgagccgggggctctagtgaacagcggagccggacggggatcgccggcgggcggcaagcggaggcggcccaggcccggcggtctccgagatgtcacgatggctgtggccatggtcaaactgtgtgaaagagcgggtctgccgctacttgctgcaccactacttaggtcacttcttccaagagcacctcagcctggaccagctcagcctcgatctgtacaagggcagcgttgccctgcgagacatccacctggaaatctgggtgaggagccaggcccgagtccaggaaggtgcggagggtgggagcgcagcgacctgaggctccctgcggcaggatcgggctgggggatcaggcaccgggcgtagagaggccaggggaatcttgccctctcccaggcgtcagaggcacccyggctrgcctcttcagttccttaccagagccagaaactgagcgggaaggggtttctgtctccacgggaggagaaactgaggctggagagggcaagatcacctgtctggagaatgcaagacaaactcgtcgagtttgggggctgagttaaggaggttggctctcgggctgaggaggggctggggagggagcgtaggaactgagctgggccagggcagtgacagacttgggcctgcgcagctggtgggggaagctggtaggggtccggagccctggcgaggacacctgtggatcatgtgccctgacctcttgaccccacggtcctgagcccgtaggtgggatcaacaaaccaccggatgtgtatgtcaacaaccgcgtcagtacgtcagtaccagtgttgatcaacacctcgtgtgcctgggtcgctgcctacttcctgcttttgggagagtgggatgggccaagtgggtgtctagggagggactggatggcccccaccyacatctcccaccgacccccccggctcagtgtccctgcctggagggaggccctggaggaaaggtggggagatctggcttcaagccgggaggaggccaagggagatgctagggaggccaagaggtgtaaggtcagaggcttgaggctgggaacggtgaggagccctgactcacagctcagctgacctggggagctttgaaggagccaccaattagaggcgcrtcctggtcgatccaccaggtccagagcagcaggggtgggcatggaggcagggacttctcagttttgtggctggactcagggggctgctaatctgggcagaagagctaggctttgggggtaggccaggccctggtgagcaaatgtggggtaggataatcgtgggccctgaactgggggcaccccccagtggcctgctgtctgtgaattctggtgtaggaagccctctctgacctctaaccttagcctcagcctctaaggccgtctctaggctgccccttttttatttttatagagacaggatttcgctatgttgcccaggctagccttgaacccctgaagggatcctcccacctcagcctcccaaagtgctgagattataggcatgaaccaccatacccagccctaggcttcccctttttactttcagctccagaaaacgcccctactcctgttccctgccctcttgttggggattgaattggcttctctagggccctggtggaatgcaggcgctttcttgataaccagcccctcctccctcccagctcagcctgcaggccccgccttgaaggcccccaaagaaactgagtatctggggcctctgaagtggcatgaaaagaragaggcccgcatcccagtctcagtccctgttgtatactgggtgactagattagtcctgtctctaggcctcagtttcccgagctgtgggtctctgggtgaggaatttggactcccatctgctctgccatgtgcttttttattcttggatccaaccagtttactgaggccctttctgggtggcacctggggtgacgggggaggcaggtggggtacagccctccaggagcttccaggttggcaggggtacaactccagcatggacattttagccaggggctcagccttgtgcctcacagagaggcacagctacactaggtgtttggggttggtggtggggggggggggtcccatctggcattaggtcagcccctctcttggacactgtccctttgaactctgctcatccagggtgaacatgggtattctggactctgccatacatgtgcccatgttgtcctgtgcctgcaacacaccaccttctaccagcgcctatcccccctccctttattcttcagcttgcccctcctctgacggcccaggctgggttaggcgtcttccccacggcccccccaccagccccctcaccacccccaagcacctgctcacctcttgagtttcatcctagttgctctgagtccctggctggagcctagcttggctggggaatgaagacattttatttacccatctagtctcagtgtcagcatgtagaaagtgctcggtaaatattatcttgaattaagtggtgagggaaacatctgctctggcttgaaggattaggcacctttgggtgacggggtaggggggctggcctgtagtaggggacagcatgagcataggtgggaccttgtagataacacgtggagggacagggcaagccaagggtgctctccaaggcactatggccagataaggctgtgccagcctgtgggatttggggtttccctgagctggttttgtctcttgcttgctcccagtctgtgaacgaggtgctggagtcaatggagtcaccgctggagctggtggaaggcttcgtgggctccatcgaggtggccgtgccctgggctgctctgctcaccgaccactgcacagtgcgcgtgtccggcctccagctcaccttgcagccccgccggggtccaggtgagggcagggcgaggctgggggcaggcaagtggggagagtgggctggggcgtccaggacctgactgggcctgcctgccttgagaccctgtttctccctacagcgccaggggctgccgactcacagagctgggcctcatgcatgaccacaagcctgcagctggcccaggagtgtctgcgggatgggctaccggagccctctgagccaccacagcccctggaggggctggagatgtttgcccagaccattgagactggtgagcaggcccctcctggccgccctgtctcctgcccttcagtggcacacagaacaggggctccagacaacggcacggccaccctggtgcccagatgggaaattctgcctcccctttgctgctctacctgacctgagacccctccccaactcctcagtgcttcggaggatcaaagtgaccttcctggacactrtcgtgagggtggagcactctccgggtgatggggaacgtggtgtggccgtcgaggtccgtgtgcagaggtaagggcaggccgatctggggtrgactggtgtgaagatggggagtgggggctgctggatggtccccacccgcagcctaggttcctgggaagaggcagggtggatctggatgggcctcggtggtggtagggttggggaggtgggctgcatcgtgagcccggactggtgtccagaggccaggtgatacaggcccagagtggccgaggccccaagaaccaagttagatgctgagggtctgaggagcaagggctggcctgagcctccgggctggacatggtggttcaggacggcctaggtgtgatggggcagctctgcaggctaggctccctgaccccgtgcccctagagcagagcactgtgtggagagaggggctccaggcctggggtggccagggcacgggctgaccctacactctccagactggagtactgtgatgaggcagtgcgggacccaagccaggcgccgccggtggaygtgcatcagccgcctgcyttcctgcacaagctgctgcagctggcaggggtccgcctgcactacgaggagctcccggcacaggtgagcgggctctgattcccacagcccctgtctcctctcccttgagcccaytgagcccctcccatcctttctgaccatctctgactccattttctcaaccytyccctcttgtatcctcccgtctcccaggaagagcctccagagccccccttgcagatcggcagctgctcagggtacatggagctgatggtgaagttgaagcaaaatgaggccttccctggccccaaggtgggtccccaggcccctggggagggggtgagtaccccatctcaagactcctcctcctcagcaaggctgattatctacagcccacagtggggatgtcaagtgsgggatttacttccttcttggcagctaaagaaactgaggctgtaggccaggcacagggttcacacctgtaatcccagcactttgggaggccaaggtgggtggatcatctgaggtcaggagttcgagaccagcctggccaacatggtgaaaccccgtctctactaaaaatacaaaattagccaggcgtggtggcacatgcctgtaatcccagcttcttgggaggctgaggcgggagaatcgcttgaacccaggaggcagaggttgcagtgagccaagattgcaccactgcactgcagcctgggcaacaagagtgaaactccatctcaaaaagaagaaaaaaagaaactgaggctgagaggtcaagttgtggcctggttcatagagctagttggtaacagagtttagtttggtagccagcatcctgctttcccagggcgagggcaggcgggtggtagctcttagaggagctgggtggtgggcctaggctccatggctrcctccttggcccccagttggaggtggcgggacagctgggctccctgcacctgctcctgaccccgaggcagctccagcaacttcaggaactgctcagcgccgtgagccttacaggtgaggcccctgggtggcatgggggtggggtggctgggagggccagccagcccagactgaagtctcctcccctgcagaccacgagggcctggctgacaagctgaacaagagccgcccgctaggtgccgaagacctgtggctgattgagcaggacctgaaccagcagctgcaggcaggggcagtggctgagcccctcagcccagacccccttaccaacccccttctcaacctggataacactggtgggtgtggggtcagaccgtggttggaggggcagctagtgtgggtgcagcagcctaggggctrgggtcggctgtccctgacactcctcacttcacccacagacctcttcttctccatggctggcctcacaagcagtgtggcctcagccctctctgagctctccctctccgatgtagacctggcctcctctgtgygcagcgacatggcctcccgccggctctctgyccaggcccacccagctggtgagttggagcaccctgggggtactccagggacaggaaggactggaagaggccttagtgccgtgggctgtcagaggcacacaggaaatccccagcgatgcctggatatctaccatctgtgacttggttccctggggaccaaacaaggtgggagctggtgatagagtggacagagcctaggtttttcagtcattgatcttagtcaagcacttgaactctctgagactcagcttcctcttccataggaagagaagggtgagatcagcctttgccaggctgtatatctgggttcatgtttattgagagcttattgtgtgtgggtgctaggctgggtgctttatcacatcctgtccttccagcaccctgaggagggttcagttgagcctgggcagarggcctggtctactggaggcaccagtgtcacccctgcctgaccaagccttctgccagagccacatggtggggcagacctggcctcccaacccccagcctggtggcaaactattgctccacctggggtacccggaatctgttgggagcccctgctgaagcctctgtcccctcaggcaagatggcccccaaccccctcctggacaccatgcgccctgactcgctgctgaagatgaccttggggggtgtgaccctgaccttgcttcagacgtctgccccatcttccggaccacctgacctcgccacgcactttttcaccgagtttgatgccaccaaggatgggcccttcggttcccgagacttccatcaccttcgaccacgcttccagagggcctgtccctgtagccatgttcggtataagcccgaggccagggcctgaggagagaccatcagagccccctaagtgcaccttctgacgcctgtcctcttccccgcaggctaacgggcacagccgtgcagctgtcctgggagctgcggacgggcagtcggggccggcggacaaccagcatggaagtgcacttcgggcagctggaggtgctggagtgtctgtggccccggggcacctctgagcctgagtacacggaggtgagggcagaggcagaatgtgtacgaggcggggtctggaggtttgggtggctgtggggccaggcctgaccctgtgtgcctcccgggtcccatcccagatcctgacctttcctggtacgctgggctcccaggcctcagctcggccctgcgcccatctgcgccacacacagatcctgcgccgtgtgcctaaggtaacccacccrctccaggccaccaggctgtccccatggcgtgttgaccccaccctggcctctgccagggcctcctctgctgcccagccctgtccctcttcccctgtgctccacatctctccatgctggggccctcaaatacctgcctggcccttcctatgccagtctctgagcctggtcatgcccttgccctatctcaatatggccccctggctggcctctgttgctaagagtggcgcatgtcgggtggcttttataagtaaacaagcacattgtgcgcgtcgggcaaaggtggggcaggccttcttagtgctctcgtggcccctgccccagctcttctcccactaccagagagggccttcctgtcccacccgctgagtaccactcagccctcactgacctgaacgccctcgccctcagagccgaccccggcgctcagttgcctgccattgccactcagaactggccctggacctggccaacttccaggcggacgtggagctgggggccctggaccggctggccgccctactgcgcctggccaccgtacctgctgagcctccagccggcctgctggtragaggcccctgccagggccaggccgggggtgggtgcagggcctgggtccttcggctcttggtcacagtgggaggggctccgacggctgctctgacccccaatcctcctgcagacagagcccctgccggygatggagcagcagacggtatttcggctctctgcaccccgggccacgctgcggctgcgcttccccattgccgacctgcggcctgagcsggacccctgggcgggccagrccrtgcgggctgagcagcttcggctggagctgagtgagccccagttccggtcagagcttagcagtgggcctggtcccccagtccccacccacctggaactcacctgctccgacctacatggtgagagcccccgagtgacagaacttggggcaagaggcctggcttctrggagagatgggcttggggctatggaaggggcccagtcacaacccgagcagtccctggcccaggcctttaccagctcttggggtcccagcactgcctgtccccggcctcctcaccgacaagtagggtggaccctttgtctctggctttctctgcccaccaaggtgtgtgtggagtcgggggcacagctctgagccgacctgggcattggggaagaaataggaaaaggcagcagtgatgacccccctaattccccatccccctccaggtatctatgaagatggagggaagccacctgtcccttgcctgcgtgtctccaaagccctggaccccaagagcactgggcgcaagtacttcctgccccagtaagtaggggctctggactgggcccaggagaggagggttctgctgggggtggcagggggccagtttggaactgggtgccgggggccctgcaggccagtaacaggcctgtgccccggcagggtagtggtgactgtgaacccccagtccagcagcacacagtgggaggtggccccggagaagggagaggaactggagctgtcagtggagagtccctgtgagctgcgggaacctgagccctcgcccttctcctctaagaggaccatgtatgagacagaggaggtgagacttggcsccacctcttcccaggaccccctcccgcccaccgcccgggttcctgccgtaggagccacctgtgtggctgtgggccagggcagcacgaccacctggggtgggcatgagctgacccaacaccagtgaggatttcggctcttccattctttccagccagtcagagagtctttctgaaacggcactggtgagggcaggcccctggggagcatgggtcctcgattggaaagatcaggtcctgccccacctgacccgtggatcagcactgtacacttagaaaggcagttaagggccaggctctgccacttggtgactgtgtcatcaccctggggagttatctgaccttgaagagttacctatagatgagtttcttcccctggaaaatgggcaccatgacctgtctttctctctttttttttcttttttttttgagatagagttttgctgtgtcgccgaggctggagtgcagtggcatgatctcggctcaccgcaacctccgcctcccaggctcaagcgattctcctgcctcagcctcctgagtagccgggattacaggcgcgtgccaccacgcccggctaatttttatatttttagtagagacggggtttcatcatgttggccagactggcctctaactcctgacctcaaatgatcacccacctcagcctcccaaagtgctgggattataggcatgagccaccgcacctggcctaattttgtatttttagtagagacagggtttcaccgtgttggccaggctggtctcgaactcctgacctcaagtgatctgccctcctcactctcccaaagtgctaggattacaggcgtgagccaccgcgcccagcctaaccataacctgtgtcacaggcctgttgtgaggatgaaagaagttaacatacctgaagcccttagaacagcacaggtgtgccatcagcactgtatctgtacggctatcatgcatccccagtagagaagggctcctatgaatgaatgaatgatgaacracaggagggcaggactgagaccagagacaggccccagccagcgtctctaagatgactctcctgctctttccacctcaccctgtccagatggtgatccctggagaccctgaggagatgaggacgttccagagccggaccctggcactgtcccgctgcagcctggaagtgatcctgcccagtgtccacatctttctgcccagcaaggaggtctacgagagcatctacaacaggtggagacccggggccagcagggcgggactggacactgggtgggcctggcctcccttacctgctgtccaccygcctatctcaggatcaacaacgacctgctcatgtgggagcctgcagatctgcttcccacccccgaccccgccgyccagccctcgggcttccccggcccctcaggcttctggcacgacagctttaagatgtgcaagtcagccttcaagctgggtatgagaggtgctaacgctgggctagagggaggacccccaggtctgggaagggccaggctagcccttcgcggtctccttcccagccaactgctttgatctcaccccagactcggactcggatgacgaggatgcccacttcttctcagtgggggcatcaggtggcccacaggccgctgcccctgaggccccaagtcttcacttgcagagcaccttctctacactggtgacagtgctgaaggggcrgatcacagccctctgtgagaccaaggtgagtgcagccccgggcaggcgggccccaaacttcagagctcccattggyggcagagcaagaccagcgcgagcagctccaggtcaagaatgtggagagcaggaggcctgagtgggcagcgccagcccacccacgccagcctgcccaccctgtcacagcccatcagctccttctgaccccctgctgtatgtaaagcaccatgctaggggtcgggatgggcatggagcacccactgttcccactccgagcgggcagacccggcagagattatttttctcctggcaaaagaggcaagtgccatccagggcctccagcagcgtccatggtggaaactggagctgacccccttaggccagggctccaggagccgccaacccccagagggcttgagggttgctgagtgcagctggggaagccaggctgtgtgctccttctgcaggatgagggtsggaagcggctggaggctgtgcacggggagctggtgctggacatggagcacggtaccctcttcagcgtctcccagtactgtggccagccaggacttggctacttctgtctggaagctgaaaaggcaacactctaccaccgaggtgtgaggcctgggggcaggtcaccactggggtccagggttgggggtggagggctttcaggacggatgtgggccctgggtggagtgggtagccagttggcttggcagggggctcatgagacccctccccagcggccgtggatgactacccgctgcccagtcacctggaccttcccagtttcgctcccccggctcakctggccccaaccatctacccatcggaggaaggggtgaccgagcggggagcctcgggccrcaagggccagggccggggaccccacatgttgtccactgctgtgcgcatccacctggacccccacaagaatgtgaaggtatgggcttgcctaccatccacccctcctgctagcctgggctgcagccccggtgtgcrgtgggaccccagtgcgcggtgaggccccagtgcacggtgggrctggcctccccactgccctgacygcgcccccaccctcaggagttcctggtgacactgcggttgcacaaagccaccttgcgccactacatggccctgcccgagcagagctggcattcccaggtgagcgtgggtggtgggaagccacatggcccagtgactctggacttctgttttgggcaagcaggtctctaggtgggaggaggccggtgggaggaacatggactgggccacagctgaccttgtccggagctcctgggcaaggggtgtggcagacagctagtgggcagaaggtgaggtgccaggcaggggccaggacagggaggggttagaggagggaggacaccacctgatcctcactgcttcctcctgccctggcctctgaagttgttggagttcctagacgtgctggatgaccctgtgctgggctacctgcccccgacggtcatcaccatcctgcacacacacctgttctcctgctctgtggactataggtaccaggctgggtgggccaggggctggggacggggatgggctctcaggtgtaaggagccggccccagcccgagtatcacccccaggccactctacctcccagtgcgtgtcctcatcaccgcggagaccttcactctctccagcaacatcatcatggacacctccaccttcctgctcaggtatgcaggccgccccacactgggccatcccaccctcgccgggccgaagctgcctgccagctgtgtgtcctctggtgctctcggtcttaatgtacacccgggtgatagtctcattctcaggaatgtggattgtttccgcctttctagagggcagttggagcctcctgatgagacccttataagcatttgtgctctctgacctgtaatctcatgtctgagggttgtcctaggatatgcgaataagagaggtgggatttaatgcttatggagtataagttaaaacagccaaaacgtatcagttaaatcacaagcctcacaacctgagcaaataagcatggcccacctagtaggtagaaaaccatgcagggattaaggtgaagctgaagaatcccttcaaaatataagaagatggagggtgcggtggctcacamctgtaatcccagcactttgggaggctgaggcaggcagatcacaaggtcaggagttcgagaccagcctggccaatatggtgaaaccccgtctctactaaaaatacaaaaatgagccgggggtggtggcaggcgcctgtagtcccagctacttgggaggctgaggcaggagaatcacttgaatctgggaggcggaggttacggtgagcgaagattgcgccactgcactccagcctgggtgacagagygagactccgtctcaaataaatacatagatagatagatagatagatagatagatagatagatagatagataaataaaaaatatagaaagatgccacagtacagtgtttactcaaataacattggatacaggactgcgtacgttttaaaatcagtttatgaaggggtgtttatatgtctcggcgtgcagctgcagagaaagtttggaaggagatgtgtatggtggttttctcagaattagggattaggaatgatgaatgatttttattttctttattctaaaatatcttaaaggagttttcattatgttacccttaaaataaagacttttttatttattttttttttttgagacagagtctcgctctgtcagcaggctggagtgcagtggcgcaatctcagccgactgcaacctctgcctcctgggttcaagcgattctcctgcctcagcctcccaagtagctgggacaacaggcacccaccaccacacccagctaagttttgtatttttagtagagacagggtttcaccttgttggtcaggctggtctcgaactcctgacctcgtgatccgcctgccttggcctccaaaagtgctgggattataggcatgagccaccatgcccagcccttattattatttctttttgagatggagtctcactctgtcgcccaggctagagtgcagtggtgtgatctaggctcgctgcaacccctgcctccctagttcaagagattctcctgcctcagccttccaagtagctgggattacaggcacccgccaccatgctcggctaatatttgtatttttagtagacatggggtttcaccacgttggccaggctggtctcaaactcctgatatcaggtgatccgcctgcctcagcctctccaagtgctgggattacaggcgtgagccaccgcgccagccaaaaataaggacttattttagaagaaccacaaatgcagcagggagaaaaatggacaccccttcccaggactgtcatgaggccccattgaggtgtcggaactgcaggcactttgagagctgcaagtgctgcccgcttcccactgcctgctgtctgggccttctccccattgtgcaggcaggaacgctgaggctggaggggcctgtccataccacctcctgtgggcttgggacccctctgctcggctcccgtggagctgccccctgcagcggtgcccgggcccttctcagccctgttcccccccaggttcatcctcgatgactccgccttgtacctgtccgacaagtgtgaggtggagaccctggacctgcggcgaggtgggcagggccgggactgggctccctcccctctgagggaccaccgccccggccacacccagagcagccaggtgtctccccgcagctgctggccgggtccttagctcccacacgtagcccgcacagcagggactacacctggatcaaccggatccttcccccaggtgctggggccggggccgggtggaagggggccacaggacctttctctcgcctctgctgcagattatgtctgtgttttggatgttgacctcttggaacttgtgattaaaacctggaaagggagcaccgagggcaaactggtgagtgaggctgtcactctggctcctggagccacagyaggtgcaggggccaagggagtcttcaggggctgctgctccctcacgtgccygggctccggacacagttcatgcctgcccttcctgggctgcagttagcgcccctcctgcaaagggccatagtacagccctggtgggggtgtcccttgatgctggctgaatgaatgaatgggtttcagccctgccaccagaggacgcggcagccagggcaccagcgaggccctgggaatcagccacctttgtaggtccccggattcatctcctgtaagatggagataacctgccctgcctcgctaggcatgcagagcccttcacggggagtggggtagggtgggtgggcacactcctgcttccttggatggccctgggccaagcccctttcaccctctgggtgaacagtttgttcatctgttcagtggagttactgggcaggtcatccactccaggagagaccatccctgttctgcctgtggcaggatcagaactgcggtgccctcccagcgagcgggtggggccagcaggcagtggcccctgtgttcacatagctgctccccccaccccgcccctgcagagccagccactattcgagctgcgctgctccaacaatgtggtacacgtgcacagctgtgccgactcctgtgccctgctggtcaacctgctccagtacgtaatgagcacaggcgatctgcaccccccaccccggccccccagccccacggagatcgccggccagaaggtacaggtgaggcctggccacacaggctaccagagctcggccaggcccctcccctgccatggccctcgggcctggggttgggggagctctgtcctgtctcactcattgctcctcccctgcctggcccagctctcggagagtcctgcctctctgccctcgtgccccccagtggagacggccctcatcaaccagcgtgacctggccgacgccctcctggacaccgagcgcagcctacgggagctggcccagccttcaggtgaagtgrgggtgctgtggggacagcagacacagtcaggcacccactgtgggcgcctctccaaactgrcctctctcctataggtggccacctccctcaggcgtcgcccatctccgtctacctattcccaggtgaacggagtggggccccacccccttcaccacctgtcgggggccctgctggcagcttagggtcatgctcagaggagaaggaagatgaaagggaagaggagggcgatggagacaccctggacagtgatgagttctgcatccttgatgctcccggcctgggcatcccggtgcgtggtgggagggrtggamcagtttgccgtccaggcaggtgtgtttggagcggggacggaacactcaggggtggttgcctggccatctggagctcccgtggtgagagaagcaggcaggaggtggttgccatcacctcgggggtggtgctaggtctgtgccaccctagggaggcagccctgatgctgggctttgatggagtagggggatttccagaggaagaggaggcctggtgttttgggcagagggactgggaaattcaagggatggaggaagaggagagggcagttagcaagagggatggagaaccatgtggctgcaagggccagtgggaatgtctgaactcacccaggtcttaggaggcagggctggcaggagcctggcattctcaggctcctcttggacagaccactcaggcatagactcgggtgatagcaacccaggagtgtcatctttcatcaaaaacagggaggaggccaagcatggtaggttacgcctgtaatcccagcaatttgggaggtcaaggtgggagaattgcttgagtccagcaatgagagattagcctgagcaacatagtgagaccccgtctctacaaaaaataaaaataaaattagccagatatggtggcacatgtctgcagtccctgctactcaggaggctgagaatggaggatcgcttgagcctaggaggcagaggttgcagtgaactgtgattgtgccactgcactccagcctgggtgaccgaacatgacccgaccctgtctataaaaaaaaaaaaatgaaaaaraagtgaggccaggttgctggggctgggggcagctgggctggatcgaacatctgtgtcacacgtctacctggcctccctgcagccccgagatggggagcctgtggtgacacagctgcatcccggccccatcgttgtgagggacggttacttctcacggccgatcggcagcacggacttgctgcgggcacctgcccatttcccagtgcccagcactcgggtggtgctacgtgaggtctccctcgtctggcacctctatgggggccgagactttggcccccaccccggccacaggtgaggaggagcgggtgcaggtggcagctggtgaaggttggggctcaggctggtccaggtctgactttcagcagctggagaccttgagccccatccaccccaggtgggcctcagtttcctcatccttccttatcccgcctgccttccaggactggggctagcgggggtctcttgtcccaggctaaaaggcccgctgaggacggggagggaatggggttcctctgagtcagcttggcccctgtccctcttcccagggcaagaactggcctctcaggtcccaggagctccccttcccgctgctctggccccaaccggccccagaactcatggcgcacgcaggggggcagcgggcggcagcaccatgtcctcatggagatccagctgagcaaggtgagtggggtggcgagtgcctactacacgtgtgtgtcatagaacaacgggccttgttctcgatgtcacgtgtagcaatgactaatgcagaggaaaacccctgcctttgtagtggaggaagccaggcagggaccaagatgtatcgagtgtgtccgatggtgaagagcgctcaggggagagtctgcaggggtggaggagacaggtgtgctggggagggtctggaaagtcctcttctgaaggcaccatttgaacaaagacctgaacaagtggggatgtgagccaggaagagttttcaggcagagaggacagcgtgaaagccgcaaattggggccaggcatggtggcttatgcctgtaatcccagcactttggaaggccgaagagagcagatcacctgagctcaggagtttgagaccagcctgggcaacatggcgaaaccccatttctaccaaaaaaaaaaaaaaaaaaattaaccatttgcagtggtgtgtgcctatagtcccagctactcaggaggctgaggcaggagagttgtttgagcccaagaggcagaggttgcagtgagytgagatcgccctattgcattccagcctgggcracagagtaagactctgtttcaaaaaaaaaaaaaaatgctggaagctggaagcatcctgacatttccaggagcagcagagcctgtgcataaccagcgacccagaatgtttcttttgagtcttacaagagacgaacccctcagggcttttgaggagaggcctctgtggggtggggctctgcagcaatcagggagggctagtgagcaggttcaggagagcctagatgggggctggccacaggttcagctgcggatggggtgtgtgagatacagagagtggtacagagggttcaaggtttgggcctgggaaattgcctggggcaggggggtcccacttgctcagagtgagccaggccagtgctgggcttcccaaggagccgctagaggcaaagggcagaggggcctcaggctgctcgggttggtgggctgtgctgcaagaacctgcgggagatgagtgtcagagcagggggccaggggcctctctgagacctgatggccagccagcgggtgtgcaggaagagggggaaggaaggctctccacggagaggggctacgagagcaaagtcctgaaggcaaaacaggcctggactccttgaggggcagagaccagtgcagctggcatgggaagcaagagcagggtcaggtctggagggagaggcaggtccctgctgggcatagaatagagaaggggtwggggccgggcatggtggctcatgcctgtagtcccagcactttgggaggacgaggcaggcagatcacttgaggccaggagttcgagaccagcctggccaacgttgtgaaaccctgtctctactaaaattagctgggtgtggtggcacatgcctgcaatcccagctactggggaagctgaggcaggagaatcgcttgaacccgagaggcagaggttgcagtgagccgagatcacgccactgcactccaacctgggcgacagagtgagactctgtctcaaaaaaagaatagagaaggggtctggggccagcccttccctccctcttggggccctgcttacctggccaggcctctgtccaccccacaggtaagcttccagcacgaggtgtacccagcggagccagccacaggccctgcggcccccagccaggagctggaggagcgaccgctgtcccgtcaggtgttcatcgtgcaggagctggaggtccgagaccggctcgcctcctcccagatcaacaagttcctgtacctacacacgagtgagcrgatgccgcgacgtgcccactctaacatggtatgagcgacctgcaccatccaccctggggcagggcaccagaccgttggggatacatcttcacgcatgcatggattcacacacatacacgcattcccacacaaacacccaggttgtttgtgagcctgggagaagggcagagctaggggctgtgttagcraagggaacagcgtgttcagaggcagggtggctgggtgagctgtcagggaacagctgggtgagctgctgccccagaggcccagcaggtgtccagaactcaccctctgctcccagctcaccatcaaagcgctgcatgtggcccccactaccaacctgggtgggcctgagtgctgtctccgcgtctcgctgatgcccctgcggctcaatgtggaccaggtgagtggtctacgtgagggcagagcctagggtgaccccactgtctccaggcctctgagtctgatccacatctggacctctcccttgcaggatgccctcttcttcctcaaggacttcttcactagtctggtggccggcatcaaccccgtggtcccaggggagacctccgctgagggtgagaggctgggccagggaggggagcgtctgggccttctgcctcccaggacagcmcaggttcccagtcattcctggccccatccccagtctgtgacctcccctcccctagctygccccragactcgagcccagcccagcagccccctggaagggcaggccgarggcgtagagaccactggttcgcaggaggccccaggmggtggacacagcccctcccctcctgaccagcagcccatctacttcaggtaggctgctggactgcgggtggggggccctgggccagattgctgggggccaggccagtgagcaaagaaccccctcttcctgctcccctacccagagagttccgcttcacgtctgaggtccccatctggctggattaccatggcaagcacgtcacgatggaccaggtggtaagtggggcggtcggatggggtggccatgtggggtcagctgtggctgagtccctctgggggccaggtcttgcatccaggcactgttagcagccagggcgctctccagtggctcccatgggctagctagctccctgagtcccattgggtaaacctggaccccctccctctcccagggcacttttgctggcctcctcatcggcctggcccaactcaactgctccgagctgaagctaaagcggctctgttgcaggcacgggtgagtccccagcaccccagcctctctccagggtccctgatcktccttctgttctggtcctgactggttgtgtggccttggccaagtcatcacccttctcagggcctcartttctcctctgtaaaaaggacgcagttggctgggcatgatggctcacacattcaggcattcgagaccagcctgaccaacatggtgaaacccccccgtctctactaaaaatacaaaaattagccaggcgtggtggcatacacatgtaatcccagctactcaggaggctgaggcaggagaactgcttgaacctgggaggcggttgcagtgagccaagatcgcaccacttcactccagcctgggcaacggagcaagactccatytaaaaaaaaaaaaaaaggacacagtccctctgcacatgactgggtgggaccacagggaggstagagtgcccacagtacttgccacaggggtactgagtcctcctgaccccacaatccctccatgtgtggctctgcctcaccttctgcctcctcacctccctgccctgccaggctcctgggtgtggacaaggtgctgggctatgccctcaacgagtggctgcaggacatccgcaagaaccagctgcccggcctgctgggaggcgtgggccccatgcactcggttgtccagctctgtgagtgtctaggtttggaagccctcgaaactgcttttacccttgggcaacctagaagctgccattgggaataagaggaggaggtgggggcagggcagcctcggktgtctctgagcgctccttccccctagtccaagggttccgggacctgctgtggctgcccattgagcagtacaggaaggatggccgcctcatgcgggggctgcagcgaggrgctgcctcctttggctcatccacagcctctgccgccctggaactcagcaaccggttggtacaggctatccaggtgagtgggtgccctgtatctgggctgtgcaggacagagcagctggagccctctgcaccacagctccctggttctgtcctcaaagctcctcagagtgggcagtctgggtatgacagccctactttatagagaaacagccrcggagaggctaagtgacttgcctgggacctccaagccaggtctcccraggcccacaggggctcccatgcaggagcgggagtgccccccaggccttcagagcccactgtgtctcctgctcatggcatgtcttgtaaaggggggtggaggacggctgtgtttgcagactaagaatctgaggcgcagaggctgccctggttcattcaggccatacgcttcgctaggccagaaggaccccagggaagctggggagccagtctcgtgggcagttgtcagatgaattctgtaggggatcgatggtcctaggcggctaaggggtgagtgcaggtgcatggtgcattctggaacctgcaagctcagaccccaacaggacagagggcagggctccaggggaggtgggagggatgcatgggcaccagggagcccccgggagtgttcagtcaggtgggaaagagtgatgccaggtgagatgctgggcagaggatctggcagacagaaggaaggatgggcctctgaccatctggcaggggcgtctggggggccaggcaaggagcggtcagtctcaggcgtgcagctgcggcagccatgtggaacctgctgaatgtggtggtcagcaggaagagaggtttgggttgagaagactttaggaaagtcccctgaggagtcccacgttcctaggttccctcagcagagtggcaggtgcctaggaaggggaggaagagtgggaggaagtggggagtgaggctgagcaggaccccctaggccagcacagtgacaggcagggaggctgagggctggtggggtctcagactgtcctgggggcctggggctgacgtgtgccccagccagctgtcctcatccagtgctcccatgtcccccaggccacagctgagaccgtgtatgacatcctgtccccggcagcccccgtctcccgctccctgcaggataagcgctctgcgcggaggctgcgcaggggccagcagcctgccgacctgcgggagggtgtggccaaggcctacgacacagtgcgagaggtgaccaggcccccgycctgccccagtcccccatgcccatctcctcacacagaccccgccctgacctctggcttccacagggcatcttggatacagctcagaccatctgtgacgtggcatcgcggggccatgagcagaaggggctgacgggcgcygtggggggcgtgatccgccagctgcccccgactgtggtgaagccgctcatcctggccacggaggccacgtccagcctgctcgggggcatgcgcaaccagattgtccccgacgcccacaaggaccacgccctcaagtggcgctcggacagtgcccaagactgagcctggggtgcccggcacccaragggtgctgcccaccatgctcctgagcctcccaagagctgcagcccacgggcccggcccggcctggcccttcaggggatggccactgtgaaggacgccttcccagcctgcccgttgccaatctgctgtgagaggggggcctccctgccttggggccttagccctggctctgcacttttcctccggggagaaaggacactgcccctcccccgacctgggcccacactgctgccttctcccaggacggaggcttttggaccctcggaccccatcccactcagccaagtgtctttctgtgtctggggggaggaggggatgatatccgtgtggttcgatgtattatttttaagctccgtgagtgcgtgggtcagtgtctgcatgaagtggaataaactgcccaccgccagcccccctctcagatcctctgtccctgtgaaccctggcctcagccttgaccttggccccgccccagatcccacctctgcacccagcacctcccatgtcaccaccaggggtcgccatgcctcctggccttgcccagcagatcagggcacagggggacccagaggcacccagccctgcacgccttcccctggctctgggctctgccttgcccctcccaggaggctgccactccagccccactcctgatgtggcaggagctacgtggggctgccaggggagggagggatggtccttggagcccagctgaccctgcctggttgtcacttgaggccactcggggaaggctgagcctgaggcattctagatgttgctctcaccatccctagtgggggcttttggggtggcccaggccttggccccttggtttccactctgatctggggtcccagctccagcacttggaggggggaggggtgctggagcagcgctgcagccggaatcccaaccctcactgcacaaagctttacacaggaccagggagcgcccattgccccccacacatcttgtttcttgtgagctgctcccatcgcgctcctccctgccctgcttcccagtggcgctgcacagaggtgggtgggtccatggggaaaccaaggctcgggttgggaatcagggaaccctcaccttgctaggttccgcaggcctctggggttagcaaaggtcccccagccctgctctgtggccccttctgagtgggggagatctgggtactgggaacagagcagaagctttgtcccgagggaccctggggtcctggctgcccacggacagctggggcagcaggctggtaagagaccaggagggcgaggccctggaggagacagggctgtggagactcggtgctgatgccacccggagaggcagatggggcccagcctgatgcttcctggacccgccccaccctgcccgggcacagtccagggcttcctgcccttcgaaccgcacttgtgatcagtattgacggtggtgggataatcattaaccaccaccaggggctgggtcaacggctcaaaaggccctgggcccagggtgtccccacttcctccttgtgccccgaaggccagcccggcactcaggtaagaggcttcctgagtggtaggacccctgccgccctccctgtcctaggaggctcctgaacccaggcacctctctgaagggtggccaatcctgaggaagaaagggacctggacagccatggggtggccgggacgagccccttcctctctgtgccttggtttccactgtgggataagggggccttagcatcagcgctcagagctgtggagccaggattcctgatcgggcgctgtctctgccaggccagggcacttggacaccacgctgcaggaggctggtctcgcccaggcctctgtgggaagggccgccaggctgagtggagggccagccaccagctacggtgtcttccttcgcaggtctgtccccccaggcagaaggattccagcccagggatcccccatcccaccctgactgcatcctgagaaggggggacgccacttcgggaaggttgttggggcagcacaggccctggggccctgctctgtgaccttgggcggccccctctgtctctctaggcctgtatgcaccactggcaaagggggcagggcccaagtctactctaaaagctcccctttctctccagaagctttggagtctcccaaaatgcctgctgggtctctgcaggactggcacctgtcaccggaacctgtctgggagggacgagaacacgctttgcaagaggaagctctgcctcacagagccctgggctcactcagggaccctggccagcagctgcttcctctccccacagcggagagagacccaagggtcccagggcggatgcttcccaccaggccagcccagcgtgcagggtggcctcgtaagtcctgattgacatatggacagtggttcagagaggttacgctacttgctcaaggtcacccagctcccaggcccctgctgtcttccaggccactgaggtcctaagcgtccttccaggcgagccactgctcacagcctgttcctcatgttctgcggcaggtttgtgtatctacatcttttccagttccctgtcgtcccccttcctacacctcgtcatccactatccctgtttgttttctctgttcctttctagttctctacctgctcctcttatttttatttgagacagggtctttctttgtcactgaggctggagtgcagtggcacaatcccagctcactggagcctcgacctcccaggctcaagtgatcccccgcctcagcctcttgagtagctgggaccacaggcatgcatcaccacaccaggctaattttttattttttgtagagatggggtctcactgtgttgcccaggctggtcttgcactcctgggctcaagagatcctcccaccttggtctcccaaagtgctgggatgccaggtgtgcaccgccatcctcggccttactcttctcttcctctctcagcccctctgcctcactatccctctttctgtgccctcccccacacagccccccacacttcttcttagtctcatcttcagcttcccatacgaggccatcctcatgaaatcaggcactgggaggtccctggggactgacaagtgccagctgtcccttgctgtctctctgccccatggctgcagcagggagggtgggcaaagggcagaggtgacagtggccaaacctgaaactgaggcccagctctggttgggaaagaaacaaggaaacaaaataacttggggacagagggcgtggggtcatcagagcgggcaaaggctgcccaggagttgtaaatccgagccgctcccggctttatgaggccgatttggggttgagcctggactttgcccaggaaggagtgctggcagcacacggggcgccaggtgtgggccccggatgataagaagcctcggtgaaaagaccatggacctggggccacgaagactggggagcccaggtgagtgggcatgggacactctccagagccctgccgaaggcggacgccaggcagggccccggtctccaattggttcccgccccctgtaacagcaactccatgtggaagtgcccactggttccagtggggctgctgttatctggggcgagggccagtacccacgaagaaggagaggcaggtgctggccagcagaccagccaggactaccgtggcgacgctcccaggccagatggtggcgggtagtggagggctgtcggtgggctgccgagaccgagtgcacagggctctgacctatgaattgacagccagtgctctcgtctcccctctggctgccaattccataggtcacaggtatgttcgcctcaatgccagccaccaggacctgcagggataggggagggccgggggtgtccagcagtcagcagagatcctgcgaccccagtgcagcactcatggtcccacctccctctgtctcattccccgtgaatgagcctgaacagcttcagtcctgcccctgccctgcctgccctgtggcacctctatgctttgcccatgctgttcccttgggctgcaatactcttcctagcttatttgccaggctcactcttactaaccctttcaagctctgtccaagcatttgctgcctccagaaggccttattgaagcttctaagtccccacctgggcacccccacacagtgctgccgcagagcactgccctctcggagccccggtgctggtttctgcttatgtctcgctcctctccccatctgtgagctcagttcccagcccaggcgcgtgcccaataaatgtttgctgaaccaatcctgagcctctgtcttgcaccctgaggaagcacccaccgacatgcagtgtggccaaggggggctgagtgctctaggcccagtgtttgtgctggagcccccccacccaggatggggccctgagccagcctccccatctgcttcctactctcccctcctttgccagtctcatctccctggagcacagccctgtggttggtggagcagcttctccagcccctaggattcctaagagggcccaggaccccagctgctggtagaggaagagcagccaacccaggacaggacagctgaccccacccctgtcccgcctcccacaacagcctcatttccacctatttctttgtggtgtttgtttgtttgttttgagacagagtcttgctctgttgcccaggctggaatgcaacaggcttcctcccaggaggaagcctcccctcctggcatgatctcagctcactgcaacctctgcctcctgggttcaagcgattctcctgcctcagcctcccaaatagctgagattacaggcatgcaccaccatgcccagctaatttttgtgtttttagtagagactgggtttcaccatgttggccaggctggtctcgaactcctgacctcagataatctgcccacctcggcctcccagagtgccgggattataggtgtgagccaccgcgcccagccccacctgtttcttatacaacggggttctgaggaaattttccttttttttttttttttttttgagacagggtcttgctcgctttgtcacccaggctggagcgcagtggtacaatcacagcttgctgcagcctccacctgccagggctcacacagtcctcccatctcagcctcccaaatagctgtgactacaggcacgtgccaccatgcctggttaatttttgtatttttcgtagagatggggtttcaccatgttgcccaggctggtctcaaattcctggcctcaagcagtcctgcctcagccccccaaactgctgggattacaggcatgagccactgtgccctgtcagaatttttcatttgaataaaaaggtttctggtactacaaaataaaatttgtaaaatgggaaatagagacctaggaataaatgtcaaattgcttaataacaggcgttggctattgagccctttctgtctgctgggcacgcacatccaggacctggtcctcctggcatccatcatgaacctgtttgggacaggaggacacaggctcagagagggtgcacatttgctgaagtcacagagcaagttggaccttctcctggggactgtaggcagccaacaaacatctggcccctaagacactgtctctctccccttcccacaggcagctctgctcacactgtcctggctgctctgaatccctgggccccgattggcccctgccgtggcccagctcagcaacccctccctgcagaccatcccatgactctgcaggcgctgctcccctctctgcccacaccccggcttcgtgggcctctcccgccacccttatctcattccctacagagttaaggagccctgtgtgcttatctaatcctgtgctagtttcagactccttgagggcaaggtccatgacttactcatcctccctggctgcttcccccacccaccagcatagtaggtgttcaggatacatgggctggatggtagggccctggactctaaccctcttggggctgtcaggcctcagactcagagcactggcatagggtgaaaggggagcagacagcagccaccctgccctgggggtcctcctgcatctgcctctgcagagcactgcgatcccacaaaggcctgcgagggctattggagacctgttccaatgcatgagcaaggcggatccagcaccctcccccagctccttgagcccactgacctgtgtcctttacccagcaggccctgggcccatgcacatttccctggcctgggtctcacctccaacccctctcagaactcctcaagacctgcccaagggtcactccctcgcggacacctgcctggccccccgccccgccccccattaccccactcactggctccctggatgctctgtggctgggatgttagcgcccccatcatgccccatcacccacaccgggctatttcccccaccagcctgaaa

SEQ ID NO: 97465 - DNA, 34934 bp, Homo sapiens
  misc_feature (1)...(34934): n = A,T,C or G
cgtcgagcagggagcgagccgccagcgccgcccggcgcacgtacaactgctcctgcagctcctcggagctgaaccagggccctgcagcgcccgccccggccccacgtggagctagcgccgagaaactcacattgagcacggtgccccctacgtctgtgtcgttctggatgttgaagatgaagacgtcctcagcgggcgtagcgagcaccgcagccacgccctcgaggaagcggcccagcagcggtgacaggaagcgctcctgccacatgttctcaaggcgcacggtcaggctgttggccagcaactcctccgtgatgatgaccacgcgcagcacacactgcgccgtcacgctgtgcaggccatctgcaggcgggggcaggggcagtggtcatcctggggacagtggccacccctccctgggacacaagagggctggggccagcgatagcctaggcccccagaacctctaagtcagcaggctgaccccaccaggacacaagggagtctggggctagtgaccaccagctcccccagcatcaaggtgtcaaaaagctgctgcttcctcccccaatccccaatacacggaggggtctgggccaaggatcaagcaaccccacacagtgcccatgggttagcaagtcactcccgcaacagcactcaagtaccctaagtactcagtaacccacacttccccaagttatcatggtcagcaggccaccccaactcaggacacagagaggagctagggccactggccactcattcccagccacctttcccttctcccctcctccagcatagcagaaccagcaaaacatccccctccagaaaagaagggttccagatcagggatcacctatctcctatttttggtcagcaaattgctcttccatgacactagaaggggccctggcccagtgaagactcaatgccatcctccagaatcctgggttatcaagctccaggggggtcttgaaccctgacatacacacacacacacacacaccagcattcttgagttagcagcctgctcgccactccagacctgggtcctgtggtttcacagtgaccaccccagagatgaaggtgaggtgcttagctgccttgttcgtcttgtccccacaccctagcacatactgggtggtcaataaggatagactgttgagtgagttgagggataaatgaaggttgtgccttctcaggcagtgccaggagtccctgctccagaactgaggaatgagcaccagtgaagcctatttcccaacctctgcagcctccagtaggcagaacttcaagagcctctcccacctgcactctcctattatggaggggtttctgaaagactggagcagatggggcaggaaagaggcaagtggacctctggacattttcccaaaggtcagggtctcaggccctacgaagccactgtccacctgaagcttccatagtaagctgctgttcctgaccactcaagtattggtcatttcctgcacagatagggtaagcgtcagactggacccaaagtaacccttcgtctgaacatgggcatagtgtggactgactggcccatactggctttgcctaggacctccagaggattaccccaggacctctgaccttttatcaggaggggagatatccctaggtagcagacagttctttacaggctttatggggtctgctagatgccttggaatcactgggattctgtggagattatccaggaacctaagcagagtccttgtgaggtctgtggcagatcttgtagggtgcaggaaccctacccttaaggggttcttggaaggcttagaaatccctctttggtttgaggtgccctgtggagtccctgaggcccaacaggttggtgtcactgggtcacttgcctgccccctgcccctcacctgtgacagtcaccaacatggaggccaccagtgggcggttattgtctagctttcggctgagtcgcagctccccactggtctggttgactaccagcagctgcagctcattgccacgctcaaaggagtagaagaggtggtcggagacatcggggtcataagctgggatgcgcccaataatgcccgacgggaaggtgtctgaacggttggatacatagttgttgaagaggatctggaagttgttgagcacagggctgttgtcattctggtcaaccaggcggacgtgcacagtggcccggctgaccaaaggagcagatgtggcctgcaccacaatcacatattcttggcgagcctcatagtctaggtcaatgagtgccgtcagttctccagagaagatgtccatttggaacagctcagggatgttcccctccacgatctggtacattatatgggcattggggccttcgtcagggtccactgcagtgatctgggccaccactgagcccacaatgctattctctttcacccgcacctcaaactcctcagctgggaagacaggtgcattgtcgttcacatcctgcaccatcacctggatactgactggagtccggagtgggggcacacctctgtccactgcgtaggcagtcaactcatacactgatactgcctcccggtctagccgccttactgtacggacaattccagaggtgggctcaatggtaaaatctccatccccatcttcaccattctggaaagtgtactggacccggccattggcatgagcatcccggtcagtggctgagatctgcaggacactggtgaaaggtggggcatcctcagagaccagccctgtatagtgggaggccacaaattgtggagcattgtcattcacgtcattgaccatcacctccacataagtagtgtctgccttctgtgggatgccattgtcccgagctgtgatagccagggtgtaggtcacctggtcctcatagtctaatggggcctgtaatgtaatggctcctgagtctgcatcaatgcggaactggggcaggttgtcctccaggagataggtgatacgagcattctcacccacgtcatcatcagaggcactgatgaccactatggtgctacccattggccgatcttcattcacactcactgagtagtgggcactttgaaagaccggccgatgagtgttggcatctgtgatgttgatgtgcacatagcagtgatcatgaagggcacggtcagatgcagttagtaccagcttgaagtagcgttcctgcttgtagtccagtggcagagccagagtcaccagacccacacccccctgggtgctgatggcaaagcgattccgggtgttgccgcctgtgatctggtagctgatggcactgttggcatcacggtctactgcggtcacgctgaccacactggtgcccacagctgcatcctcattcagtcgtaggtggtactccttcattgtgaactcaggccgattgtcattaacgtccagcacagtcacggtgacactggctgaggcagagagtgggggtgagccatggtctcgagcctccacaccaaagaagtaatgctccacagactcacggtccaggggaccactcacagagacccagccagtggcgctgtttatcacaaaaggagtatcaggtgccacaccagttagggagtactccaatctggcattctccccatggtctgcatcgactgcctgaatgtggatgactgagtgacccaagggagcattttccaagacagaaacttggaagggcgtgctgacaaaaataggaatgtggtcattgatgtccaccacctggatgctggccaggcccgtgttgttggacagcggtggccggccagcatcctgcgccctgatgcgcaaggcatactctctctctgcctcgaagtccagaggtgccaccacctggatctcgccagtgaggctgtcgatggcaaagtgtccacggctattgccactgatgatgttgtagtgcaccaatccgttggcgtccttgtcccggtcagtggccgtgacgcgcagcacgactgtgtgggggcgcacatcctcgcgcacctgcgccacgtagcgcttctcgctgaactgaggagcattgtcgttctcgtctagcacagttatgtgtacgcgcacagtggccgagcgcggcccgggttcctggccctggtcgctggcttccaccaccagctcatagctttccatgtgctcgcggtccactcggccgctggtgctgatgaggccggagcgtggatcaatctcgaaggcggcggcagctgcagcgcgcgcagctggcggccccacgaagcggtagcgcaggttggcgttggggggcgcgtcgccgtcagtggcacgcagctgcaggatagggtagccctcctccacattctcgcgaagggtctcccggtactgcgcttgctcaaaaaccggcgagtggtcgttgcggtcggctactgtcacggccaccatcgtggtggccgagaggcgcggcgacccgtggtcctgcgcggtcacacgcaggtagtgacgctccatgctctcgcggtccagagctgccgccgtacggataaggccgctctgcgggtcgatgctgaacagctccagcgagcggctgttcatgagtgccgccagcgagtagactaggcgcccggcctcgccggcgtccgggtcctgagcaaccacgcgtagcaccgcggtgcctgctgcctcattctccggcaccagcgtctggtagttgtactgcggaaactgcgggtggcggtttgcggcgcgacgaaagcgtgcccggttcgccgaggttactttcctggcttcaggacgggccgggagtcccgggggacgcggcccggggcgctgcgggaggaagcggcagcggaagagaccccgggagcgcatgcgcttgggcgccggctcgggagctgtccgagactcgcggggtgctgaacctgatgcaggagctgtcctcgccgtgcgtggtgctgaatccagctcggggccagatcccgaggcccctggaagacagttccgccggggggctgtcctttctgctccggatgtcgtggctctctcgccctgacccttgctccctgttgcccataattccccacagcagcgcgcggtgcccactcttttgcgggagcctgtcccagcgttccgctgggaggacaccggcttgggaccgtggtgccgaatcaaaaagtctgaagggaggggcgagctgttccccgagcccgggacccctgaggacagagcccctggtgacagactacctctttgcaaaggtcctgtccgcccgcaagaggagacctctgggcgccagtataacacagaccctggtccctgtcctgtctctcgttcgcggctgcccaatggctggacgccgtgttcaatccccagctcctcattcggctgctcagggggccctcgactattccgggcgctttgccttctccctcggagccccacgaagataggctccctgacccccaggccaggccccccatcctcccggaccccggaagactccggacaaagagctaaggctccgccaccgatatgcgcccttggccccgtagtggcagctaagcctgggtcccagccctggtgcccaccgccccccagctcctcctggctgagggggaacaaagagaggagaaggagcaggagtatgggggtcgaccgtcccccgaggccccgcacgggcgccgcctcgccatcatctcccgcctccctgcacggcctccacctctccccgccccggtccggcacttgggctggccccgccgctcgggccccctcccgggcccctgccgccgccccgggcccccgcccctccgcctgtctctccgcacccccgccgccctctgggcaccatctactccgcggccggagcccctccggcgtgcggccctggctttttccgcccccaccacagcatccccgacgctgctgccgcctcccgccgctccaacatggctcccggccgccccgatggttcgctccacctctgccccggcgcccgaaacacggtggtacaacccatcgcgcatggcagctctgaggaccgaagatgttgccgccatctttattgaggacgtgagcgttgctcctggtgctgaacagagcgcgaaggttcgccgtcgttgggtccgccctccccactttcggtcgccgccttcacccacctccctccttctagggcgctgtcccagctccgtctcccagcctttttctgtccttccagatctcttgttcccccttcctgaccactagttctgaaccgtgtcccggattttggtctgaaattttggtgcccatgagcgttctcatagctctgggagggggtactgtgtgaaatcctggggtagaggggacgatggctrgagaggggtctggggtgccagcaccccgaacaatagctttaactatcccatcagctagttttatgaaacatgtcgcgaccacctgcttgtttggatcgcccctgcggagcagggaccagagatgaccctcccgaggcgggagcagaggccaaattcttccctgccttgctggtccccagcagtctcccgggctcggggccccttcactggaggctgcaccccctcccaggctgcgagtcccgagtgctctgggatgccacgtggagcccggcgttgccccatggctgcgggccccgcttcttcgggtccccgcccctcgtccgtcacgaccgcatgccttaaccccttgaagggactgacacagaaactcagtcctccccccaccctcggtgcattccagctctccctgcstaactcctggcacgcgccggtctcgccaggccaatgggtggacctggcgcaacagacgtcacgagaggagcggaggcgaggggtgaacgcggagcactccaatcggtcagtcattgtttctattggcacaatgggaggccccgcccctcacggcggactcatcgcatgggggagggggctccgcgggttgccggctaaccgtgagagagtccgggaggtacactatacggaccggcctccaaaggcggaatcgataacgagctgcagcgccgggtgcagaggacgcgggcatcccgaagcccaggaagaggtcagggccgggaccccagaacgctccacagggtgcggctcccgcgatggggtggatcctggttctaacaggcgaggaactcctggccaaggcctctggcccgccccgaacggtccctatgacatcaccatcaaccaatcagtcggcgcatcctttcgccccttgactgctccgcttccgggaggcggggcttctgcgggttccacctcccgagcgccccttgtggctaccaaggtcaggcaacaggtgtccagttgttccctctcctgtctacgaatctgaggacctccccaggatcagagctctgggcctgatacacggccggggttcctacgggtttgtgagtgggggtggaagatctgcagaggcacttagggctgaactcctttgaatgggagccaatcggtgcaggggctggaggagcgagtcccccaaagtagttttatttatctatttagagacaaggtctcactctttcggagtgcagtggtgatcacagctcaccgtagcctcgaactccccaggcgattctctcacctcagcctcccgagtagctgggactacgggtacatgtcatcacacttggctaatttttgcattttttatagagacagggtctcaccatgtaggccagattagtcttgaactcctgggctcaagcaatccgcccatcttggcctcccaaagtgctgggattataggtgtgagccaccgcgcccggcaacccagaagtggttttgacagcaccagcgctttctgtgtccacaatctagtgagtagagggcacaaaacctgacaccacggaggcagacaggcaggggctctgccggggaagggtgttggagtcccaaaggaggcgtctgagtcaccttcgcaacctgggamgccttcttgcataagatgcctgagcagtgccttgaatgaccaaggggagatccgcatctgcaaaggaagggcagggagggatagggattgggggtgggcatcctaggtcttggagactgtgtgggcaaatgtgcagagacataaagggactatggctgagggaaatcaagccctgccctctcaccaatagggctggcgctggtcccagctaacactccttttggagagcaaagctcctcacttctgagtagtgagattgattgcggatcactctccatgttgctgcctgctgtgtgtcatcccactgtcatcctccctttgtggctgttctgtggagcccctctccctcaatctgcactcacctctatgccccagccccattggcagctcctaatgcactcccggtaaaaaaaaaaaaacaaaaaccagatgttagtgatagtggtggtagttcttctctccacctccaaatcttgcccttgcctcctaataagacccctatgtggtttaacctcattttttttttttttttttttttttgagatggagtttcactctgtcacccaggctggagtgaagtggtgtgatggggcttcaccatgtgatggggcttcaccatgttggccaggctggtatcaaactcctgacctctagtgatctgcccgcctcagcctcccaaagtgctgggattaccggcatgaggcaccgtgcccagcctatcctccttctcttatcagctcccaactagaggtccacccaggacccagagacctggatttgaggctgctgggcggcagatggagcgatcagaagaccagggtaagggtgtggcagatactgccactaacacttctcagcctttccttctcctgccttttccaccccaccctgtgtttgtctactcccagccaggtgtacctttccaggggaagacctggccaacctgtccagctcaattatccagcagttctttgacctcactgagatctcgagtccattgttcatcacctcagctattgacctgtgtcattagccttatagagttcagtgccacggaaactccctgccctgttctttttctttttctttttttttttttttttgagacagagccttgctctgtcgcccaggctggagtgcagtggcgcgatctcggctcactgcaagctctgcctcccaggttcacaccattctcctgactcagcctcccgagtagctgggactacaggcgtccaccaccatgcccagctaattttttttttgtatttttagtagagacggcgtttcaccgtgttagccaggctggtctcgatctcctgaccttgtgatgctcccgcctcggcctcccaaagtgctgggattacaggcatgagccattgtgcccggcctgccctgttcttcttagacaaacttgctgggctaaaatctaaccccgttaaaatagactatttacgtattgtttgcctctagcgcagcagaacattgctggagaaaaacaaacaaccgtgctaattggtctcattttatattcatgaccacaagcctcagtattatatcggagggcctatccagtgcagtagggcaagaaaaataataagttatgaagattggaagggaaaaaaaactaattcacaagcagtaggattgtatatgtaaaaatttcaaaggaacctataggtaagttgttagaatgagttcagcaaagttgttggacacaagatcaatatataaaaatcagttgcaatttctatatgtcaccaacagttagaaaataaatttcttgcctgggcatgttggctcaagcctgtaatcccagcactttgggtggccaaggcgggcagatcacctgaggtcaggagtttgagaccagtttggccaacatggtgaaatcccgtctctactaaaaatacagaaattagccgggcgtggtggtgggcacctgtagtcccagctactgaggaggctgaggcaggagaatcacttgaacctgggaggcagaggttgcagtgaacgagaaaaaaaaattttttttcttaaaaacaatgatgtttacaatagcatcaagtaatatcaaatgctgaggaataaacctaatgaaagatgtgcaaagactacatacacacatacaaaaaaactataaaacattattgagggaaataaagacataggcctggcattggtggctcatgcctgaaatctcagcactttggagggccaaggtgggtggatcatttgaggtcaggagttagagatcagtccggccaacatggtgaaacctcatctctactaaaaatacaaaaaaattagcttggccaggtgcagtggctcacacctgtaatcccagcactttgggaggctgaggcgggcggatcatgaggtcaggagatcgagaccatcctggctaacacggtgaaaccctgtctctactaaaaatacaaaaaaaaattagccgggcctgatggcgggcgcccgtagtcccagctactcgggaggctgaggtagcagaatggcgtgaacctgggaggtgcagcttgcagtgagcctaaattgcgccactgcactccagcctgggtaacagagcgagactccgtytcaaaaaaaaaaaaaaaaattagctgggcatgctgttgtgcacctgcaatcccagctactctggaggatgaggcagaagtgcctgaacctgggacacagaggttgcagtgagccaagatcatgccattgcactccagcctggacaacacagccagacgctatctgaaaaaaaaaaaaaaaaaaaaagtaaaaaaaatgagaaataaagacataaataaagtgaaaaattgttccaatattggaaaagtcaatattataaaggtgccaattttcccaaattgatatatggattcgatgcaacttcagttaaaaatcccactaaattttggctgggtgcggtggctcacacctgtaatcccagcactttgggaggctgaggcgggcggatcacaaggtcaggagatcgagaccatcttggctaacatggtgaaaccgtctctactaaaaatacaaaagttagccgggtgtggtggcgggcacctgtagtcccagctacttgggaggctgagacagaatggcgtgaacctggggaggcggagcttgcagtgagccaagttgacgccactgcactccagcctgggcgacagagcaagactctgtctcaaaaaaaaaaaaaaaaaaatcccactagattttgtgtgtgtgtaaactgacaaactagatttagcagcctgagcaacacagcaaaaccccatctctacaaaaaatacaaaaattttgcacatgcctgtatagtcccagctacttgggaggctgaagtgggaggatcatgtgagctctggggaggtcgaggctgtagtgagctatgatcacatgctgcactctagcctgggcaacagagcaagagaccctgtatctaaaaaaagaatgaaaattaaaaaataaaaagaaaccaagattgtgtggtactggtacgaggataggaagactaaaggaacgaaatccagagacaggcctgaagatgtgtggaaacttgaattttgacaagggtggttcttcagagcyaacatgaagaaagggttgttttcttttttttgtttccccaggagcaactctattaactgaaagaataggcttttcaataaatgatgctgggtcagttggatatccatatagaaaaaattaaatgagatctctatttcacactgcttgcataatcaattccatataaatttgacatctgaaaatatacagtttctagaaaacagtattaagaccttgttttgttttttgttgttgttgttttttgttttgttttttgttttttgagacagagtctcgctctgtcgccaggctggaatacagtggtgcaaccttggctcactgcaacctctgactccctagttcaagcaattctcctgcctcagcctcccgagtagctgcgattacaggcacatgccaccacgcccagctaatttttgtatttttagtagagatgggggtttcaccatgttggccaggatggtctcgatctcctgaccctgtaatccgcccacctcggcctcccaaagtgctgggattacaggcgtgagccactgcacctggccaagagaagatcttaaaggtgactttaagcaaactttttttttttttttttttacagagacgggagctggagtgcagtggctgttcacaagcgtgaaagcaaagattaaaaaatttgtttttatattaaaaaagtttttagagatgggggtctcactttgtggcccagcctgcagtgcagtggcgcgatcatagctccctgctgcctcgacttcctaggctcaagggaccctcctgtcttggcctctgagtagctgagactacaggtatgctccaccacacccggctaatttctttacttttttgtagggacagggtctcatcattttgcccaggctggtctggaactcttgagctcaagtgatcctcctgccttggcctcccaaagtgctgggattacaggcatgagccaccacagccagtcaagattttttaacaggacaggactgtctaacaggattgtctaataggacataaaatacactaactataaaggaaagtattgataaattggattacataatgattgagaaccttcttttatcaaaagacattaaaagtgggagaagatactctaagatagaacatccatggactcatatcctgaatacatactacaaatcaataaaatatacacaaacagataaatggggcaagagattcgaatagttacttcacaaaagagaacattcaaataatattgaaaaggtgctcaacctctttagtcatcagggaaatgcaaattgaaaaaaataaatactggctaggtgaggcgactcacatctgtaatcccagcaccttgggaggctgagatggacagatcacttgaggccaggagtttgagaccagcctggccagcatggcaaaaccctgtctttactcaaagcacaaaagttagccgggcatgttggcccacgcctgtggtcccagctacttgggaggctgaggcatgagaatcgcttgaacccaggaggaggaggatgcagtgagctgagaatgcaccactggactccatcctgggcaacagaacaagactttacctcccaaaaaaaaggtggagaggggaggactactgcactctaccaggatagcgaaaataaaaatgacttgacaataccaagttttgggaaagatagaagcttgaactgtctgacactactgaaggagcatacattggtacaactactttggaaacctatttggcagtatctgcctgtgaccgtgaaattccactctttatttgggaatataccctcctaaaataatgcgtatgagcaacatgaagacatgtacaacagtgctcctggcagcagtatttgcaacagacaaaaattggaaacaactgaaaggtcatcaacagtggatggatacgctgggtgtggtggctcatgcctgtaatcccagcactttgggaggccaaggagggtggatcacccgaagtcaggagtttaagaccagcctggccaacaaggagaaaccttgtctctactaaaaatacaaaaattagctgggtgtggtggcgcacgcctgtaatcccagctactcaggaggctgagacagaattacttgacccctcatcctggggttggccttatgcatgtgcagcttatggctcagcacatatgccaaagacacggtgccagcacttttttttttttttttgagttggggtctcactctcacccaggctggagtgcagtggtgcaattgctcctgagcataagtgattcttccacctcagcctcccgagtagctaggactacaggtgtgggccaccacgcccagctaatttttgtattttttgtagggatggggtcttcctatgctgtccaggttggtctcaaactcctgggctcaagcgattttccctctacggcctcccaaagtgctaggattacaggtgtgagccacctgcacacttacacacccattcctagctgcagcttcagaaacttctgacccaggaagtcagcccaaaccccctcactgtcccccaaaatttgagttcttctcaactctacccaaacactcccctttcttggggtggcttaatgctctgtctcattgcccttcctactgcctacccacatatcacatctacyaaccttccacgcagccatagacgtgttctatcaaagacagttccctccccaagaggacttctctgactaatcataatctgcctttggttgtaattttgtgttgtgaggccaccacaagggtgtttgctgaagaggtcctggagtcccctcagagcacgcttgctaccaggagtcagcatgtatgtaacttcatcagctggggcttctgcttctcttacaaacaggtgccagggcccaccttgggcactcctgcagaagtgagcagaggcttctgccatggggccataccttgtttgacctaggtgccagcactgggacagatggcacagcacagtcctgccgttcccacagggtttgtgtgtgcatcatgacaggaaacacagcaagtcacaaaggctgtccgatgtccctgcctcagcttcctgaggacctgtgctttttactgaaatacactatctcataagaatacttccctgccttccgcaccccagtgagaaaggagttgtgactggaagtcagtgtcattgactttggatatgaaaaggaggcagaatgtctccagggttaaaagtagtaaccaggccaggcgtggtggcttatgcgtgtaatcccagcattttgggaggcggaggtgagtgggtcacctgaggtcaggagttcaagaccagcckggccaacatggcgaaatcccatctgtactgaaaatacaggaattagccgggtgtggtggcaggcgcctgtaataccagctactggggaggctgaggcaggaagaattgcttgaacccaggaggttaagggttgcagtgagccaagatcacaccactgcactccagcctgggtgacagaacacgattccatctgaaaaaaaaaaaaaaaaaaaaaagsgggggctgggcrcggtggctcacacctgtaatcccagcactttgggagcctgagacaggtggatcrtctgagatcaggagttcgagaccagcctgaccaacatggtgaaaccccgtctctactaaaaatacaaaaattagctggatgtggtggtgggcacctgtaatcccagctattcgggaagctgaggcagaggaatcatcgcttgaacctgggaggtagaggttgcagtgagccgagatcacaccattgcattccagcctgggtgacaagagcaaaactccgtctcaaaaagaaaaaaaaaaaaagttagtaaccaggttgtgtcccacagagctttactgggggccaaacactgtcaacccctcctcaggtcccagtgagtttgtgcacctggccttctgacagtaagcggtgagcagggcatcccccaccaggaccccatactttcctcccatgggtttcctatggaatgttgctgcttcaacttctgagagcctcttgctggggggccccatccctagcccttgcctccctgtgctgctttaccttctttttgggaggataactgccctctgttttcagcaccccaataagaaagaaaaagtcatgaccagaagtcagtgtcagtgattgctgatgtgtggaaacatctgatgaatgaagagtttgggtaaaaaataaagggaactgatgaaaaccacttgtgtgtgaagcctatatagtggtgtgtgcctgtagtcccagctactcgggaagctgaagtgggaggactgcttgagcacaggagttggacatcagccttgaaaagatagtgagactcaatctagaaaacagaaacaacacytctgactggtgtctgcctgtgggtttctgactctgctcccaaacttatggtgagaacttctttgctaacttgagagtctgcaagagtgaagtttttgccaaattttggcccttagttcctctaaaacactaatggaaacgtaaccccatgcttgttaagaccctccttctgccctaccatgattaccagatctctgctgaggttgcaagatgaggtgatcttgctggaaacaaggacaaatgggggaagaaaatagggctggacaggcccaagcattcagaggccagggctgggggtaggtaggggcctgcttcatttgagaacaactatgaaggacaatagggtttcaacaggggagagagtagcggtattcaaagcaaagcaaaagatgtaagtgaaagatgtaagcgggccggtgcgatgggtcacgcctataatccccgtactttgggaggccaaggcaggaggatcaccggaactgaggtgtttgagacctgcttgagcaacatagtaggaccctgtctctaccaaaaaaaaaaaaaaaaattaaattagctgggcatggtggctactgtagtttcagctactcaggaggctgaggcaggaggatcacttgagcctgggaggtcaaggctacagtgagcctgggtaacagagtgagactgtctcaaaaaaaaaaaaaaggagaaaaagaaagatgtaagtgtgtaagtgaagcctggagatgcagacacctgcgaatgggctgctgaggggcacttggctatggctggggctcaggaaaagtggagctcagggaagagaggctagaacagggctcaaagggccttgaaggccaggcctgtcagggtccatcacctcctcaggctggagaagtcagtgcaagctgcagtgatggggtcctgaggccccagtacttctgcccatcctctcccactgtctcccaagatcatacagggaagcctgtttccagatgcctgtgatttatttccaaaggagagctacagcacataggaaaatacacatggcttttcagtctacatttttacagagaaaagagattcggtcattggctttctcagtgccatcatcctgttccatgaggctccaggatggatggcctgtctccaagatcccgctttcaaagcagcagcttggccaaggcctctgggggtaggagtgaagggcagcgacccccatgtgcgggtggaggggaggacatgagcagcactcactgcaaagctaaggcaaagaatagagctggtgrgagatgcctcccctcaccccaggggcatggcttgctgaggcccaggatacagaccaggaggggtggggatgggggtctggtccagcctggagcggcagcaggactctgagtgtacacatgggtgtggggtgaagaggggggcatgctgaagaggaagcctaccagggtatagaggggctttagcttgcatattccccctgccccagaacagctcccagaccatggtccccaatcctacacttggcccctctcttaagttctacttcaggtgggggtcctgctcaggttccttctgccaccttatcccctcccactgtcagtgcaaaacattcttagggccaagcccctgagtcccctgcacactgactggagctgcagggaagggaggacagcaaggtgctagctgggagcctcccccagcaccaggaattccttgcacatctctcggacaatcatgcggtccatctggcactggggtgaggtctcctcctcattcaggatgcgtcgcagtatggcctgcaggtcgggtagccggtggcggtgctgcaggtagggtgtggtgcggactatagcatgcatcagggagaggtactccatgcgcagctgtgggaagagcaggccagctcagggaccccagggaggtactgcaaccaccactggacagggacaggaccccactgtcccacagaccccagggctgtggacctgaacatcagggctgcatccccagcacccacaatatacctggcacagaattggtcttcaatagtttttgagtaagcgaataaaygaatcatcccagccacagacagccccaagtatgtggcctgcccagggaagtcctgcccatcctttgaagctgggtctctcaaggtgcctctgtctatcagtcagaggccctctgcttctcaccctatcctctcttaccctggaagacctcgtgcacattcacagcttcaaatagtgaaccactctcatacctcttacctagaactcccctgtgagctccagacaagaatattcaactgcccacttgacatctcctgcacatgtgacagacctcaaatccacatatctaccaccaaactcatgatctttcccatcctcccagagttgaaggttttctcatgttcttacctttagaaagagcactgttgccgattcaaaagcacaggcctgaaatatggtgtcctctttgcttcttgtctcccacrtacctcatatccaagccatgtctaagacctggccatcctacctcctacatatgccccaaattcatctccaacagcctctcctccaacctatactcccaacacctctggctgaaccagttccaacagcccttatgatctatatatatatatcwtatatatatatatatatgatatwtatatatatatatatcatttttttttttgagacagggtctcgtgctgtcacccaggctggagtgcagtggcatgatcttggctcactgcaacctctgactcctggattcaagtgattctcctgcctcagcctcccaaatagctgggattacaggcatgtgccaaaatgcctggctaatttttgtattttttttaagaagagacggggtttcgccatgttggccaggctggtttcaaactccagacttcaagtgatccacccacctcggcctcccaaagtgctgggattacaggcgtgaaccaccacgcccggccagcccttatgacttgacagcttgttctcacagagacccccagtccactgacctgatgtctgcttccctcaacatccctcatttctctttttacctttaattagagaaataataccaaaacctcctttaggcagcacaccctgctaagtcccagccctgggagtcatactgaggtgcctgcacatcaaacaccagcgtctaagctatagacaaatgcagagccatgtgcaggcctgaatgtcattcaccaccgcaaacctcaaacggacacacagcactgcctgagcctcccrctgcttttctctgctgtgtcactctcccttagagtagtaataatgtccaccttctctgtctttgaaacctacctaccttgtcagctggccttgtgcttcatagagaatacagaagtaatcttgcagaaacccgtctttcccctcagtacccacatctcacctgtccctaccagaatgagcagccctagctcctgtccatgtgggcctggacctgaactctcccctcctgccccatccacttgactcctgtggtggctcaccatctccaacacatcatccatctctctgtgcttgctggatcattccctccggctcagaacatgcaccatcatccgtaccatttttgtttttgttttttaaagagacaaggtctggctttgttgcccaggctggagtgcaatgacacaatcatggctcaatgcagccttgacctcctgggctcaagtaatcttcccacttcagcctccaaagtagttggaattacaggtgcataccaccatgcccagctaattttattttctactgtggtccatcaggttatacagaggnnnnnnnnnnnnnnnnnnnnnnnnnnnnnnnnnnnnnnnnnnnnnnnnnnnnnnnnnnnnnnnnnnnnnnnnnnnnnnnnnnnnnnnnnnnnnnnnnnnnnnnnnnnnnnnnnnnnnnnnnnnnnnnnnnnnnnnnnnnnnnnnnnnnnnnnnnnnnnnnnnnnnnnnnnnnnnnnnnnnnnnnnnnnnnnnnnnnnnnnnnnnnnnnnnnnnnnnnnnnnnnnnnnnnnnnnnnnnnnnnnnnnnnnnnnnnnnnnnnnnnnnnnnnnnnnnnnnnnnnnnnnnnnnnnnnnnnnnnnnnnnnnnnnnnnnnnnnnnnnnnnnnnnnnnnnnnnnnnnnnnnnnnnnnnnnnnnnnnnnnnnnnnnnnnnnnnnnnnnnnnnnnnnnnnnnnnnnnnnnnnnnnnnnnnnnnnnnnnnnnnnnnnnnnnnnnnnnnnnnnnnnnnnnnnnnnnnnnnnnnnnnnnnnnnnnnnnnnnnnnnnnnnnnnnnnnnnnnnnnnnnnnnnnnnnnnnnnnnnnnnnnnnnnnnnnnnnnnnnnnnnnnnnnnnnnnnnnnnnnnnnnnnnnnnnnnaaaatataaaaattagctgggtgtggtagtgggtgcctgtaatcccagcaacttgggaggctgaggcaggagaatcacttgaaaccaggaggcggaggttacagtgagccacgatcgtgccactacactccagccttggcaacagtgggagacaaacaaacaaacaaacaacaacaacaaaaaacccccaaaaaaacactctccctatccccatgtcatctctctccagcaacctcccttccatttttctcttccccttaatagaaaattcacaagagttgtctccatttactgcttccaaccctcccctcatttctactccccaataacttcaagctctctcaaactttcattcagactctcctccttgcaccccactgacactgcttgtcaggcaccactgacctctgtgtggtgaatccaatggccaaccccagtctcgctcaggctcctaacggtatagagatggctgatcgtcttcctctaaacatgtggctttgggctcctgctttcttggttctcttcctgggtttctccctagttgtttcagctgtgcccagggctgcagcccgaacttcccgctgacctgcctatctatctcatttctgaggcaatcacattgtcacaggcttcccatcgtatctctgcatagaccactccgaaatgtctctctagtctcaactcattccccactgcctccctgatgccctcggtacctgggtgtctagcagatatctcctcattcttgacacattcaaaacacgactctctattttcccccaagaagttctcccagcctccccaacttcaaaaatcagcacttcatccatctagctgctcaagataaatcaagtggcaagccctgccagatccacttactaaacactccacagctggcctcttctcgccactgccactgccacgacctatcccatccccaccccatccatgccacctggaccactgaggctgcttcctccctggctggcttccactctgctggcatgcagttgattccatgtgggatgttaatcacatcacattccccggtcctgagatcacaacctcttgcagcagcctccgaggctttgtgtaaactccatcctccatgcctcatctccctccactccctcctctccagcctcctccagccccaccacctccagatcacctcatggctggctcctttgggtcttggtgcacctatcatggcctcctacacttacctggctccagcagtggccttgccccctcatctccactcaatgtcatgccccccaccattttgtttcagtttccacacagtgacccccgctgctgcagccacctccaggcaccttgtctcctggtgacaggtctgcgatgtgccrcacagtgatgtcaatgagagccatcatgtctgtgtggtagaagatggcagctgtggccgggctgccaaacacgtcctgcaggaacttgaggacagagtgtggtggctgtggctcatgtttgaagatgcgcacagggtcatctaggaggcaggggtcatagcrgtcagggtggaccttgtggggatcccagagtcaccccagggggttacgggagtcattgcaggggtcatggagtcacagggcatggaagtggtacccgcgcagattcccgggccctcaccccctctgttcaggagcaacaacagcttctcggagaagatcttgacattggcgtgtttgctcagggcagccatgatgacattctggtcagcagctaaggaaggacatgggtatagacagggtgctgagcctgagagccaccatgtgctcagccaccgcccagccaggccccaccccacctggcaggtgcaggttgagagccagaagcaggttcacgcagaggtccggcagctgctctgtggtgtccaagggcagcccatcctcgacgatgttcagtaggaactgggcgaaaggcgtgcccaggtgctctgggagaggggcgcacagaagtctgcagccccattcccctccgacccccgcaccacccacccttcctggctttctgtgagccttggggatagcctctccctgctaggctgtgtagtcagcaggtcccaggccctcgggcaatgggccctggcttaggacctgtgatcagctggtcggttactgcattcttaccatagtgtgcatagggcactgcctctcccatggagaagaccatggccaggatgagggcagagtaacagagtttctggtggtctgggggggacaaggcaggcagtcagagtccccaaagatggcaggaaaccccagcagatggcaggaacaccctccagatagcaggaagttccctcctaccccrccctccagcctcaccctgcgtgtctgtctgcatgtccctcgccagctctacaggyagcacggatgacacaagygtggagatgatggctgcatccaggctgcacatggcgccaaagcacttgagragcagcagccgcagtgatgctcggtgttcctggcagggaaccctgcgtgctcagtgcctggaactcccccactatctaggtctctccattacccctcccctccatcctgcacataccatttggtaataggccaccaaggccaggacagactcgaactcgtttctcttgcacattttcttgcaaacttcagggtctgcatcagtctacagaaatgaggaagtgagagcatcagccaccatgagcggagctgtgcagccgcacaagagagggctgagcacrtatgtgtaggggagactcctagcactgtgagggatgctacagggtgggggccactgttccccatgtggggtatgtgtgtgggaccccacccttaccagaatatgcagcagctcctctaggtagcagcggatgacaccctcatcctcatatagtgcccaactgcgctgctgggcgtcgtccttccggcgagccaggtctgcaaagatcacctccagcctctgctggtcgtggcagacctgccctgagggcagggccatgctgaggtcctagagggagagggcaaggcatgactcagcacactccctgccctcaccatctccagggagcctccaaggcctggagagtccatctgtggacttttactccatgaactcaagtccctcctggcccacactggacaggaggctcaactccagtcttgatgacctcccaggacaggagtcaacgggagactcatctgtagggggttttcaacagctcgcctctcatcccagacctggataaacacccccaactaggagggccatgaactctgtcactgccagaatgtgactctgagacctcactctcccattccacacaaaatggcacaggcctgtcatctaccaacttgccacattttccttgaaccctgctgaccaggcactagctgttgtgcccagcacagccaagcccattggcccactccccaacacccaaaccagaagtgtaacaggaaccatggagcactaaagagggacctttggtctgtctgacccccatcatgtatgctgggctcactgcccccatcctgctcatgagtgccaaggatcccacccatcccatgatgcccacacacctcactccctctcatccawgtcagcacctaggactccatcccagctctcccagcacccatgtctcttactgccaaggtcagcaaggcactaccctcacccacgccgtgtccattccttccctgcagccagacagaactcttggccacccgcatstsgtcttatctgtcacctgccccaggtctcacctcctcctacagcacccactccctcactccctgtgttccagtcctgcaggccttgttccacttcctcccacaagccaggctcagtcctgccttgtggcccttgtccaggctgcgcatctgcctggaatgcttgtccttcctttctgcttcagaaatcagctcaacgtccccagtgcccagcacagtaagagctcagagccagagcttgagaaatacctgtaatgtacaggctggacaagtgtgtgacggtgggaacagggtgggtagcagggtggccctgctgtgccgcccaccctcaccttgccctctacgagtgagaggaggacctgctccatgactggtgagctggccggcaccgaggcctggatgtgacccactatgatgccgatggccacccggcataattcgtggctcaggccagtgtttctccgcaccagctccatcagctcggccccaatggtcctgggcacagccgcctcagctgctgccttctcctctgtggtccccaggctcagtgtacccagggcttccaggtcatcagaggctgaggttgtaccagttgccacttcttcttctgcagggggttcaggtgctgatgccttggagggagggggctggacttgggacacggtggtgtgggtgcctcggcggggcacaggtgggggtgtgggtgagcagctggagcctggttcagatgggctggagctggtatagagcgtgtccagggaggtgctgctgactgaggagccgctggacacagagttacccccggagggcatggtgttgtggccacctgcgagcagtgagtagaagctgggccagggcagccccctggaaaaccatacccttcacagcccagatcccctgtcccctaacacagggcctagtttctctgctaggcactgcctcctcacaaagcccagagcccctaattgccccaaaatgggagtcctgtcctcttccccagcttagagcctccatttccctgacacaggcagcacaaccattccaagcatagggtgcctccacctgmattcccctaaccctgccttcttaccactcccagaggccatcagggcctcgcggtctcggcgcttcactggtgggggcggtgtggtgggtgctgctcggcgaggctgtggtgggatctgggaagatggaagtgggatctggaagatggaagtaggatcttggaggacagactgacatctagagcrycagcgrggctcgggccctgagccctggctgtgggcaggactatggctctgggccgcatcactcctgagtggaccccttgagcctctggatgaagcctcaagttccacccacctcccttctccacgatgtcctccccacacacctggtagaggcctccatctgccccaagatgctcagaactgggtaggctgtgctgccgctcgaacccagctcgacacaccccattgggctgcctggctgcagcagcatccaagtggtggtcactggttgatgaggtcataactgcaacactggaggctgaagggcctctgcgtgacagggtctctttccggtggtggatcagcttcctgatggaaggacaggaagactattggggggttgcatctcacagctcaaagtcctcatatgcccctgtgggatgctgggaccccatagcccaggcccctcagacatccccatctcctccatgctccaccccagcctacagtaccccatactatcctcagtcctgcgctctgcacacccctggtgctcactgaaggacccgaccccaccttgctcactgggaggtgccattcccccaccacccttgccaaccctcgcatttcccaggcccacctgccccatgacactcattgaagaaccccaccccaccatgctcaccrggaggtcccacttcactcccctcaacactcactggaggactccacgctgttccaggctgtacttgccaccatcccgcatggctgtgttgtgtacagcctcgatggcccggtcaatggcctggaggacatcctgctccaggccctggggggggcaggggacagcagttagacctgaaggccaaacggaggtgctcagcccaggcccagcccgagatagaacccagggcagagaaccaatatagcgaaagcctggaatgctagacatagcacaaaaagttgaaccagaatatggaatggggttctcaaactgtatcactcasggagctgaggcacagggtgacccccatgctgccacattacatattaggtcctgatcaggattttaccccacagcaaggctcttggctaagatgtttctgaaaatcagaggtctaaagcaaaaacatagcccaggggctcccagcttgcagccaggagcgcatacctcgtctatccctggtcttggctcagagcccaggttgagatgccaaacaggaagtctccagtatctggaatccttaatacatcactctgcatcttgctgatctttcacaaaaccaaggtcataccccagaacagccctgtccttgtaagggccctctgtaagccctgggagctgagaatgggtcaaagggacttgccctccccaaccctgctgctggccctcatccccacaagatgtctcagtaagcttccaracccaccctgggaagcagttctgtgtttgtggcaaaggataaacatgagagaggggcctagcccctgttccaggctctgtactgccatccccaacattccagggatccagtctactctgcctatctgacatggggagtgtagggtagcagctatcaaaccagctacccccagccctcccctggccctggcacacgtagtccatcaggctacataggagtcccggagctgagatgaactcattccaccatgggtttgagaagcttccctgatgggcacagacaggtgggcacagaggtcagcaaagccctccaggtggtatgaggtgtgccagagtgcagggagaggagacagggggatagaaagacatgaagacacacacacacacacacacacacacacacacacacacacagagagagagagaaagaaaggaatggggaaagagaggagctcagagaggaacggagaggcagacagagggaaacaacgcagaaagaaacagagccaaagccagagtgtggggggagccggaggaagaaacaaaaacacacacatgtggagtcggaacgacacaggcagagaggcacagagtcgcagcaatccagacagaaagagacacgcagaaagaaacagacagtgacagagaagatggtagcctctctgccctccccaaacaccttgccccactggtcctggctggcggcaggggactcacaggcccttgacctatgcccagtaggggaagagacaggacttttcctcagaggccttcaatgagaccccattcccaaaaaggttgggtctgacacacagcagccatggtgtccacggcccccactcccacccctggcactcctagatgggatcacgccaagggtctatgaggaagcccctaggcccccagggcccatccttcctggtaagaccagatgacacttccaaatttatcccgttatttctgtcctgaactgggctgggacaggatgtttcctaaaggataaggactaggacggggcgggggtgtctggcacaggcccggcagctctgggcccttcttccccctgtggtcagaatagaccagctggagatacgcaccccaacccccgcagcagggctactcttagggaaacaggaactgggactgcagcttccactggaaggaaatggggccacgatcagaccaggagaagctataagaactcacttcatcacaatgtgagcagtccccactccaggctgggaacaagtagggatggaacccattttcaaagcaagaaagtttgagaagtcagggttggggagtggagcagacagtgtcagcaggggcatgggtccttggttcaaataaggttggtagagacttaagaagagcttagagggtggctgaacacaggctagtgaaagacactgaagtaccaaagcttgggtgttacataggggatggaggtgtctatggctctagggtccaagttggggggttgaggacctggagaatggctagggaaacaggtggtgtccaaggtggtccaggtctcagtggtggctccaacggggggcaaggcgcggggttgggggaagaaggaagggagggagggagggagggagggagggagggagggaggttggttgtggggtcctaggaatccagagaaggggcatattaaggatctggggtctcagggatttgaataattggccaggattcggtggggctcagggtcgccattcagatggcggactcgatactgaagggtctggggtcctgaggagtctcagtcccagagttaggcttttggtcgatcgggagttggtctgtcaagggcctggtcttttgtgggtgatgctgacacttggggtctcagtcccccgtggtccgggggtctcagggtcaggttctcaaactccctgtctgatagaggtcctggcctcgggtcccggagagggtggggtccctgggtcggttcgcggggctgtgaaggggtcctgcccagggcgcggaggccgggcgggaaggggcgcactcacctgcaggcggcgcaggtaggctggcggcacgtagcccgtctcaccactgcgcgcgcgcgccagccaccagtgcgcgtcttcgctctagcaccaggaaggtcgtcccgcgcgaacccagcgcgttggcacccgagcggaagcgtacagcgcgcggtacatgaggccgggcagggcaggtgcagggaaggtggcaagggctgcggcgccacaacgccaggccgggagcgcgacccgcgccgcggttgtcccgccccgtgacacactacgcagcgcggcgcgcccgcccgccgaagccccgccccgggctgtatcgttccacgcatcggagagcagcgcccccgcgcggccccaagaggtgcggcggggctggggtcgacagctcgctgtctcctctggtccctcccggctccaggcccctcatccccggacaccgcaccctcactcctcaccccggcctcagtttcacccgtccagccctctgctccctttccccgcttaagtccgagcgctgcgtcccgtcctacctcccggtgaaagcgcgctccgctcgtagcgggtgcgcccctaccgccctggggcagtgggtcccatctactaattgcaaggacggcgacctcgaaaggatgatcttgctgatccgacacttggaagccccgcggggcccggctctcggtgtgtctaggcctcaccacctgtcttcaccgagtgccggtggtggccagtggggagcaagtgtggggagaagggggccacaaaagcagaaaccaggcggggctattccctgtctaaagccctcccatctttgctccccacccctactcctcctctctcttcagctatggctggttttctctatattgggcctttgcatattctgttccctctacctgggacaattttcccttccctctcctatagtatttgtccgtcaagctcccacccccatcaatcgctatcatcttgctgtgttttattgtctttataggacttaagatttgcgatgcccctttctgagagcatagaggagggctgaaagagggagtggggtaccacggtggccttaagagcctatttgatccacccagctttccagtcagcccagatctccagatatatgaaatccgtgtaataagagtgcctggaagacccagggaagaggccctcagggtcctggagagactgtggctgagaatggtccagctacgctccacaggaagcccgagcccaggaagcaggaggcgtgtacaggccagtgtgtgcaagttttctatttttatctgtatttattttttgagacagggtcttgctctgtcgtccaggctggagtgcagtgggatgatcaagctcattgcagccttgatcttccaggctcaagcctactgtctctgggactacaggcatgcaccaccacactcagctttttttttttttttttttttttttttttttagtagagacaaggtcttgctatgttgctctggctagtctcaaattcccggactcaagcagtcctcccaccttggccttccagtgttgggattatgggtgtctgtctgacccagttgcctatttttaggcctaaagtacataggcctagtgtgaggttcaggtgaggggtagaactgctagaaactgacatccagaccctgccttctctgcaccaggtctggctcttcagttcaagacctctcttggcccttcctcctcccagaagccctcctggggcagggcagaatctcggggtctgtgctgtctgggactgcctgaagaataagactggtgaaattgcaatggggactagggctgggcaggagtggtgacaggtggtgtggccaagaggaccaccctacctgcccaaacacgcctttttatggtaccctccatcacctgggcccctttacaacacagtccatggctgccaatggaccagacccgaggctagagaccctagtattgcttccaggacatctatcacaatagccagccaattagctgctgccagtggcataggagggattaaaagctggacccaaggtttggatcacctgctatctaattggcttaagctgcatacggcccatgagaagacctgtgtcaagcgtcatgtggtttttggatagaggtgctgagacacttagccagcacagacgccagaaggtatgtaacttggggatcctttctgggtaaccttcaggatgctgggttggagactgtacaccatgccaagaggttgtgctgactttaggatccatggagtgggggtggcagccaggagaatactgagccagggaggtggtcacagcatgtggtgaggcttgggagggggactgcctgctcttggaaagaatgacaggagcactatatacaataaacaaaaagatttgtattagaacatatacactcagggaagaaagaggtatcatcatcaaatgtggaatgttgaagaaatagttaaaataaataaagactccaagcacagctgggactggctcaggctggggctcacagaggccactgcacatcagctccaggctgcaggagccaccacctggccatactggcttcctccctgacgcagcacagctgtgcctgggacacagagtcgctctcaagtactggagcagctagcaagctcactccccactctcctcacttatctctgtgacaatgtctatcaggctctggagcccgaagatatagccagcatcctggccctcatgcaccacggtgtcctcgccatacagcctgcaggtggtgtgtgcaaagtcgatcatgcgcacatctacagagctggcgccgatgggtttgtaggcataggcaccagcagactcatcagctgattcctctgacaggtcctccaaatcctcagcatctgagtccaggaccacttcgggccgctccttgccatcataaatgaccagcagggagcttgagtagaagcggtaggactcctgtcgctccaacactgccttgagctcagtcagcttcttgagcacagggcccaggagttcacggcgcaggtaccgcccattgtggaagaactggaaaagtgcctccttgaagccctgcaccgatagcttccgtccatggtacttgttcatgaacatgagctgcccactgcctgcttggtacacctgtaggagagagaccagcaagtcaggggctgagggccatctcaaaccctggaccccgggcgggggtggggtggtgtggtggtggcggcatgtgacagcccagatcagataaagtacaccagttgcacatgagccactgtccactatgctctctgatcagcccccacctgggatgcagccatccaacctgggtttggtcattgtgccccagcaccccacctcaacatctgggtcactggagaggaccaaacccttttgccttcctccctactactatccacagattctggactcagccaaccagaccaatctgagagaggatcatgcaggcatgcatgctttcttttttaaccaaaaagcaacagactcatgtagggtcaaatctggaacctttttattttgagacagtctcgccgtcgcccaggctggagtgcaatggcgtgatctcagctcactgcaacctctgcctcctgggttcaagctgttttcatgcctcagcctcccaagtagctggtattacagccgtgcaccaccacgcccagccaatttttgtatttttagcagagacagggtttcgccatgttgcctgggctggtctctaactcctgacctcaggtgatccacccaccttgacccccaaagtgctgggattacaggtgtgagccactgcacctggcctggaatcttttgagcaaacaggactataccagggtggggaagtgacagccactggatgccctagccagccctagcatccccctcacctgcatgccacacacacgcacaccaatgactgcagatgtgctctgctgacattttcggatctggttggctgccttctcctctgaagcatcatcaccatgttgtcgtgtgcccatcttgaggtcaaggacacaaggcacctcgtagcgggaagtcaggttttccagtaagataaattctgagtagttaagaataatacccccaaaaggaagtgctactgcatgggtccttggcactctcaaggtacagtgccttgatgcagtgacccagagaagcctgaacccacaggagactccattagtcctgccatccccgacacagggagtccagagctgactataaagctaagagacacctttacttcttgtcagggaactgacgtggaagcagcctgcacccggactcaacagaggcctaggctcttcctgcctgggagacacacatgccatcttctgaactcttagctaagtgtaggactagggtccaaaaacaaagtcctcaattacaagtagaacatcaagaaagttcagtaaatcctgtagccttaaatgtgaactggaaatatcagtataaactcatgaaaatactttgctctttaaacgtctgcttctcagctgtgtgcactaaaaaggtctagaaacaataaccagaaataatgagtgtctctagtgcacagaccattgactcattatttcccattcaaggaatcagtgctcccaacagcagaaactggtaaactatggcccagtgcttgctgtttatggcctataagctaggaatggtttttacatttttaagagaccaaaaaatagataaaaggctaggcgtggtggctcacgcctgttatcccaacattttgggaggctgaggcaggaggatcacttgagccccggagtttgagaccagcctgggcaacacagtgagaccttacctctacaaaggggaggggaggggaggggcagggaggaagagggctgggcgtggtggttcatgccagttatcccagcactttgggaggccaaagcaggtggatcacctgaggtcaggagtttggatcagcctggccaacatggtgaaaccctgtctccactaaaaatacaaaaatgagccaggcgtggtagcggatgcctgtaatcccaactacttgggtggctgaggcatgagaatcgcttgaacctgggagacggaggttgcagtgagctgagatcacaccactgcactctagcctgggggacgagcaagactctgtctcaaaaaaaaaaaaaaaagaaaaaaaagagagagagaggaaaaaaagaaaagagaaaagaaaacaaatatttccttatgcacagctcatgtcccagtggtggtctggtgaaccaggactgatcaggtcagtctcctcacccaaacaccccagcccttggcaggtgagcaatgttttcagacttctgaaaagtctgaaaacagggagcagctccttgccctcttcctctaggttaccgtgagtaaagcccacctgatgcaagctggccccttcatgaggcacccctcacctcccagaaacccattataccccactcctcatcatctgcactcctaggccagtagctgccctgagggaagtgattatttgcccataattatcatacaggtcctggaataacccaggtaggagaaactcaaccatgactataaaaacctaacttctctctccaagctccaagggacttcctcatttcctctcctcttaccctcaaatgcagagatgcccgtgaacaaaggatactgtactggttccgatgctttgcattctccttcattctctgtaactgttgctggtgacatttcatgctccaagggttatagtgtttaagctgggaacttatattccccttcttctctacagtgtagtacaagacttcagatttctttagccactcaaattcttcttctaacttatggctataaagagataaggaccaataaatcagtatgtcttatcagaattcagaaggccgggcatggtggctcatgcctgtaatcccagcactttgggaggccgagatgggcagatcacttgagatcaggagttggagaccagcctggccaacagggtgaaaccctgtctctactaaaaatacaaaaattagccaggcgtggtggtgtgctcgggaggctgaggcaggagaatcacttgaacctgggaggcagaggttgcagtgagcctagaagatcgtgccactgcactccagagcctgggcaacagaacaagaaagactcaaaaaataaataaataaataaataaataaataaataaaatccagaaactttcttttttttctttttttgagatggagtttcgctcttattgc

SEQ ID NO: 97466 - DNA, 53345 bp, Homo sapiens
  misc_feature (1)...(53345): n = A,T,C or G
ctgaggcaggacaatcacttgaacctgggaggcagaggctgcagtgagctgaggttgtaccaattgcactccagcctaggtaacgagcaacactccatctcaaaaaaagaaaaaaaaaaagatgtataatttggaactgttaagaggcattttaaagaatggatattttgtctcttaagattcttccaccggggagtttggccagacctggtggctcacacctgtaatcccaacatcttgggatgctgagataggagtttcactgaaggccaggagttccagactagctgagtaacaaagagagacacccaacacaaaaactaaaattagccaggtatggtaacaggcacctatagtcccagctactcaggaggctgaggcaggtggaccacttgagcctgcaagctcaaagctgtagcaagctatgatccacaccactggcacttacgagagggagaccctgtctcaaaaaaaaaaaaaaaaactccactggggggtttcatacactagaaaacctattctttgtagttattttggtataaatatatctactttaaaatgtgagggggaatgtcaaaatgttcaagagtgtaagaccaagtccacagacaatgttatatatgttacagtgtactgtgtctgaagaacaatgccaaaattctttattaaattaactgttataacaaagatctgacacttaactcttagcaaagacatctcatattcactatgaatgtgttactgacttctccctattagcctgaaatgtgtctactcacatgataaccaataaccattgcataatgacaaactgcctcataaggcccctagtgattgaagtgccaaattagaaaattgcaacatatgatgtgaactcaaccagtcagcttcaatgcaaaacaagtagtaccagtaagaggcataaatttccccacaagcggaattgtattgatggctctagcttattccctcccaaaagatgaacagcaaacaaatgaagtgaacataaactcaagattttattgtcttcataataaaagatgacacttagaactggatcacttggccctgtaacagaacagaaaaaagttgttttgtattttgccatgaactactgccccattaagaacattatctgttcctaaaatactcaccatgctgttaagctgcctcattcttcctttcctccttgtagcaaaagacctcacatatctttagctatagatctaatatttttagaggattacccctgagctctatgccacaatgaatagatgttcaccttttcaaataataaagctatgaaaaagattgcaccttccacccataattatatacctttctcttcttatctcctcccagttcaaaatgcttgcatcttttaatagccagcattctcttagatctgcagttgggctcaacgcactcaagccttagcacaatcttctttgtagttttagcctgaaaaaaaattaaattaaagccttaataaataactacagaagatcactttcttcaaaaatgactactttaagtactatttaaagcaaagcattgcaaatgaatagtggggcaactattcttttgcaatgctttgctttaaatagtactcagtatactcttaagccatagggagaaaataatctaaaaatcagtgaatttaagagaaaatgtgtagaacttgtggactaaaaaaaataaagagaaggctgggcacagtggctcatgcctgtaatcctagcactttgggaggccgaggcaggcagatcatgaggtcaggagttcaagaccagcctgaccaacatggtgaaaccccatctctactaaaaatacaaaaaaatcagccgggcatggtggcacgtgtctataatcccagctgcttaggaggctgaggcagaagaatcacttgaacccgggaggtgggcggaagttgcagtgagcagagatcgcaccactgcactccagccagggaaacagagactccatctcaaaaaaaaaaaaaaaatatatatatatatataatatatataaatatatataaaaaacataaaaatatatataatatataatatataaatatatatatataaagagaaaatgtggtaatagcaaagatggcatgtcacccagttgtcatcaagtttgaatccaaaccccattcagatcaaacatcctagagcttcctatcaaatgggcaactcatcttgccaccctgaacttgtggccattcagcagctctgcatagttctttaatcccaacagtttgtgaggctgaggcaggatcacttgagcccaggattttgagaccagcctgggcaacatagtgagaaccccatctctataaaagatcaataaattctaagactacctacaattatgtctagaatttatgtccattcaactgaattatttaactcaaactacactccccactaatcctcaactttttttattgttctttttttttttttttgagatggagttttgctcttgttgcccaggctggagtgcaatgacgtgatctcagctccttctcctgggttcaaacaattctcctgcttcagcctcctgagtagctgggataacaggcgcccaccaccacgcccagctaattttttcttatttttactagagatgggggtttcatcatgttggacaggctggtcttgatcccctgacctcaggtgatacacccgccttggcctcccaaagtgctgggattacaggcgcgagccaccacgcacggccttgattgctccttttacctaaacaacagaactattgtttacaagttttctatttaccaaaaaattgcaaacatgctacagagttcttataaaccttaccagtttctcatcttacattagtatgactcattaacaaaccaacactgatgccttattaactcaagtccatactttttttttatttccttatgtttttctaatgtcctttttctgttctaggaccccacgcaggacaccacctaacatttagtcatcatgtctctagactcctttggctgtggcaatttctcagacttttttgatgaccttgacaatttccgcactactggtcaagtattttgtaaaatgcccctcttgggatttgttatttttctcattagatagggttatggatttttaggtttaagtgtcattttcatcacaccttatcaagggtatatatcaacatgactcgtgactgttgatgttaaccttgattacctggctgaggtagtgcttgttaggtttctccactgtaaagttttattgcattttttctttgaggtacaaacaatccaattacactctaagttattttaaaatatgtaactaagttattgactttagtcacgctgtcgtgctatcaaatagttggtctaattcattcttttttctttttgtacccattaaccatccccacctcccgccaccagaagttctcagcttctggtaaccatccttctactctctatatgacaagtccacttgttttgatttttagatcccacaaacaagaacatgtgatgcttgtctttgtgtgcctatttcacttaacataacgatctccagttccacccatgttgttgtaaatgactggatctcattctttttatggctgaatagtaccactgtgtataggtgcattttctttttccctcttttttttttttttttttttgagatggagtcttgctctgtcgcccaggctggagtacagtggcgtgatctcggctcactgcagcctctgcctcccaggttccagcgattctcctgcctcagcctcccgggtggctgagattacaggcccacaccacaagcccggctaatttttgtatttttactagagacggggtttcactatcttggccaggctggtctcgaactcctgacctcaggtgatccacccgcctcggctttccaaagtgctaggcacaagccaccgtgcctggccgcgtataggtacattttctttatccattcatcccgatggacactaaggttgcttctaaatcttagctattataaacagtgctacaacaaacataggagtgcagatatctctttgatataccgattttcttctgggtatatacccagcagtgggattgttggatcatatggtagctcaacttttaaatactcaatttcctaataagcttgcccctttagccagagttctgctgctgctagtttgcagttcttaataggccaaaacctagttagaacctctgtcttctaaacaagttatccgaatgtgaaaaggtataaaaaaagcattctttttgccaccctgagatcaaaccacttactgcatccaaatgagcactaaagtcattccttaatactttctggagctaaactgcacaagaagcaaagtgccaaaagaaatgctgtgttggagagaatgctccgttccaatcatcgtgctaattactttaagagttagccaaatcacctaaggtttgagagtaaacagaaactcgctcagcctgagaatacagaattcaggaggctagcagaaaggcctaaatggctattctataagagttttaagacttcacgagaacaggtagttgactgcagatttctgtgatgagaaacaacagaacaattcttagtgcaaccaacaagcgaggattcagacatattgacagataaggaacaaggcaaatgaaaggatttaccagtgtactcacacttcagttcttaggaaagcagggcacattcctcaattttttgcctcttcagaagggaaaggataaaaaatcgtaaacactgaaatagtgcagtattgtggactagtcagacatgagttgcattcccagctccatcacctactagatatatcagtgcagtgaaaacttcgctaaactaacgctatacctatatcatgaagtgtgtggactagagacaagtgcatatccttacggcaattaactgggaaacgtcaaatagtaactaccactcacctttttccggaaaatcggcttagtttgcccaccatagccactctgcttcctgtcataacgccgctttcctgggaaaacgaattggtatttgttataaaatactgaagatcagcaagtaagtcttacaggttttatcttaatttcgcagcagaaatattaacgctcaagccaggcgtggagggagagagacccggactcgtatgttattctacaacacaaatgtcacattaacaccaaattatgcggaatccatcttaccctgggcgtacagagaatccttgcccttcttgtactgtgtcactttatggggttggtgcttgccacacttcttacagaaagtccggcgggttttagggacgttaacctagtaaagaaacagttcagaacgtgcaatgttatttgaccacaatggcacaacgccctaccttacccagctaaagctgaggcactccaggaggactcctcattacttgctacctctgactacagggtgggccagccccatgtgcttcaagcagagcttcctccctccgtcgagccccaaagagggaagagacctcattaactccacccccggctaactctacctctttgaacccatcacttcaattcctggccccgtagcccggtccctttagggttgatcccggcaagattgggttgctctgatatatcgagtccacacaggagcctggacccatcccggcatagcacgggcgacgaagggggggaaagattaagctggatgttactcggcccccaccagcaagtcctaccatgcttgcgtgagcgctatcggcgcggaaagaaagaaaccgcgaggcaaacggaagtatataggaggttcccgatcgcacttcctcatgggagtcggtaggagcaatcatagagtgtaaggctcagcgcagcgccctcgggcggctgagaggactcagttcggagccgcgggcgggagcttaaggaaggactccgcctaaagggtggtccactcaccccgacttcctcccgccccgcagctttcaacgtttcgtcactttatctcttttggtggactctgctacgtagtggcgttcagtgaagggagcagtgtttttcccagatcctctggcctccccgtccccgagggaagccaggactagggtcgaatgaaggggtcctccacctccacgttccattcctgttccacctcaaggtcactgggaacacctttcgcagcaaactgctaattcaatgaagacctggagggagccarttgttccagttcatctatcacatggccagttggtccattcaacaaatggttattggatgcccattatgtggcaggcactgttccgggggagaggtacagtaatctaataggcttataaatgtgcaattatgaactaagtactttgaagaaaaggaacaatgattggcattaaagcagcacccttctgttgagggagtaagtcagcagctctaggttctgaaaagtgacaatgaaattgtttggctcctgtaatagcaatcatcaagcctagaagtagaaagtacctagcggctcttcccttccttgcaaacctggcagaaggcatatactaggtctcaagagagtccagcatagaaagacttcagggtgctaaacattttaaatagattgtgtcatacaattctcacaataattctaggagacaggtggtactattattctcattttacagattaagaaattgaggctgtaggatgttaaacgatttgcccaatgtcaacggtatttagtgaatctaggatacaaacccaagtagactgactctagagcccgcgttcctttaacattataaaatattgctgttgtggcctggtaattataatagctaaaaaaattatggcgcacttactatatgccaggcattctcctaaccaccttacatactaccccttttaatcctgacagcaaccccaggaggtatataccagtattagtatttaacaggtgaggaaactgaggcacaagagatgttaagtttacttacctgaagtcacacaggttgttatttttttgtggagctggaatttgatcctaggtagtctaacactatagccttgcacttaaccactacatcatacaaaggaagcaggggcatctgcagtgtagaggatggtgaggagacagaattgggctgagacacaggaggaggtggcagtggaataggggctgaagaamcgtgagagtctggggtatcttgcttgcacaaccctccrggaacacgcgtgggacctgagctgacactctgatcacccccttttttgttgggtggtctctgggaatgagataataaatatattaccactacctgctacatttcctgaaaatttctttgccaaacttccagcattttctttttctttccagattcttaagcaatctcactggcctttaggggtttatgttagtaacatggaaatatgaagaccgtgaacatggcccctcttcatttaatcaaccttagttctttctatcatatctggtgttatgtggctttgtgggggttttgcttgtttttgtttacttaaaaatatttaattgacaaaaattgtttatattcaaggtgtacaacatgatgatttgatatgtgtatacactgtgtaatgattaccacagtcaaattgattaacacatctatcatccatcaccatccatagttaccatgggggtggtgaggacacttaaaatctgctctcttatcaaatttcaataatacagtattattaactatggtcactatattgcacattagatccccagagcttatacatcctataagtgaaagtttgtacaccaatgctgacacygaggtgggaggatcgcttgagctgttctctgttttggacrtgctcctgctcattaatttcccctaagacgaggcactcagaactgaatgcaggactctaggtgtggtctggctttgcagagtaagtggcatgttaccttcctctgtctagatattttacttccataaggaagcctcaatgtcaccttggcttttctggaagccatgttaactgatgacatgccttttgattactatcagcaaaaacccctgaaccattttcacaaatgctactgctactccactttctcctggagtcatttgaagttcaaatttggggcccaattatgagacatcacctttagccctggtaaaatacactttgtggaatttggcttctcacaccaggtgatcaagatctttttgggaactaattgccctcttctgtcatccagtctagcacacaaagccttgcaccattcatagactaaccgggctactttttatattttcctcaaagatgatcaataaaaatgctgaacaggatagcaccaagaatagaaccttatattgcwttgggaatctcttcagrtgacactcagctgtttatttgcactatctgagtacagtctttctgtcagtatggatgagtgtgctaggggagtggtcgtgggcagagggtgaagaaaagcctacgtctacttgctcttttcccttgtgctcctctctctctcttgtttagctctcccattggatgcctatcacctcccagtccccaccccaagatggatcttgagaaaggacagggcatgtgacaacaagtggcataagactgaagaaaagagcctgggcacggtggctcacgcatgtaatcccagcactttgggaagctgaggcgggtggatcacgaggtcaggagatcgagaccatcctggctaacatggtgaaaccccgtctctactaaaaatacaaaaaattagccaggcgtggtggcaggcacctgtagtcccaactactcaggagactgaggcaggacaatggcgtgaacccgggaggtggagcttgcagtgagccgagatcatgccactgcactccagcctgggcgacagggcaagactccgtctcaaaaaaaaaaaaaactgaagaaaagaggagggaagatgaatgcctgtggccaaccctcaggcaggtgagtggaacagctattgggggtgactagcgaaaggatagacgttgtcaataaagtaaggcaatcatacaacacatgctgtccatctgtcttgtgcaaatgtgagtatcaaccactctatcatcagtctacaaatactttaaatgtttttatttaaagtcctgttgatggctgggagaggtggctcactcctgtaatccctgcattttgggaggccaaggcaggagtatcgcttgagcccaggagtttgagaccagcctgggcaacatagtgaaaccccatctctacaaaaagtagaaaaattagcccagcacagtgatgtgtgcctatagtcccaggtactagggtgactgaggtgagaggatcacttgagcccaggaggtggaggctgcagtgagccatgatcacgccactgcactccaacctgggcttcagagcaagaccctgtctcaaaaaaaaaaaaaaaaaaaaaaggtcccagggcctgttggggcttgggggtgaggggagggatcttagaggatgggtcaataggtgcagcaaatcaccatgtcacacatatacctatgtaacaaacttgcaccttctgcacatataccccattttttttgtttgcttgtttgtttgttttttagacaaaataaagaaaaaaaaataaggtcctgttgacttaaaacttcggatgaaattgtagtgggacctgtgatctgtttctacattaggatacagtgccttggggcaaggaaatatggcagtgcccgaggtgtcaaggtgggcaggcagatcagtcagcaggggctccaccatcatggtctgcattcaatactggctgcatttcctaggagaatccctgggggaatcattgcagttggagcataatgtagggggcccctgagaaaacctccaggcttcaagtgacatacctagtctgctttaccggtttacaggactcaagagaaaggtggacattgagagttaatccctgaggccaaatcttaaatggagaaagtcaacatccacagaaaatggggaagggcacaagtatttctgtgggcttatattccgacatttttatctgtaggggaaaaatgctttcttagaaaatgactcagcacggggaagtcttgtctctacctctgtcttgttttgtcctttggggtcccttcactatcaagttcaactgtgtgtccctgagactcctctgccccggaggacaggagactcgaaaaacgctyttcctggccagtctctttgctctgtgtctgccagcccccagcatctctcctctttcctgtaagcccctctccctgtgctgactgtcttcatagtactttaggtatgttgtccctttacctctgggaggatagcttgatgacctgtctgctcaggccagccccatctagagtctcagtggccccagtcatgttgagaaaggttctttcaaagatagactcaagatagtagtgtcagaggtcccaagcaaatgaagggcggggacagttgagggggtggaatagggacggcagcagggaaccagatagcatgctgctgagaagaaaaaaagacattggtttaggtcaggaagcaaaaaaagggaactgagtggctgtgaaagggtggggtttgctcagactgtccttcctctctggactgtaagaatatgtctccagggccagtgtctgctgcgatcgagtcccaccttccaagtcctggcatctcaatgcatctgggaagctacctgcattaagtcaggactgaggtgggtctggggtatggcaggggctgggcagcagcagcaatgtaccttgcttgggacccctaaaaaccagagagacagcatggctggtgccatttatcagctagtggaggaggctgacggagggtgggagtgtcatcagcacaaggccctggcagtcccttctggtgattagagaggccgaaagggtcctttccgacaagggctgagggtgggcggaacaggaagagaaaaatgtgacatgaggtgaycatccgaacaggtagcaaatgttagaaaggggtacctctggcaaacttagtggaaaagtaatattgcagggagcagtcagataaaaacaagcccttctgtcaaatagtgcttgaagactcaatagggatacatgggtcaatgaagcctttagaaaaagaaatactaagaggcagattctctgagaacatggtaaaagctcacgctccacgttatgaagttracctttgtgagctagggaaaggcctggctaggccagggtgtaggctacctgccttgagctgtaccaggccaaatgtcgccagggtcagagctggcttattaaaggactgtgtggaagctgtgccaacctcgtggtaacaatgggtaaaagactgggccaggagaaagcagcctctgcctcagcccagacagtgcggccaacccttgaggttgtggcaaaggtttctcctcttaccattgccctccatgtgcatggcttgcttttctcttgtcttcattatttctcctttcctttcctcctctccaacctcctcctcttcccactcatcctcttttctctacctatatcccctcttcattataccctcctctgttctgttgattaccagaccctgacatacagttagcacttaacaaataattgccgaattgcattgactttttcttgctcctttcttcccccgctcttttcccttttcctttccctttccatttcctcctccctgcctgcctagcaccttccccataaggtggttgtgagcagtaaatgtgcaaatacatgtaaagcttttaaaacagggcctggcaatagtaagtgctggatctcagtatttgctataatttttactctgcctcagacctgccaatgtcccccagagggcctacctagagcaaataatatgacatttagaatraaagtgattggtgaccccaatcaagacatccttggataagttgcccagactccagcctctctggagcctcagttatttgataaaayaatgtcactttccaaataagccacaaaatgcaaawactcatggcaacctaaagcattatacccaaacagtgtcccttagggcttgtcctgtctattctgactccttttatattcaaactatttaaactgcttgcttgtgttgaagtccaaatttccattgcgtatggctattgatatttttgtttggaattttttttttttttttttgacacggagtttcactcttgctgcccaggctggagtgcaatggcacgatctcgggatctcagctcaccgcaacctccgcctcccgggttcaaacaattctcctgcctcagcctcccaagtagctgggattacaggcatgtgccaccacgcccagctaattttgtatttctagtagagacggggtttctccatgttggtcaggctggtctcgaactcccaacctcaggtgatctgcctgcttgggcctcccaaagtgctaggattacaggcgtgagccaccgcacccaccctggaattctttgtaaactccttatggtgcgaactaatgtaactttccatccagttatgggggattggtgcaattttaaattatcastatgatttgctatttccatttgagcaaatttcctatagagtttcctttcagtggactagacccatatcaggaagtgacttaggtataaagggaagatacagctttcgaaaaccaaagtttgggcgttctccaaagagttatcagatacccccttctacacccacaatgatctgattgctgagatctgattgctaactactgaaaataaggaagaactagaattttcagtgacacagtgctcagcaagaagctagaaaagaggccttgacatatttgactccaaagctacttggttatgcatgaagccatctggggaggggaaggaggagggagaactcctctgaggaccctgaaacaattgggccacgtgtgactttcagtttctatggagattcatgtgcagtggctgagggcaatctgagagcattggaaacccagaagctttaataccaggctcttctctccgctcttagaaagttctcacaagatgtctttaggattatattggttatttgaatctcaaggagaagctcctctcactgccctacctccctgaactgaaaacaaactgtagtctgttagctcaccctagaagaaggaaattctagagtcaagagaagttaagttttagacaagctggaagttggaatatactggagtttaagatcattgactcaatgaaaaaaaaaaaagatttgtctgcagtaaaaccagagttttaaaaatgattagaaatggaccagaaaagagataaggataatgagaaagggggctctcyaaaactatttggaactgaaattgggacaatgtttctggaaactattttggcagtatgtatcaaaatgcaaaatgcacatacttttttgactctggaaatgatgcttgtatagagatcctaataacatgggaaaataattaggaataatgttaaataagaacattagatctttttttggaaaaaggtaccttgaacggatggatggatggatagatacatacatacatgcatacayacatacatagatgttacgaaaaataggtaaattaactgaatgtgcaatatgatctcaaatattataagaaacacacacagaaaaaaatggaaggaatatgccgatatattaatgcctctggatgagtttatgaatgattttttcttttttatatccctgtacttgacatattttctacaataagcatgttttattttactatattttgttttattttgagatgggggtctccctatgtttctcaggctgaccttgaactcttgggctcaagcaatcctccaatatcagcctcctgagtagctgggactacaggtgcaccccactgcacccagctgcgtgtgttattttgatatcgatggaaaaaataaataaaatgtttaagccaaggaaaacaaaaactaggttgaaaaagaaggccaaaagggcacacaagtccagagtgaaagacagacaccccagcagtcaccctcagagcagagggagaatattgaaagtattaccactgatctgatctggcactgactataaacttgcagattggctctctggctctccttccatcatcagttggccagaatayattgtcgctaatgcaagacaaaaagagatgatgaatcacagagamctagaagtttccaaaaccacagaagaaaaatgtaaaatgctaaaaacataaggccaggcgcggtggctcaagcctgtaatcccagcattttgggaggccgaggcaggtgtcatggtgtgcggctgtagtccaagctactcaggaggctgaggcaagagaattgcttgaaactgggaggtagcgattgcagtgagccaagattgcgctactgtaccgaagcctggatgacagagcgagactctgtctcaaaaataaataaataaataaataaataaataaaacatgaactgctgtggaagaaccagagagccctaaggcctcctgtaaatgactacagcaggagagtttccctggtcagcaygcagctttcgaaaattgagtttggcttgatgccttcatcacaaatttggtcccctgtagccttgactatgaagcttatcataaaataattrggtttcactggggcccgaacaaaagcatcttgggaatttaacaagattaaaggttgctttgttgctgtgggtatgatttttttttcttttttctttttttttttttttgagacggagtctgactctgtcacccaggctggagtgcagtggcacgatctcggctcactgcaacctccgcctcctgggttcaagcaattctcctgcctcagcctcctgagtaactgggattacaggtgcgcgccaccacgccaggctaatttttgtatttttagtagagacagggtttctccatgttggtcaggctggctgctctcaaactcctgaccttgccatccagccgcctcagcctcccaaagtgctgggattacaggcatgagctaccacacgtggccatatgtaaattttaaacatgtaaaccaatactgtatatcttttatagatatttacatctgtaatgataatatgaaaacgtacctaggaatgataaacaccaaattcaagatattggtaatctctaaggagggagaagactaagattttggagtacataaaggggtcttgattatatagatagtatttcagttcttaacacgttctcttctggtcccaaggccaaggaattctcaattgaaatctcagttagaacgtgaaggatgcttcttgggactgggaagagattttccgtaggccaaatttaacctcccactagagatagttgataattctaccacatttcatagtgaagcatcaggaagacaggactgaaaaggcaagaaggaatgatgcaaattgcatagtccaaaagataagctggacctaggtttgccagtttgtctaagtaactgagaattcattctgagatcaaaaaatcaaaataatgttcacagcagcattgtttatcactgaaagcaaacaacctaaatgtccatcaacaggagaatgaataaatatattggaatgtattcatcatatagaatattttatgcatataaaaatgaattaaaacatatgaagtagaactagccagataaataaatcctaacatattatattgaggggaaaaaagcaagttgctggagaatgtgtaccatatatatatatataaattttctttttttttttttttttttttcgcgaccgagtttcactcttgttgcccaggctggagtgcaatggcaagatctcggctcactgcaacctctgcctcccgggttcaagggattctcccgcctcagcctcctgagtagctgggagagtagcgttggcccagctagtttttgtatttttagtagagacagggtttctccatgttggtcaggctggctgctctcaaactcctgaccttgtcatccacccgcctcagcctcccaaagtgctgggattacaggcctgagttaccgcacctggccatatgtaaattttaaacatgtaaaccaatactatatatcttttatagatacttacatctgtaataataatatgaaaacatacctaggaatgataaacaccaaactcaagatattggtaatctctatggagggagaagactaagattttggagtacataaaggggtcttgattatatagattgtatctcacttcttaacacgtgaggcaatatggcacaattttaggattttgtagagctaagcggtgagtccaagattgtaatgttatagtccctgtactttctatttgaaatatttcataatataaaacaaagtatatttgaggccaggtgcagcagctcatgcctgtaatccccacactttggaaggctgagacaagaagatcacttgcatccaggagtttgagactagcctaggcaacaaagtgagacccgtgtctctacaaaaaaattaaaaattagctgggtgtggtagtgcacacctgtagtcccagctacttgagaggctgaggcaggaggatcgcttgagcccaggaggtggaggctgcagtgagtggtgatcttgctactgcactccatcctgggtgacagagtgagaccctgtctcaaaaaaatagaaggtatatttgatcaaagttttatattcacagtaagcartaagaaccctagggacagagaagggtggatgttccacctaaacactgtgctttcattccatcaacaatgaaacatccaggaaaggaaacaacaagtgactctagaaattcactagttagacagaatctccttgggaatgatttaaagagggaaaatgtaagaaaacctggcaagactaagaagagtcctcaagtgcaaaaaaagtatagttgacagttaccagagacagatcatccttaccagcctggaggaatattgcagaggaaagagctyaggatcttgaatactctcttatctcctgtatttaccaccatttcctctcttgctgaacattcctagaaaatggagaggagtttgtcacaactgctctttgatgatagccatggagaatgacaggggccccaaggcagatggcatcaacctcatcaaagaccaaaaaacaaataaacraacaaaaatccctccggtaggcagtgaaacaccacaaaaaaagcaagggctatagatgatataccaagagctacagatggatgaggttggacaagtcacataacctctgtgtcagtttcctcatctgtttgttgtgaggaataaatgaaataatgcctgtaaaatgcctgtcaggtagaagtcactgaaaggaacagaagttccattccatccccctaaggaaagacagggaatggccagaatcttcctagccaattgagtagtgctttcaaggagaaatcaagagaaaacactacttcttggatattttggctaagtagtcatttgaagtacagttgactggttattttattttaaatcrtatctcatagactcttcccaatcataggctggctgtgtagttttctgaattttgctctggtattcttcttcttttttttttttatttttattttttattttttttttgagactccaggctggagtgcagtgtcacgatcttggctcactgcaacctccgcctcccgagttcaagcgattctcctgcctcagcctcctgagttgctgggactacaggcgcctgtcaccacgcccggctaattttttgtattttaatagagacgggatttcaccatgttggccaggctggtctctaactcctgacctcaagtgatccgccagcctcagcctcccaaagtgctgggattacgggcatgagccactgcgcctggacttattattcttaatagtattttatcttatgagcgaagataagagcccaagatggtttagtttwctgattctgcaagtgctatttctattaattccttggcatwctgcagtttgtatgatggctgcactcttgttaataagcttcgtctttctgaattctgttgctccatagggagctgggaggctgcaaaaggtggccctgtaaaaatctttgcatttataatttaataaaggggacattgtaacactggaactccatattttaaatgaagagctctgtgtctattttttctcctcccccatttctttctttctataaacaacagtggtgtgtgtgtgtgtgtgtgtgtgtgtgtgtgtgtctgtatgtttgagacattcaagtcacttccatttccacccttcaccctgagtggagctcagggttagccatcattgtgcatattttgtggtcaaaccgactctgtaggctactgaaattgttttaaaaaaattggggcctttactggccaggcacggtggctcatacctgtaattccagcactttgggaggccaaggtaggcaggtcacctgaggtcaggagttcaagaccagcctggccaacatggggaaaccccacctctactaaaaatacaaaaattagccaggtgtggtggcacacgcctgtaatcccggctacttgggaggccgaggcaggagaattgcttgaacccaggagatggaggttgcagtgagccaagatcgtgccactgcactccagcctgggcaacaaagcaagattccgtctcaaaaaaaaaaaaaaaaaatggggcctttcacaataagtacccacagaagctttaccctctaactactttttaactcagagctgtgtgttacacaccaaccttctggaggactcaaaaatggatccctttcctttcacattattgagtgatggaccagtggcacctaaggaagagctaccacattttcaggctgtgtgagtctggactggatcataagaaacaggagaaaagcagtcaaagaaggtggtaccaaatcatggcaattctggtagacctctagctcaatgatctagaggtggaggccatttcaccttttgctcagaggggcgatggctagtgagagacttgcttacttcctcatagtcagagcagcactaaaccctgcccaaacacagatacttgagagagaggaagacttcctctygtacaaactggatttgttctaaaacagaraaagagtagaggcagcttccagaaggacctgtcttataggaagtaagagcaggggacaagaatgaaacagatggtgggtctaagcagggaatgtatccaccaagagcctgcaacaaaactaaagataaaatgttgcctgcgatttattcggctaagagaagtacaccagacatggtttgttgggatgcttctgaccccatttactggtcacrgtactcaatttatttwgggttttattttttatcctgtaatttgagtctttgattgtgaagaggtacttaattataatttgccacaagaataattgtggtatgattacagggctctcaatgagttggtagttcctgagaatagagtagtattatttggttaccactactcctgagtaaatgcataattgtaatgttaaaatgaacctctttgagtttagagctaaaactgagtgttgggaagggctgattgtaaactcatcaatttgtcactccagtgagagaccatttaaaccagggagtcagggtgtgtggcagggtggagggaaaggtttgcactcttgcccaatttttctcaaaatctaatttacaaaatattgaattamtccacctccagaagatagtggcatacacatggtagataagtggcaaagcgatcttccagaacacccctkgtgttcctttgacgtattttcgtctccccagcatgagaatagaacctcctacaccacaggaaagagcaaaataacagtgtggatagcccccaggctttgataaaattcactcccttgctttcctagtgtgagcaawaatctgcttaaaaagtagaaaaaaactgctggctttattcattctgcttccacggtgccaccaaaagcataaggagtttacttaaaaaatagacacattcccacccccacccccccaccagaggaaaaatccctaccactaattaaacttgaatggagggctggtggttttttygttacttacttagtgtttttttgttgttgtttttgattttgttttttgagacggagtttcgctcttgttgccccgactggagtataatggcacaatctcggctcactgcaacctccgcctcctgggttcaagcgattctcctgcctcagcctcccgagtagctgggattacaggcatccaccactacgcccggctatttttgtatttttagtagagacggggttttgccatgttggccaggttggtcttgaactgttgacctcaggtgatccgccagcctcggcctcccaaagtgctgggattacagatgtgagccaccgcgccggcctagtgttctatttttatgacagcatttgttttcactttatctttccaatgaaagttcggaattagtaataatattacacygtgcataaactgtaagtgaataactgatatgaagtgttgcttggtgtgaataaaaaagccagtggtgactttgggaactttatttgtctttctgtgtttcagttacctaaattgaayccttctggagtattgtaggtttggggaggctaaataagttgtgtttcataaatgaacagaggtggcatctatatcagtaagacagttgcatcacttttgcatgatgctgtctaaaagaactaatttaagctaaatggggaaaaggtcagaaaacaacaactaccccccccccaccaaaacccaccaaaaaaaattatgttttcaactttagaacaaatcttctatcctttgtagctcagtcagtgggtgtgggcaaaatcagttgggcagcagttagtgtgtgtccagaactgcaggtgcagcctccatatccttattagttcccttggttacagaccccagtgggacaatgtttgaaaaattrtattcaccgtctaggaaattgggaactgaaagtccaatatctgcctcagtggagttctggcacctgcattatcccttctgggtatatcaagatcaacagctgcacagatacttttgcttttcacagattctacacatatcatataaaggtgaatagtgtaaagctacctctacaccttaccaagcacacaggtgcgtgccatttaacatctagagcattccattgccttatacaagaactcagtttatatgagctcacaacatcgaaccaatcyccccccaattcagtgtgcatccattatacctgaaamctgacagagctgggggctgtgggaggaggttggtaggaagaaattattttgtgagctgtgcacatttttgttccatttgaaactaggtagctaggctgagggggaaccaagagggatgaggattaatgtcctggstcctcaggaactttcattatcaacagcacacaggtgaactccagaaagaagaagctaykgccgcagtgattctggagagcatctttcygargygatccyaacagaaaaagdaaacatmacctctaaactycaagaagyncctgtttctctygmccgtgcacaaactctcctactatgagtatgactttgaacgtggggtaagtttctcgactatgaaaactgagtttcaagatatcaaggacttggccttagatctttcttggggaagaggtaaattttcgttggtaggaggaggggagtagaatggacctaagttctttcaaattcagcaaaatatttcctagcctataactagctaaagccggaaagtcaaaggtcctaagaagccacaaggaaaatattaccatggaatcttggaattgatgagcactcattaaatgattgttgaaaatgaaatcgaagagttggaaattgcttccttacttcctatgaggaaggtacatacagtcattcactcttccatggtatttgccctccatttggtagtcatagatttatagatctggaaggatttttttttcttcccccacatgacaggtcctggtgccacctcactttgttgaatgattagataacaaaatctaatcatctggttgcttaatccctcttaatctttctccattttcttcctcattctacttctcagagaagaggcagtaagaagggttcaatagatgttgagaagawcacttgtkwtgaaacagtggttcctgaaaaaaatcctcctccagaaagayagattccggtaagaagagaccaatgtctgagatggggaacagcagatttgaagaaatttgcaacatttaaattctctgtaaatagactggtgatgctgtgcaacgtggaacacggtcaagtttcctttaaaaattcttcactctaccatattggttataaagaatcttwgcttctttycttcatattcagaacatctcactaaacatggaaaatttgttaacacaaacttttaaatgatgctatatctagttttcaaactggtcagagatcattgattttattccctcagttctctcaggatcagatttagaggcttaagtaagtctgaatgtcataatcctagggctctgagtcacatgatatcctttaataccttactatttattctcttctcactttccggagcgagagacrtaaaacctactgatttttgagttcacttttaaaaaatatatatcaatttcagtattttctttttttcttttttttttctttttttagacagagtctcgctctgttgcccaggctggaatgcactggtgccatcttggctcactgcaaccttcacctcccgggttcaagcaattctcatgcctcagcctcccaagtagctgggattacaggtgtgcaccaccatgcctggctaatttttcgtatttttttagtagagacggggtttcaccatgttggccaggctggtcttgaactcctggcctcaagtgatccgcctgtctcggcctcccaaagtgcaaagattacaggcgtgagccacccactgggtctgaccattttcagtattttcttgatcacaggagaattgcgtatttattacagaaactctggaatatataaaaaatacaaaaagattaaaatgatgcataatcctgttacccagttaaaacaactatcaacatattggtgtacatagacttacagatgtttttcttcactgagaacacatacgcatacacttatatatatgtcatatatttaaaacatagactcatagtacacatcttgctttgtaacgtactttttcaatgtaacgatatgtgggaaacttttccccatgacaatagatattctttaataacatgattttaatgactgtatggtattccctattatggatgtattgtaatttgtttaatctcccattattacacattcggtttgtctacaagtacttgatagtataaaccatgttgagaggaacaatcttgcatacatctttctgtactttttttattcttttccttatgataatttcctagaagtaaaattttgttcttctctttaagaaaatctgtgcactttggttatttttatctttttatttcattttctagaagtggaattgaatttcatacacacctacaagctatgtatgagagtgcctgtttctgtacattttttccaacactagatattttgttatttttattattattattattttctgagatggagtctcgctgtgtcgcccaggctggagtgcagtggtgcgatctccgctcactgtaacctctgcctccggttcaagtgattctcctgccccagcctcctgagtagctgggactacaggcgcccaccaccacaccctgctaatttttgtatttttagtagagatggggtttcaccagattggtcaggctgatctcaaactcctgacctcaagtgatcctcccacctcggcctcccaaagtgctgggattacaggcgtgagccactgtgcccagcccaacactagatattttaaatattagttaatttgacagccaagaaaaatagcatttcaggtggggcgtggtggctcacgcctgtaatcccagcactttgggaggccaaggcaggcggatcatgagcaggagttcgagaccagcctgaccaacatggtgaaaccccgtctctactaaaaatacaaaaattagctgggcatggtggcgcgagcctgtaatcccagctactcgggaggctgaggcaggagactcccttgaacccaggaggcggaggttgcagtgagccgagatcgcaccactgcacatccaggctggacgacagagcaagactccgtctcaaaaaaaaaaaatagcattttattgctaacttattttgcaatttcttttactcataaagttggtctactgctcatttatattttatttgtgaattgcccattaatttttggtccattttttacattgagatgtttacctcatttctaatacttttaaagagatcttgatataagaacatttatcctttaactgtaaagtatgttgaaaatgtttttcagtttatcctttatctttcaattttgtttatgatgctttttgccatatagggatttaaagtctatgtcatcaaattagttcaggtttttcttaatagttctaagtttcatccttatattagaaaaagcttgcctcccacaggattatataaataattgcttatatttactctcagtcattcatagttttattttttatattaagctcttgaatccatctggaattttctttggtgtatggtgtagcatagctacctaactcctctcctccccacaacgttagtggttaaatatttgtcccaacaacaattttttagaaacctccattttcccagtgatttgaaatacctgagtctctcttgactgggtatgtrttgggtcgtattggatatgtgtccctattggcctatagaaagtaatcactaagaatcagccttgtctgtgcaggagaaacttctgaagccacagcaaaaggcttctagtacctaaggaaattcagaaaagagcaatgcatcaaccaataaccattttttcttatttcattacagagaagaggtgaagagtccagtgaaatggagcaaatttcaatcattgaaaggktcccttatcccttccaggtgagttattttctctcaccaaatctcgaaaggcccctgtaacacaattagaaggggtggtggggtgcagggcagagggaaggctacgaggacccagtgaatagaagttgaggtggacaaggatgctgaaccaagaaatgagactggcatgggctaagaatgtttgcttttctatttacctaatctaacatagtttcttttagtctctatacctcaaaaagaatacatagcagcaccaattctatcatagtgtgtcttgtctatgataactgcattgagaaagatgctctgcttgttgagtgagcatttcwcttccttctggttctgactatctgtctaatagtggtcatgtgggttgaaaagatagaaaaggggagtagtattaggaagttcagtatgaggaagacttattagacttatgcataaacctaaattctgttgtaatctggaagagctgaagtgccacatatgcatctgtttaggagagcaagaactacaaatttggtcttcagtttggcttgcttacatcctgagaactctgtaggccacatgtcgtgaatatagcagcctctgcaacagtgaaagccagaaaaggaagtggaaagtctcaggggagggggctttctgtcatggatttatgagcacagcaagactaacaagcaaaaagaaaaatgtaaaaggatcttgttcgtgtccctgactatatcaaatttacgaaacctttgaaagaggggtatttcagacacagtttttactaccaatgcctttcaacaagatgacattgtttggctgcactagtgaacaatgctgaacagcagataattttaaattaatttatatttgacttcagaatttattatgtgatgtctataaactctgtgagggttggaaccacatcttatatatttcatgcatcttcgtaacacctagcatgatgccttgtacatggttaaaaaaatactatttgacttgatgatattgcttattatataccttaccctttttgaagtaggtttgtagttccaaatttgatttattttggctaatattggtgaggggaggccactaggtagtggaggtggaggtaattagccatgaattaaaattttactccatattatccaagtgaataacccatatgtactaatcaagacttaatttatatagattatcacttcatttctcttctatacaaagtcagaatttaataataagataaaataccctttgttggataaacaaaaatgttatctccagcaagggcagacggagaccttataaaataagtttatgcatgaattgaagcacaagtcaggaggaccwaagartatgaaaaattctaagagcttttaaacgctacattcctagatatgaagagttcaggaatccttcagatagttcacataacctgaacaccattgctgactgargattctgcctttctttgttttctacaataaatatacaaattgtcccctaagattagtactttcaaggtctttctccttttttctgaatcctaactgctgaagtctgtgttttcatcgacccaggttgtatatgatgaagggcctckctacgtcttctccccaactgaagaactaaggaagcggtggattcaccagctcaaaaacggtgagaattatttggaaaataaatgtttccaaagaaagaaggaaaggaaggaagaggagatagacgggaggaaaaggaaagaaggaagagagaaacgagaaagaaagagaaaggagaaacgtagagagaaaagaagaaaaaaatggatagaaggggagaaaagaaagagagagggaggggaggagggagacaggaaggaaggaagcaaggaaagaaggaaggggatgagggaggaaagaaagacaaataamaaagaaacaaaggaaagtttgtattttgtttcaatattagtaatacaattgagcttagtattccatcatatgaataaaagataaaatattagactaagagtttcccagttctatcactatctctctagtgcaattttgtaattttaggcacctccatttctctatttattaagaaaagtcccattttttgcactgaatacaagggtggtgtggcattcaatggttatgcaatatttagaatcctaagtataaaatacctagctccaaaaaattaaatagatgatgtatgagagtgcttgaagtcagagtcagagaacctggtttcaagccctcttttaccatttacaaactgggtgatttctggcaagaaggccaacaagcttctttgatgctcagtttcttcttctcaaaggagaataatggtaattcatgccacatctacctctggggttgttgtaaggatcaaatgaagtaataatacatgtaaaagcacatggaaaactgtaaatcactgtataygaaagcactgtacatctctttgttgtggataaatatttcccaaggaaatatttcatattccttgctttgtgaggacctaaacttgaacagtttcagcatttcacatcaaccatacagtgtgttcagataaacttgactgtaaatgcttgcagcacaggatgcatgcacacatatttgtgtgtatatatagccacatgtyaagtgactgagagattaactggttgagttgacatcaggaaaggctgcctagagaaacaggaaggatggcagactgataatggtatggttgggttattgcatgacagccctttgtcttaataaacatttagattctgatactcactggctggctataccagccttgtacactcccttgaatgcaagtttggttkgtcaaaattatattagccaagtctttcaaactgaaagggaacaggaggaacgaagatgaaggatcatctattcaattattgctatgtgccagatattgagctaaataccttttatatattatctcatttaattttcacaacaaccttggcctaaaaacaacaacaatgataactaacacttaatgagcacttactatgtagcaggctctgtcccaagtgcttcaaatgtattacttatttgatctttgcagtagccttaagaagtatgtattattcccctatttacagatgaggaaactgaagctcaaagatgttatgcaacttgctcatgggcacacagtgaatggtggagcctggattcttatcacatccctgtgtctgtatgactccaaagcccaagctcattgcatagttttgcgctgcttggtttccaagtccagaaatttcacatgtagttggttgcaaaatattctatagtaaagctatgttgaatattacaaataggtgatatcctgcaatacacagttcagttcttggcatattttaagataaggggtctgctttagcyctggggctacaaaatgagcaaactctttaatactgcttattgtgatacaggctcttctttaagttctttacatatattaactttgtattaaccatatgaggcagttatcttgtcatccccattttacagataagaaagctgaggtacagagaggttaagtaacttgcccaaaggccctcggttrgtaaatggcagggtcaggctttgaattcaggccccagactccatgtcctgaaccaatatactatctccagccacagaaatatttgcagagactgggataagagctctgcaggacatgtatacttgtacttctttagttctctccacaatgcctcatacagcgccttgcacacagaaagsgatcagtagttgtgttaactgatttatctgtgggaataaacaaccatcaccagcttgggctccacatcgataaatggctaggttttagtctggaaatgggggaatgcaaggcagactagctgaaggagaaataagggagaaactggcatgctcaagttggtaacttctttacacttcatatactaatttcaaaaccagtcatagtttagtccaacaaatatttatttatttatttatttatttatttatttatttatttatttattttgagatggagtttcgctcttgtcacccaggctggagtgcaatggcaygatctcggctcactgcaacctccgcctcccgagttcaagcgattctcctacctcagcctcccgagtagttgggatgacaggcgcctgccaccatgcccagctaatttttgtatttttagtagcgacagggtttcaccatgttggccaggctcgtctcaaactcctgacctcaggtgatccacccgcctctgcctcccaaactgctgggattaaagcatgagccaccacacctggcccaacaaatatttattgaatgtccactatatttaagggtgagtaatgaccgaagataaggatatccagcttgtgagcttgtgagctttctttttttcttttttttttttcttgatatggagtctcactctgttgcccaggctggagtagagtgacgtgatgttggctcactgcaaccgccgcctcctaggttcaagcaattctcctccctcagcctcccgagtagctgggactacaggcgtgcaccatcatgcccggctaatttttgtatctttggtagagacagggtttcatcatgttggccaggctggtcttgaactcctgacctcaggtgatccacctgcctcggcctcccaatgtgctgagattacaggcgtaagccactatgcccagccgagcttggtttcctaactcagatgttaaccttacaatcttgattatgtgctgcttttaaggttcattagctaagtaaattcacaacaggctaaaaataaagccaaaataaataaacagaaacaccatcacttcagctgggtcatcagtgtgatcagggagtgtggctaggcacatctttgccttctcttcccttatgtttcaccaaaggcattttttttcccagtagttccacctgggtatagtcttgttgaaccgtcctgggctaacaacaagagccaaaaagtaggcaccttctgacaaataccatgattgctgggagatttaggtgcaagtcctaacaatcccaggacagtcccaggtgctgccaatgtcaatagtgagttagcctaggagccacaaaataatgatattattccactctttttgtttttttcttgtttgtttttatgtttttattatcctactcttgggtaaaatgcaccaataagaaatcaytgacatgaaaaggggacctcatgagaatactggttacctttgcagggatattgactgaagaggcatgaggtgctggatctcaaggaggttaaatgggtgtggaaaaatatggtttgctgtacacattaaatctgtgcactttattatatgtaaattatacctcaattttatttatttatttttttttattttgagagagagagtcttgctctatcgtgcaggctggagtgcagtggcacaatctcggctcactgcaaactctgcctcctgcgttcaagcgattctcctgcctcagcctcccaagtagctgggattacaggcgctcaccaccacgcccagctaatttttgtatttttggtagagacgggatttcaccatgttagccaggctggtctcaaatgcctgacctcaagtgatctgcccacctcagcctcccaaggcgtgagccactgcaccaggcctatacctcaattttaaaagcatagcctcagatacctcatatccagctgccacattttctcaatggtgcttgccatgcaaaggttgtattcctgtgggcttagccacagactctctctttccatttccttaaatatggcagtgggcccttctatgttccagcaccacaaatatttgcctatacttattcttgaatctttggtcaagctcaatagaacctatcctaattgcaaattcaaaagtaggcaaatgacctgacctcaccaaaatgaataagagaatagcattggcaaatctcctacaaacagtatggaaaggaatgattcatgtatgcctgaaacagaattttagacattaacctcataaatatggatagaaaagaccagcccatcaagtgcttggagaatatgtactaaccattagtgcttcccaataggggaatgtgcattggtgaagcaagcagtctcccccagccctcccacttgtacaccctgcttttgcaatcctgtcctaagtagctggaaataccagctttggattagccaacaaaagaaggggtgtcatcttcaagggacctcttaagaggcagacattatttgagaatgtagggaggtttcttaatgagtgtgctaggggtggggaagacaagaagccttatttcccctcattatcgtattagcaagcttagtttattagagtggctaattgtcgattaggtattctttggcatgtctactggtgcccagycctgcagaagacagagcaaacttgaggatcttcaaatccctaggtgacagggagtggcatgcggggaggggccagagtgtggatgtggtaggagtaatcaatcctggcagggaggagtatcaatgacattgttcacaactctaccagtgcttagtaataacaaaaggcagacagactttgggtcggttttattattgttttaaaattccctctaggggctgggcgtggtggctcatgcctgtaatcccaacactttgaggggcgatggggggcgggtgaatcacgargtcagaagttcgagaccatcctggccaatatggtgaaaccatgtctctgctaaaaacacaaaaattagccgggcttggtggtgcgtgcctgtagtcccagctactcgggaggctgaggcagaagaatcgcttgaacccaggaggtggaggttacagtgagccgaggtggcaccactgcactctagcctgggcaacagagcgagacactgtctcaaaaaaaaaaaattccctctatgcaatgcagtcccttatagcctgcactctatctgaacagctcccaccattctgtccttggtacactggtgaagaggagtgctgaaaaagtcagggtgagggtgggtaggggagaatggtttgaagttttcaaatctatgtggagaaaagtaccaaaatggctcttaaaaaaaaaaaaagaacttttgttcatttgcctgcaaaatgcaccagctactagcagcttttaggctttcctgcaaagccttaagtgagtgaagtgtgactagcaagcccttaaggatttgagttgtttctttttcttttttcttttctttttttttttttttgagttggagtttcgttcctgttggccaggctggagcacaatggcgccatcccagttcactgggacctccacctcctgggttcaagtgattctcctgtctcagcctcccgagtagcagggattataggtgcatgccaccatgcccagctaatttttgtatttttagtagagacggggtttcatcatattggtcaggctggtcttgaactcctcacctcaggtgatctacccgcctctgcctcccaaagtgctgggattacaggtgcgagccaccacacccagccggattttagttgttttctacagtggaaggttttgttttgtttttgtcttttttaaaaaaagttatgccagccactggacctggtggtgagtgcttgtagtcccaggtatttgggaagctgaggtgggaggactgcttgagtccaggaattcaaggcctgcctgggaaacacaggaagaccccatctccaataataataataataataataataataataataataataataataataatgtgcgggattcttcttagctgtaaatgctgaaatgtatatgttctcaaatgtgcgtgttcctggaccagcctgggtctttgctctagtgtttgctgctatcagttatttcaattgtctttgcttctctcagttatctgacactatgaaccctggatgacttttctttttttttttttttgttgagacagagtctcacactgtcacccaggctggagtgcagtggcgcgatctcggctcactgcaacctccgccagccaggttcaagcgattctcttgcctcagcctcccgagtagctgggattacaggcacgctgtaatttttgtacttttagtggagacggggtttcaccatcttggccaggctggtcttgaactcctgacctcatgctccacccacctcggcctcccaaagtgctgggattacaggcgtgagccaccgcgtctggccaacttttctaattgacttcatgtgaaggtttttgatatgccatagtattataaacaccaatactaattcctcctctctgcatccactctattctttgcaaaatacttttactctgggagatcttttgggcctcacaactccatgaggraatgaagctgctgtgttacctctggcaatgagctcagtctacctcagtggccctaggaagattcaaatcatgttgattctagaggcaaagtcaccttcatttgcccttgagatcagctctgttgactattctatacagaaagcctcatgcagaagttctcactaaggctaattatccctaaaagatcactcaaggaactgagaaatcagtattaaaagctggggagattggcctgggcacactgtttcccttatctgggaaacacttgccttacaggaacattgtaatggctactgggaaaacatagataacatatttctgttgttgggctctcaagccatcagatagtcttatcttgttgattgggagatactcctcatcacagaccactaaagaaaactgcacaggaactgtctgggaccagggcacagtcaggcaggccagtcatgtgagccaactggtcctgtgatctgctctccttcagggtggccaaggagggggcagttgcttgaagttcaccactaagctcaaagaggaaaacatgcaaatggtggcttctcctccatgtcagatgtgatctctctcttctttcctgctacagtaatccggtacaacagtgatctggttcagaaatatcacccttgmttctgratcgatgggcagtatctctscbgctctcagacagccaaaaatgctatgggctgccaaattttggagaacaggaatggaagtaagcaatctgatcgatataatttctttctcctttgactgtttccatcactctcccaagggtctgtcaagcccagggtcatagcataaggttgtacactttgggtgctaaacaaagggtcctgggggagggaggaggcacatgggggctgaaatccagctggtaatctgctctccragctatgtgacctggcatgcctagctactttttctaacttgcctaaaggcactcaatatggacggcaaagtccctgaccaaacctgtccttggcccctttcctaaagtgcattccatatcatcactggcttcttgttttgcaggcttaaaacctgggagttctcaccggaagacaaaaaagcctcttcccccaacgcctgaggaggacyaggtatacagggaaactgggtgctgccactgcttaaatggaaacttatagtcaagccctaagaacacactagagtcttagaattaccctgggacttggcagtgttaattggtattcttgctaagatgggggatttgttcttctaattaggatttcctcctcgatggaaagataraaggctctcagcaaccatgtaatccaatcacctgtttagaacaaaacctgatttttttaatgtaaagtttttgttgttgttttgtttttgcttttgtttttgttttgagacggagtctcgctctgtcgcccaggttcgagtgtaatggcatgatctcggctcactgcaacctccgcctcccagattcaagtgattctcctgtctcagcctcctgagtagctgggattacaggcatgcaccaccacgcccagctaatttttgtatttttagtagagatgggggtgtcaccatgttgttcaggctggtctcgaacccgcctcggcctcctaaagtgctgggattacaggcgtgagccaccgtgcccagctggaaagtattttcaaacatacagtaaagttagaagaatttaacacttaataccaacatactcaacacttagcactaacaccacctatcactaacacttcagaagttttttttttttttttggttccttcttgagggctagaaagccctttctcacatattgtaagtaagtagagcaggtattattatactcattttacaaagaaggaaaccaaggttctgagccacttagtagattcacgtacaagtttagtgccaagccggtttcctgaccttagctataaatggtttttgtctagtgagctttaaaaatagtaatgtttgggtcccattcctgagagtttgattttgatgtaattggtctgtgaggaaactgactaggtattggaattggttttttgttttttgtgggtttttttttgagacagtctcactctgtcacccaggctggagtgcagtggcgtggtcttggctcactacaacctccgcctcctggggtcaagttattctcctgcctcagcctcctgagtagctggggctatatgcacacactaccatgcccagctgatttttgcatttttagtagagatggggtttcgtcacgttggccaggctggtctcgaactcctggcctcaactgatccgcccgccttggcctccgaaagtacattggaatttaaaagttccatacatggtctttatatgtgtgcaaggctgagaactcctgcactggtgcttaaaaatggttgttgaatgactgctgagtaatattttagtatgcctgatttgggtgtcttgagtaagccagagagttgggagagaagagaagagtgcttggtatcttgacaaaccctcctaccttttctcctaactacatagatcttgaaaaagccactaccgcctgagccagcagcagcaccagtctccacaagtgagctgaaaaaggttgtggccctttakgattacatgccaatgaatgcaaatgatctayagctgcggaagggtgatkaatattttatctwggaggaaagcaacttaccatggtrragagcaygagataaaaatgggtgagtccacaccagcccttcctgagcctggtgcctgcccactccctacacrcaaaaagtgctgcggcataattcccrtgatcagcatcctcatcagagactgttcttcccacaccagactgaacatgctctccctccaagtacttcccagcgtgcagctccctatacatggcctctgccacatctctgagcctctgttgttgggcacatataaccaatgcaacatgtgcataagctctgcacctcactggctcactgcctaaccatgcatcagagacatgattgtctttgagggaggtgcatgatacatatacctccatttgagatttgttctgagctcagggacgtgggcatatgaatctgtctcctggaggctggggaggtgctggatgaactgccacattgtttccttcacaggyaggaaggctacattcctagtaactatgtcactgaagcagaagactccatakaaatgtatgagtaagtatgtttatgtcagtccacaatcttccaggaggaactctctctctctmtatatatatatatttatttatttatatatattttatatatatttatatatatatataacacacacaagtgtatatatgtatacatatgtatacatacactggtgtatatataggtatattatgtatacatacacaagtgtgtatatatatatatacacttttttctactttcaacatattttttatttcaagatatatattaaaattagtaccatctgaatcaaatgatgccaccacctcaaattagtgtatctgtcttacctttaccccccaaacaccctccatttatgagagctggagaggtcaccatgccctcaaatccagaagaatcacactcaaagaaaaaggagttgacgacctgatgaaagaattaaaatgtcaaactgctactgttgycctttcctccctaatcatggaagtggattgttctcaagtgccctagtccctgatctcttccctgcaactccctgctgcttgcctttgcctgctactctccayttccatgaatcttcaatgccaacctgggtttgggaaagggatacagtgtgctatscamatgacagatgctcagtaaatagggtttgagtgagttgactgaatcactgacatggacaagccctggagggtgctgtaacctccaatctgcttatgaccaggagccactcaagcagcaytctcccttcacaggtrrtattccaaacacatgactcggagtcaggctgagcaactgcyaaagcaagaggtaagtgtggaaccactagcacacagcattctccttgcataagtgaggatcttgaactgagggcctgttctgccccctacctttgggcaaggcagtgtcaaagctgccatcgtctgggatcccaattacaccattttttttgtttttgtttttctgagacggactctcggtctgtcacccaggctggagtgcagtggcgtgatctgggctcactgcaacctccgccttctgggttcaagtaattctcctacctcagcctcccaagtagctgggattacaggcacatgccaccacgcccgactaatttttgtatttttagcagagacggggtttcaccatgttggccaggctggtctcgaactcctgacctcaggtgatccgcccacctcggcctcccaaaatgctgggattacaggcatgagccaccatgcccggcctgcaccttttaatattaaaagcaatgaggctgtagctcaagcgtggaacttggcagtaaaatcaggggttgttctattttctctctcaagtttgggcaggtgggatgcaggtgtgagcaccacttcctcctacagacagcttctttttcgttgtttcaggggaaagaarraggtttcattgtcagagactccagcaaagctggcaaatatacagtgtytgygtttgctaaatccacagggtgagtgctactattccaaggccctgaggacaaagaacaggggtaccctcctaatagctccttgatgctgtgcccgtcccacttcctctgtctctgaaactcaaaactcatctcacttcacttcctgggttctgttgacctttgtgcccaagttactgactaagcatccacttcttcagggaccctyaaggggtgatacgtcattatgttgtgtgttccacacctcagagcyagtattacctggctkagaagcaccttttcagcaccatccctgagctcattaactrmcakcagcmcwactctgcaggtgagtaccaggggcaactgagaagggagttacagacaccaggataagcaatgcaggacaaggtgataagaggaagaatctgcctcacaggacagtgtgaattcactgtgaaaggaaatccctgtgatactgggtagaagctggtaaagaggtggtcagaggcagacctacacccaacagggactgactctttatttggtgattgatgttcagtgttaagagaagacacaaaagaggctggtgactgattcatcagcaagtattcattgagttcctactgtgtactcagcgatttcctcagttctagaggagaacacgggaacattctgagtcgaggtccttgtcctcaaagaacatacaggttagacaacwtcagaagaaagtttataagcactgtaaaatttctaaaaactgagacattagtgagggcatggatatgggggaacagcttcatcaagaaggtaggatgtgagctaagcctgggctgggaggtgggaatatattcagttaggcagtgtatttcaattagtattttctcttttttgtccctgaaaagtattttgtgagaggagaaacctctggaaatatgtgggttcatggaggtcttctgggattcaaaatgtactagaaagatacacaccggaagtgtgaggctttaagtgaggatgtgtgaggcatcccacctcctacaccacaccaacagcatgacctctctctctgtttcaggaytcatrtccrggctcaamtatccagtgtctcaacaaaacaagaatgcaccttccactgcaggcctgggatacggtaactccttatttctctggggtagggtggactggccagttgcaaaaactacctttgctggccttgccttagggagtgtccttgaggtacactgttctgcagcagctgcctcaaggacgctcaagacagatccaagcaaaagttattcactgattttcttcctctagtggctacgactgggactgcaaaaacatagattcataaagggctttgtcgttgtcttgggtctttttgtcttttatttttaattgtgggaaaattttcagtactatccctgagttcattaactaccatcactaacataatcataaagggatttggggaggttgcttagtctatcttcttgccttatggccaccttgaacctaaaattcccagattcctctaaccaatgaatcccgtttctgagattgacttaagcaaagacagattagtacttctaaaaatttcccttttactagttttcctatttctaccccagtagggatttttgtctattgtaagaattatacattcatgaccccaaagaatcacaccaagactttattgttaggatcatgggaaattgatccaaaggacctgaccttcttgaaggagcyggggactggacaatttrgggtagtgaagyatgggaaatgragaggccagtamgacgtggccawcrrgatgatcaaagaaggctccatgtctgaagatgaattcattgaagamgccaaagtcatgatgtgagttatagcccaaactcaactctcaatctatttgctggagtctaggaattcacacaacaacccactgaggcttaaagatgacttacagtaagagaggtttgggacgagggactgaagtttacctttaactggcggtagtcctaagtgctaagataatagtttctgtgccttagatattggttgagaatagtggtgatcatgggtgtgtaccatctcagtagcatttgggggtagatgtagaaaattaaactttcaagagaaatattctaatttagccttagcgttctttcattcctggacttktttctttttcaattgatgggctccaaatccctgyttgcttccacattttaagcacttttgagatttagggtgggaaagaggaaaataaacttgctggtgtgaccccttatctgatgctctactcctaggtcagccccttcctccccagcccctttattgctattatgcagagccaaaaggrgaagactagttccttgcctttcctgtaggaatctttcccatgagaagctggtgcagttgtatggcgtctgmaccwagcagcgccccatcttcatcatcactgagkacakggccaatggctgcctcctgaactacctgagggagatgcgccaccgcttccagactcagyagctgctakagaygtkvaaggwtgtcydtgaagmcrtggaatacctggagtcaaagcagttccttcacyravrcctggtgggaccttagaaggattggcctaggacaaagggctgatggggtggaagtagcagtggaagatatatcatacatggttgaggggggctgctggtgccatcatttcaattttatctagaaagtactataagttaggcgtgcctctgccccagtgctgagcccatcaaatatctccagcctcagctccatgaagtctgccgtggtgggaatcagagcagtcactcactcccaaccccctaccacccacaagaaaatggtggggtctttcagtggccattctgsatttggaacagaagggactgtgcttcccaatgggactgctcctggcatggggccatcatttggttccttcagagtcacatactggggcctgtggatgcatttggcccacatgtgtgggttttttttatgttatataataattagcaaacccttaaaaagaaacatttcgcttaaaaaaaaaaaaaccctggaatttccagcttctcttgaaaatctacaccgtctggaaataccaggtccacattctcacgaaccgcctcctttcctctaggcatgtactctccatttcctgcaatctcgatccacttcacttcactcttacttaacttgcctggcccctgtaagcatcagagtttgcgcccctgtttctttcagtcaggccaaggctcaaattgtcctagtctcactggcagaaaagcagaaagcaaaaaaacttacttctcattctcccttctttgttttttgtttgttttgttttgttttgttttgttttgagatggagtctcgctctgttgcccaggctagagtgcaatggcaccatctcggctcactgcaaactccgcctcccagattcaagcaattctcctgcctcagcctcccaagtagctgggatcacaggcgcccaacaccacgcccagctaatttttgtatttttagtagatggggtatcgccatgttggccaggctggtcttgaactcttgacctcaggtgatccacccacctcggcctcccaaagtgttgggattacaggcgtgagccactgcacccagcctctcccttaattctttcagcatatcagtgagggaatggggtggtgtggaattgcccatgagaatgcaatcgttctgtatgtcctcagtgctttacctaggactacacagcaggttgctttccacgtggtggaaatgaatcaaaatttcttggtggcatcaacagattcctattaggtgggaaggtgtctgtagtcgaaggagatgaagcttccctggcttcattctactggtcagcagaagctttgtgcctttaacctctgtgctggggacggagtctcactggtctctgtttgcactacaggmagctbvaaaswgtttggtaaacgatcaaggagttgttaaagwatctgatttcggccygtccrrgtgagtgtggctttttcatctttccctccagaagtaaaaatagcacagtatgaaacatgggtaggtgttyyagttttaatcctctccttttcttttttttctcattctagcgttttctgccgatctttctwttctttttcttcctctgagttatttaagccacctctttcatccttttgttttattgtcatatccctttccttcctttctccctttatctctacctcctcttttttaaatctatttccccaataccttatcttgatctattaatcctgatgactttactccattcctccttctttcttaatcagtctaattcccagtgacaactgcagataaaaggaagggaaggagaagagcagagaaaggaaaggtggatagagaagaggaagggagtacctactagatcttatttcacttcatccttcttgtaaccatattgtcaatcaggaaagctcaatcagatacaaaaacaggaaattcgttaaaagtaacgtttgtagaagatactagttgaggaggagagacttttgagaaagcctgtgtgtgtttgtgacactcttgtgaccgtgccaagaaaacrtaagcaaatatcaagcctccaaatcctaatgcaacaagtcctgaatcccttgcagktatgtcctggatgatgaatacacaagctcagtaggctccaaatytccagtcysktdgtcccyaycsramgtcyygatgtatagcaagttcagcagcaaatmtgacattygggyttttggtaagtggataagattacacagattatacagctcaaaggataagaaatgcaatgggaaaattcacactttgcaacctccacagagatattgttcttgctttcattcttccaatccttggggagtgcttactgtgtgtcagccaccacaggggtttctgaggatgaaaactaaactggacatgatctctgcctttttagaacttaaaccatgttaaggaaaacaattcattcagttttcaacagcttctgaatactgattatgtaccaggcactctgccagaccctataactgcaaagacaaataagatgctgtctctcttctagaggagttaatagtctagtacgaccttgatctccatctagtgtggtcagtactatagcagaaatttgggcaaaatataaaaagcacagagcggggaaccaactgattctaatctttgaggttgatctaggaagactaggacccctgctatccaaaaagactgcaaaccaatttaataatttttttcaccttytagggkttttgmtgtrgrrwatttactccctggggaagatgccakvtgagwgatttactaacagtgagmctgmtgaacacattgccyaagrcctacsthtctacaggnytcatctgscttcagagaaggtatatrccatcahgtacagttrytgrcatkaggtaagtgctttattaggatctcttaaattatttccttgaatctacttgcccatttagctggccattcagccaccaaagactgatagctgcacacattcttttttttcctttttttttttttttaatttgagacaaggtctcgctctttcacccaggttggagtacagtggcgcgatcttggcttactgcaaccttcgcctcccagattcaagcgattctcatgtctcagcctcccaagtagctgggattataggcgtgcaccaccacaccaagctaatttttttttttttttttggtgacacagtcttgctctgtcacccaggctggagtgcagtggcacgattttggctcactgcaacctctgcctcctgggttcaagtgattctcctgccttagcctcccgagtagctgggactacaggcacatgccaccgtgcccagctaatttttgcatttttagtagagacagcatttcaccatgttggccaggcaggtcttgaactcctgacctcaggtgatccacccacctcggcctcccaaagtgctgggattacaggcgtgagccactgagcctggccaattttgtatttttagtagagatggcatttcgccatgttgaccaggctgatctcgaactcctggcctcaagtgatccgcccacctcggcctcccaaagtgctgggattagaggcatcaaccaccacgccaggccttgcacacattctctgaccttggcctgcaacttgatcatctgatggccagaggctttcccaggcccactccgattctcactagagtgtcattagtacactccaatgccagctcagctttagggagtgaggtgttgtggggccatgtcatctagcataagcaggcagccagaggcattcagacaagtgaatgggcattacaaaagaaaagtcatgaaagtttgttcattcctttgtgtgtcattggccctttcttctactttattagctgccaaccgtttctggctgaggtcctaaatgagatttttttttttttttttttgagaccgagtctttctctgtcgcccaggctggagtgcagtggcgtgatctcggctcaccgcaagccccgcctcctgggttcacagcattctcctgcctcagcctctcgagtagctgggactacaggggcccgccaccacgcccggctaattttttgtatttttagtagagacagggtttcaccgtgttagccaagatggtctcgatctcctgaccttgtgatccacccgcctctgcctcccaaagtgctgggattacaggcatgagccacagcgcccggctaaatgagattttttttaaaacctactgcttgaaagggaactaaaacaggtagtgggttttttgtttgctttgttttgttttgctttttaatatggtgcatcgtggggtatgtgggtaggtgtggtattttggaaataaggaaatctgtcctactactattaaactgctttgctcctcttacctcgagttcttcccaagatgccttctctacttttcagtagatccttggcaacctaaatttctagtaggaaataaatgctcaactcttcagagtgtccaacaagtgcatatgtgaatctggagccttcttggtgaggtgaaaagtgggtatctggatccgagcatggctggtttccctcgaacaaatgacagatcacagagaaagtgcagaaagggaggactccttctttcttctgtgtgatgcaggattaagggtgattggctatgctccctcccaatcaggaccttcttactctgctaattaaaaatgatttcagacaggtactttatccacagcctgtttaaaggagtggtcaaaattggatgcatatcagaaaccctaaggagctcttaaaaatgcagattactggctgggcatggtggctcatgcctgtaatcccagcagtttgggaggccaaggcaagcggatcacgtggtcaggagatctagaccattctggccaacatggtgaaaccctgtctctactaaaaatacaaaaattaaccaggcgtggtgatgtgtgcctgtaatctcagctactcaggaggctgaggcaggagaatgacttgaacccaggaggtggaggttgcagtgagccgagatcctgccactgcactctggcctgagtgacagagcgagactgtgtcacaaaaaaaaattcaggtaactgggacttttctccagaaattctgattagctatgcctgaagtggaacccagaaatctctttttaaacttcccaggaaattctgatactcagctaagtttaagaatcactgagtcaaggaatcaagaaattgatgaccattggttctaacagattgagagcattctggcatgaatgttccctgaaccactaaataccaaatacctcgggggcttatgggccatggccatcaaaaagaaccttagtcgtaggccgggcgcggtggctcacgcctgtaatcccagcactttgggaggctgaggcgggggaattaccttaggtcaggaattcgagactagtctgaccaacatggtgaaacccggtctatactaaaaatacgaaaattagctgggcgtgatggcgtgcacctgtaatcccagctacctgggaggctgaggcaggaaaatcgcttgaacctgggaggtggcagtgagctgagctcacaccactgcactccagcctggacaacagggtgagactctgtctcaaaaagaaaaaaaaaaaaaaaccttagtctttttgttaccagtggtaaaaaaaaaaaaaaaaaaaaaaaggtcccaggtactcagaatccctgctcagtaatacagcctgtggttttgaaatattaatcactaaaaattatcacatgggatttctgttctgccaaccacttgaacttgtttggtagccatttttcacttgaggatccaaaataagaatgtgttgtatacagttacataatgaacttgccctcaattttgatcagtgtgattgtcagtttaatttgcaaattgttcttatcacactaataacctgagttactaaagatgaaaagtgcacaaagactttatggagagctgctatttcttttttttttttttttccttttgtaatcgacagggcatgctactgggcatagagcatatatttaataaacatttgctgcttactcattgcatttcccttgaattctggattctagccactctaacactttactttttctttggttttagaaagcagatgagcgtcccactttcaaaattcttctgagcaatattcyagatgtcatggatgaagaatcctgagctcgccaataagcttcttggttctacttctcttctccacaagccccawtttcactttctcagaggaaatcccaagcttaggagccctggagcctttgtgctcccactcaatacamaaaggcccctctctacatctgggratgcacctcttctttgattccctgggatagtggcttctgagcaaaggccaaraaattattgtgcctgaaatttcccgagakaattaagacagactgaatttgcgatgaaaatattttttaggagggaggatgtaaatagccgcacaaaggggtccaacagctctttgagtaggcatttggtaragcttgggggtgtgtgtgtgggggtggaccgaatttggcaagaatgaaatggtgtcataaagatgggaggggagggtgttttgataaaataaaattactagaaagcttgaaagtctttggtatctctattaatcatgcagcctccctgaagcgccctatctcagtattccagaaagctgctgtgtagcattagtttggcatattcctacactgagaactcgacaggatcctccaggtttaagccctcttgttaactcctgcctctgaatcaaagatgcattaagcaaaaacagtgcctgtcacagcacgcatgcaatgttatttgaatgaatctgaaagttgggcacaaactgccatagcctcatttccctacgtcgggagaggaaaactccatcaaaaaacgaaagccaggggcccaggatagccaactaatcgacccagtcaactaactgacccagtgcacaactctggtagctcagaaaacgcgggctaatttggaagtggacaggggcggagctgtggggccagcacggaatggatcacgtggtctgaagtaacttccttttctcctttcttttctttttggagtaacatctcaacggcacctcggctctgggctgtaagccctgcgatctcaaggcgcaaggctgggcgcaacggcagggttgcggggttacgggattgcggggtccggggagtggaacccgccgactccgggaacgaagcaccggcgccaaggtgtgggaggcggcggggtggagttggacgcctgcctcgcgccgacgcagtgcactcacgggggcggtcccagaggcagctagctgtggttccggttccgtcgcggagacacgtgaaggtcggtgcggagttcgtctctgcaagcttggtcgccctgggatggattcctcctcctcttcctccgcggcgggtttgggtgcagtggacccgcagttgcagcatttcatcgaggtagagactcaaaagcagcgcttccagcagctggtgcaccagatgactgaactttgttgggtgaggagcctggggctgggacctgaacactgtacctactttccctctgtccttgtaccgcgggactcgcgacaacgtcggggattcggggtggggggcgggcacctggcagcaacccttgattttctcaggttcctgtggcctagccggatgggagaagggtgactccgcttctctggggactgtcattccggacctcggctttgttggtgtagaggactgggtatcaaagaagacttatgccactggacacccagcactttcaggcacccgaggttgaagctgcctagtgctggtcaccaagactgatcggagcccccagtactgggattttatttttggcagcccgagtcccagagagtcagtgaatcagtgaatctgctattcctggactcctcgggatttaccttcattacccagttctaaccctctccgctgaaaaatgagtggctccagcccagtaactataaaagtggtgtaatctcttccaacgtacatacttatttgctttcttgttggattgttgtgtaataccaagccgttttgggtctgaaggttgaggaattgagcctgccctgtgaggggactttggcaaaagggtggaaggtatttgcagcttgccaacaacgtgttctgcttgccaaggacagatctcccttaatgtacacaattcacagaattcagaggccaaggataattttccttggaattagagggtctgaggcttgtgtacatggcagagaataatgaacgaaatttttgaaccacttaacttgaactatatacagtcattggtttccataggccctttcccataaacttacagtattgctggactatgacacctaccagatgcttacttaactctggtctgccttggaccagagtgctttgattcttttttaaaaatatctgtgattcgttactttggggctaggagggcgtgtggttaagtactattgcaagaatctgtaagctgcccggcgcggtggctcatgcctgtaatcccagcactttgggaggcgggtggatcacttgaggtcaggagttcgagaccagtctgggcaacacggcgaagccctgtctctactaaaaatagaaaaaattagctgggcggggtggcacccgcctgtaatcccagctactcaggaagctgaggcacgagaatggcttgaacctggcggaggttacagtgagatcatgccactgcactccagcctgggtgacagagccagactctgtctcaaaaaaaaaaaagaaaagaaaagaaaggaaaaaaaactgtaagctatgatgaaccccttaggaaaatgcattcaattttccattcatcatgacaggattcaagaatctctagcttaagtagacaaggttatagaatctcaagtcatattttttttcttctttggtaggttttagggtaccttgctgaaatgatttatcctttcacccttttattctgtagttaacttaaaggcatttagttcaaacagcattgtggagttaaaaccaaattcattgaaaggttacttcacttatattttgccattttcttgctctggaatatcccagctctgccattttctggccctatgattttgggtaaagtatctctgtgccacagttttcctctttgtaaaatgaggatttataatagtatctattccatagtattgttgtaagaatttaatgtaaggctagagaacattgctatatacttggtcagctgccaaatgtgaactatcagtaacatatcagatattatttttaggtaaagtttttttttctctaagcaacaaaaagggacccctgcccccaaccgtctttttctttccaagttccctttgtgattctgtatcttgtcctgagcaggagaagtgcatggacaagcctgggccaaagttggacagtcgggctgaggcctgttttgtgaactgcgttgagcgcttcattgatacaagccagttcatcttgaatcgactggaacagacccagaaatccaagccagttttctcagaaagcctttctgactgatctcagcattacctctttggaaaaggaaggtagttcaagaaatgaagagctgttgatgggatgattgaagaaacagctatgagaggattggctcccatcttttgttactcttgggacatcctgtcatctgagaatgaacaaagaccaattttttgtgtgtgaagcttaagggtcatatgtttgcttgtattttttaatgctaatcttgtgaaaataattgacaggcgaaagaaaactctatttagatgcatattactgtacatgggactatgcttttctcaaagccccattaactgcttcctataattttgatagtgggaccacatacgtaaaaatctctcatttgtgtggagtcatttctgatttcaggggagatccttgtgtttatcagaaagggcagaagtaggggaagaataatttggtatccttatctagtgtttgattgtcaatgctggagaaaaatatctgtaagagtgtttatacagtacacttcagttatcttgatctccctttcctatatgatgatttgcttaaatatccatattaagtaagtctcaaggtagggtaggcagcctgagagtctagaggcctttagttataaaggaatctagccagtgaacataattcttattactagactgccacaaggaagaaattaacttaccctgtatatcagggtacaaaaaattcagtgatgtgcctaaataagttataaagatttaggccaatcagaagctaacagcagtttcaggtagaggtgcatgcctaatgttagttagtgtagattccatttactgcattcttctgatcactgaaataaaagctatataagattcaactctgtgattgagaaggcatcctattgcagttattatctgcaacccggagagatttagcatgggctgattccaaggttaaaatgtagtcagtcagtctgggtacctgctctgtgtaaggtacagcacagtattccaggggttcctgacctttttgagagaaaagagaacctagagatgagatggggagggaagcggttatgtgctggcagtcaagtccgtgagtatagtagaggttgtattgactggattctcctcttatttcaaatccttgtagactggagtatagacctaaaatggacctacttgttgggagcctctagtgcaaatccatgaaatctggggaaatgaacatctctaaaagcttcaagtccctgtttagattttccccataaaggtgctagaaggactttttttttttttttttttgagacggagtcttgctctgtcgcccaggctggagtgcagcggtgggatctcggctcactgcaacctccacctcccgggttcaagtgattctcctgcctcagcctcctgagtagctgggattacaggcgcacgccaccatgcctggctaatttttgtacttttagtagagacggggtttcaccatgttggtcaggctggtctcaaactcctgacctcatgatctgcccaccttggcctcccaaagtgctgggattacaggcgtgagccaccgcacccagctggaattttttttaaatcattatgaaaacacagttaaacatttaagttcatactctgtgccgttgtttttagtgacaggatttcagcagtgcacagaaacagtccctgcccttgaggagctattggtctagttaggggaggtagacaataaacacataaatatgtcaatgtaataagtgccatggagaaacagcagagtaagggtgttagggaatatttatggagtgtgattattttatataagatggtttgagaaggcctccttgggaaggtggcagtccaacagagacctggatgaactaagcaaccaaaccttgtgggtgttgccgagcacggtggctcacgcctgtaatcccagcactttgggaggccgaggcaggcagaccacgaggtcagaagatcaagaccatcctggctaacatggtgaaaccccatctctgctaagaatacaaaaaaaaaaagagctgggcgtggtggcaggcgcctatagtcccagccacttgggaggctgaggcaggagaatggtgtgaaaccgggaggcagagcttgcagtgagccgagattgtgccactgcactctagcctgggtgacagagcaagactccgtctcaaaacaaacaaacaaacaaaaaaaccccacaaaaccttgtgggtgtctgagacaagaacatttcaggcaggaataacagtaagtccgaaggccccaaggtaggaactgcatgcatgatgccgtggagaacagtcaagaggtcattatagctggagtaaagtgagtgaaagagaatggtaagaaataaggttggagagaccgggtgcggtgggctcatgcctgtaatcccagcactttgggaggccgagatggatggatcacctgaggtcaggagttcaagaccagcctggccaacatggtgaaaccctgtctctgcaaaaaatacaaaaattagccaggtgtggtggcaggtgcctgtaatcccagctacttgggaagctgaggcaggagaaccacttgaacccaggaggcagagattgcagtgagccgctccagcctgggtgagagagtgagactccatctcaaaaaaaaaaaaaaaagaaataaggttggagaaaaacgcatgcaatggatcagggtgacgggtgtgtgtgcactgattatgtggggccttgtaggccatggcaaggactttgggcttttactaagcaaggtggggagccatttgagggattttaacagatgaatgatgtaacataacttaattttaggagggtctggctgctctttgggcaacatcacatggtgaagaagttgtaacagtagcagtagtagtaagaataatggcattttgaaatccaggaaaatgagactttaaaatgcatataccttgtaactatatgtccccgttgacttttttttccctacaaaatttaatgtgaggccaggcacggtggctcacatctataatctcagtactttgggaggctgaagtgggaggattgcttgagcccag

SEQ ID NO: 97467 - DNA, 17703 bp, Homo sapiens
ctgccactgtcaggtaactgcccagccttgctgctgccctgctgagcccctcctgggcatgccccgattgctctctcccctgctctctcgcaggatggaactgtgacatgctccttggttgactgccctcccacgacctgtgccaggccccagagtggaccaggccagtgttgccccaggtgcccaggtatgtgggcactcactgggcctgaggggatcagggccccagaggctgctgtcccacagccccatgggcccaacaggtaccttagaaagcaatggccttctgaattgtttcagtcttgtttcagagcttagaactctctggaactcacggggtgtgggtgggagggagagtagagagatttgtttattcctgcctgtacctacaccaccctctcctcccatgctccatttcctcttctagtaactactgccccccgccccaccacgctagggcccccacccccctaccccccaggtaaacccatgtatctacctggataacacaggttcatgagcaggcacttgagcctgccacgtaggaggccgggtgctgggatgcatgggacacgtccctgcccgcatagagagtctgtgtgagggcgtgtgtcaaacacaggtacacacatgtgtaagcactccccttcttcccctcagagacacacatctgcctgcaggtgaatgacccccaatgcgcacgcacactcgtgtgtgctcacaacgatacacatgcctgcacacatgtgcacatggccacttcctcctctttcccctcgagtcagcttccaagtgggcacttgtgtggcggctctggactccagggctggagggactgtcaggctttgccctcatacctgcccccaccatccactgcccagactgcatcctggaggaagaggtgtttgtggacggcgagagcttctcccacccccgagacccctgccaggagtgccgatgccaggaaggccatgcccactgccagcctcgcccctgccccagggccccctgtgcccacccgctgcctgggacctgctgcccgaacgactgcagcggtgaggtgggcgggtcagggcggccttctgggatgggatggcatggcccccggaaggcagcacgccctggggcagtcgccctctcccaggctatagcccctccctcccccaggctgtgcctttggcgggaaagagtaccccagcggagcggacttcccccacccctctgacccctgccgtctgtgtcgctgtctggtgagtctgcacctgggtgggaggcgcccaggggagtggaggcgggacttgcagaggccaggagaggcccgcccaggtgggaggggtgggacctggtggcactgggtgggaggggtctcctcggcctcccccaactaacccactgacccgtggtgcgtctgtcggtccgtagagcggcaacgtgcagtgcctggcccgccgctgcgtgccgctgccctgtccagagcctgtcctgctgccgggagagtgctgcccgcagtgcccaggtaggggccgcacccctcggctgctcctccctgggggtcccctcggaggcctgttcctgggcccctttgatgcgctgtctcgccgcagccgccccagcccccgccggctgcccacggcccggcgcggcccacgcccgccaccaggagtacttctccccgcccggcgatccctgccgccgctgcctctgcctcgacggctccgtgtcctgccagcggctgccctgcccgcccgcgccctgcgcgcacccgcgccaggggccttgctgcccctcctgcgacggtaacgccctggcggtgcccctcccggccacccgcgtcctgccgccccgccccgccccggagcgccctgcccagtccccttcctccaggcccgctccgcccacgtcggggatcttgttaggaatgtagtgtccggtcagcatggcctgggagccagccggcacggccctccatcccccacggcccccagccccccacgacacccatcctccacggacctcagcctccacggagcccacggcctccccgccctcacggacccccagcccccacgacctccagcccccacggcccccacgacacccgtcctccacgcccctcaaccccacgaccaccaagtccccacagccctctagtccccacggccccccagcccctgcccttctccccaggctgcctgtaccaggggaaggagtttgccagcggggagcgcttcccatcgcccactgctgcctgccacctctgcctttgctgggagggcagcgtgagctgcgagcccaaggcatgtgcccctgcactgtgccccttccctgccaggggcgactgctgccctgactgtgatggtgagggtcatgggatagggagctgccggggtgggatgcgggagaccagagggctgggtcagaataatctttactgccctagggtggatctaaaatatttattacagtaagaaaaagccccgaggctgggagccctagctgaagcctgtgaccccgacaatttgggaggctgaggcaggaggatcacttgagcccaggagttcaagaccagcctgggcaacatagagagatcttgtctctacacaaaaaatttaaaatcagctggtcgtggtgcctcttgtagttccatctactccggaggctgaggtgggaggattgcccaggagtttgaggctacagtgaaccgtgttttcaccactgcactccaggctgggtgacagagtgagaccttgtctcaaaaaaaaaaaaaaaaaaaaaaaaaagcctgacactaaagcctggatcttctcctgcctctgttgctatttgccgtgtggtcttgggcaagttacatagcctctctgggcctaaatttggctcttgtaaaaagacccagtcccccagtccccctgtcttccctcactcttgtgcgatcttggccattttggccacttgcccttaccaactgtaattttatttactatttgccttccaattaactcacttattaatttaatttgatttagaaaggagttttatatcacactgtaagtggaaaattagacttgccaggaccacattaccataaaaatgaatataattaaaattataatgttgttaaatccttgtcagatacttttgcccaccaaggctttgagcctgaaattcacccttcttttttaaaaagggaggtgagcaaatggcagaggtgccaagagcgggctgtcaccaccctgggaccccaccccttcctggattcatcagtgggctcggaagagcgtgggaaaggcgctaccttgggtccacaccacctgagtcagctggggctactcccagctctccgggttgggaaactggtgcctctggcaatggcctgctgagtatttaaccccaggggcagcagattccttgtgggtgtttttctacaaattaaacaggaaggttttttgcaggataaaggggagaaagtttgccttttggccaatccaaaccccgcccccctcacgactgctttgccccctgggcttggcctgtgaccccccagcccccacgctagatctttgagatcttggatgcataacaggcccaagctcagagcctatgaccactgccctctcatccctttctgtccctcccctcggcctctctgtctcttctctgaaaggctgtgagtacctgggggagtcctacctgagtaaccaggagttcccagacccccgagaaccctgcaacctgtgtacctgtcttggaggcttcgtgacctgcggccgccggccctgtgagcctccgggctgcagccacccactcatcccctctgggcactgctgcccgacctgccagggtagagccacacctgcccttccattccccctgctggggctcccggggtgcctttctcaccgattccactttcctcccagccctcccactgcctgccgctccaccatacttttctctcactctccgactccctcacctttgatagaggtcccgggcacggctgtgtgtttgtatgtatgtgtgtgtgtatgtgtggctctgtgtgtgtgtggctgtgtatgtgtgtgtgtctgtatgtgtgtgtgtgtgtctggctgtgtgtgtgtggctctgtgtgtgtgtggccgtgtgtatatgtgtgtgtatgtatgtgttgctgtatgtgtgtatgtgtgtatctgtgtgtggctgtgtgtgttggcctgtgtgggtgtatctgtgtatctgtgtgtgtgtgttgctctgtgtgtgtgtggccgtgtgtatatgtgtgtgtatgtgttgctgtatgtgtgtatgtgtgtatctgtgtgtggctgtgtgtgttggcctgtgtgtttgggtgtatctgtgtatgtgtgtgtgtgtgtgtgtgttgctctgtgtgggtgtatctgtgtgtgtgtgttgctctgtgtgtgtgacagtgtatgtgtgtctgtgtacgtgtgtgtgtgaccgtatgtgtgtctgtgtatctgtgtgtgtggctgtgtatctgtgtgtgtatgtgtgactgtgtgtatatgtgtgtttgtgtggctgtgtatgtgtgtgtggccctgtgtgtgtgtgtgtgtgtgtatggctgtagctgtgtgtatgtgggtatgtgtgtgtgtgtctgtatttgtgtctgtgtatgtgggatgtgtgtgtgtgtgtgtgtatgtgtgtgtgtggctgtgtgtgggtgtgtatgtgggggggtctctgtgtgtgggtgtgtgtgcatctgtgtatgtggggatgtgtgtgtggctatgtgtttgtatggctgtgtgtgtgggtgtgtatgtgtatgtgtgtgcgtggctatgtgtatgtttgtgtggctgtgtgtaggtgggtatgtgtgtatgtgtgtgtgtgtgtgtgtatgtggctgtgtatatgggtatgtgtgtatgtgggtgcgtgtatgtgtgtgtgtggctgtgtgtttatgtgtgtgtgtatgagagtgtgggtgtggctgtgtgtgtctatggctgtgtgtgtatatgggtatatgtgtgtatgtgtgtgtgtggctgtatgtatatgtgggtgtggttgtgtatgtatgtgtgtgtggctgtgtgtgggggggtgtaggtgtggctgtgtgtgtatgtgtggagggggaggggctgtgtgtgtatgtgacagtggcagttctgttgatggcaggttttctgttgcactcccacctgctgtgtgtatatgcgtgtatgtatgtgtgtggctgtgtgtgtgtatgtggttgtgggtgtggctgtgtatatgggtatgtgtgtgtgtggctatgtgtgtgtctgtggctgtggctgtgtatgtgtggagggggaggggctgtgtgtgtgtgtgacagtggaggttctgttgatggcagctcttctgttggactccccgctctgccaggatgccgctaccatggcgtcactactgcctccggagagacccttcctgacccacttgaccctacctgctccctctgcacctgccaggtgaggcagcccctttaggaccttggtaacctttcctcccttgatactcctctctggccaggaagaggctgtctcctccactcaggtggcaagggctacactctgcccttcacatctcatgggacaggactgggctcaggtgtcccgggccaagggagggtgtttgggcccctgcaggctcagtaggggctccagccctggggaaatgtgcagtccagttgagggtgtgatgggcctctctcccccaggaaggttccatgcgctgccagaagaagccatgtcccccagctctctgcccccacccctctccaggcccctgcttctgccctgtttgccacagtgagctgccttcctcatgcgcggcccccatgcccttccccgcctctccctcccccttcccttcctgccaggcctaaggctgggccgagcagggcagggtggcacaggccccccacccaggaggtgtgtcccccacaggctgtctctctcagggccgggagcaccaggatggggaggagtttgagggaccagcaggcagctgtgagtggtgtcgctgtcaggtatagcaggaggtggggggtgtggagtgacagctggaccatagcacctctgggccccagcctaggcagcgagccagtgtccctgcatctcctacaggctggccaggtcagctgtgtgcggctgcagtgcccaccccttccctgcaagctccaggtcaccgagcgggggagctgctgccctcgctgcagaggtatggccgcctgtagccctaccccttgcttcagccccttggccctgtgtccctctgtccaccccacctccctcccctcagccagctcttctcccacctccctgccccaacaactggcccttgcatacacccttgccaccttcagcttctcctacctctccctgtccgggactgcccagaccatccctcttccaggtgctggttagagttccctcaaagctgcctgtcttgggctgggtgcagcggctcacatttgcaatcccagcactttgggaggccaaggtgggaggatcacttgaacccaggagtttgaggctgcagtgagctgcatttgcaccactgtgctccagcctgggcaacaaagaagactctgtctaaaaaataaaacaaaaagctgcccctcttcctaaccacaccccattcatcatcatcatcatcatcaccaccatcatcatcatcatcaagatacctgacattcagtgagcaggtagcatgtgccaggccctgagcactttacgtgtattatctcatttaatcagcacaacaacttaccagataagcactcttagtcctcctattttacagacgagaaagtggaggtacagagaggtagagaaggtggcagagtcaagatggacacttggaccatctggctctgaacttgagcctttcttagcctgcccactgccccctcgtcccacaccctgcgcagtgtggtggtgtttctacagaaccacagaactgtcatagcatttcacttgctctgggagggaggcaggacagaggaaatccccatttaacagatgaggagactgaggcccggagagactgagttaccttgggcacatggttagcgatggagccattcacctggtccacatgcatttatgacacagctgctgcatgccaggtctgtggccggtgcgggctgcactgggcagtgcctgctgcctggagcttggtcttgagagcaggtaggaacagaacaggattagaacccaggtgttctgaacccctcccagtgcctttcccctccacaacagacaggagttctgccccatcgcaccttcccgccatatccctgcaaactcactcctggcgccacgtgcctagctgaccactgagggtgggggccaggagcagatgtccagatctcaacctccgagctcgtccctgcccactttgcaccacaggctgcctggctcatggggaagagcaccccgaaggcagtagatgggtgccccccgacagtgcctgctcctcctgtgtgtgtcacgagggcgtcgtcacctgtgcacgcatccagtgcatcagctcttgcgcccagccccgccaagggccccatgactgctgtcctcaatgctctggtactggaagcctggggcgggaggggaaaggcgaggagggagccctgggcccacacctccctgccgctgctgggccgggtggcagagacaggcagttggagaagtggcctccgtccttgtgcacactccactccctgggatcagggggaggctggagatagaggactccacccctgcctcgctgccagcctgaaggacccctggtcccgttctgctctcactccaccccaaagactgtgagcatgagggccggaagtacgagcctggggagagcttccagcctggggcagacccctgtgaagtgtgcatctgcgaggtaggtgagggcacagtggtggggctggggcacctcgtcgggggggagtgggcagcatgggatgaggcccagccaagctggtcactgcatggagcaggcactctgggggccaaaggagtgtatccctgtggccaggagacaaggcagggttggggccaacagggccaggaggtctgggtttagacaaggagcgcaggttccaagtgtgcaggaggccgtaggtggcccccctggctgcagtgcagggcgggtgtgtatggccggagagccacctgggacgtggctaggggtcatattgtggagattctatttgcaaggccatggaagggcttggagcaggcaaatgacatcacaggtcagggtactaagccatgggcctggggaggaggatggcatgagcctgccggaggatcaaaggtcacatgagggctcaggcccaagtgacttaaaggagaaggagacatcatctcagagactagggcatggggtgaggagcacgtctagaagacactgagtctctcttcagccttgagttcagggcccaagacatgtcccggaagaggctgcagcaggcagagggaggggccggaagtcccggccaagggcagctctgggtttttgtggcccaggacccaccgctgctcactcattcttgtagccacagcctgaggggcctcccagccttcgctgtcaccggcggcagtgtcccagcctggtgggctgcccccccagccagctcctgccccctgggccccagcactgctgtcccacctgtgccggtgagtccagggatgtgggggtagatgagatatgaggttagggctgccaccccctgccgcccttcctcaccagtcccagccccagattcttcctgactccagtggactgttctggaaccctatgcctggccggcgagggctgcaccatccctaagggaactggggaagctgacaggaaccctttgcctctccgcagctgggtgcagtttgtggagcatcttggccagcaggtggcgctgcagggcgacagttgtgmtgagacgtgaggcccaggcaggcagggggtagcccagccacaggggtgggcgagctttttttgttgtcgttgttagagtaaaaatttattaagattggggggaaaagtaaagaaacagttttatttttattacaaatattgaaagatggccaatttctgtctcctggatttaatagttgtttacctaacacagccattttacatttgttgtggagggaatttttttctgtttctggtcctataccaacactgaaatgataacctacctttgcaatacaggtgaacgttatccttacrtagaaaaaacaggccgaggttggtagctcacgcctgtaatcccagcactttgggaggccaaggtgggaggatcacaaggtcaagagatcgagaccatcctggccaacatggtgaaaccccgtctctactaaaaatacaaaaattagctgggcatgatggggcatgcctgtagtcccagctactcgggaggctgaggcaggaggatagcttgaacccgggaggcagaggttgcagtgagctgagatggtgccactacactgcaacctggcaacagagcgagattctgtctcaaaaaaaaaaaaagaaagaaaaaacatacttttttttttaatgataatcctattttctccaatttggtttttttatttgggttttggtttttttgagacggagtctcgctttgtcgcacaggctggagtgcggtggcacaatctcggctcactgcaacctctggattcgagggattcacctgcctcagcctcccgagtagctgggattataggcatgcgccatcaagcctggctaatttttgtatttttagtagagatggggttttaacatgttggccaggctggtctcgaactcctgacctcaggtgatccacccgcctcagcctccgaaagagctggattacaggtgtgagccacctcgccgacttttctgttttttgtttgtttgtttgtttgtttgttttttatggtggtaagacactaaaatgtacaatcctaaccatttttaagtgtacagtttgtggtattaaatacgttcataatgctgtgcagtcatccctggcatccatcagggagggctgctctgatcaacacttgctagggggtgcttcaggggaagggaagaagactaacattgattaagcacctgttccatgccacagactgtacttggtgctcttaataaagtctctcgcttcattttcatagttacccagtgagggaagtattattaatctctttttacagattaagaaactgaggctcagagaggtggattaatccaacctaataagcacaggcactgagtgctggcatcaggattcgaacccgggatgcctggctgtgtgcttccctgcgcagttgtagccacactgtattacagatagcgggagggagagcaggccgcagactggccatttttagtgacctcaggctaaggaagccatggttggtctgtttccagtcaccttgcacccccacccggccccaaataatagcctagcaaagtttcttttaaaacgtgtaaacttgactgaattgaagagaaagaggacttatcctccctggagtcaaggtgctgggatatgggtatgctcaggagttcgagttagaaacctggggacacagtgcatggggacagctgggatttccagccctgtgcccctctttctgtcccgcactctggattcttgtcttcacagaggccttgagtaactgttcagagggcctgctgggatctgagctagccccaccagacccctgctacacgtgccagtgccaggtgagccctcctgccttggggactcacagagcccctcttcttccttctctgtgggctgtggctgccactcctctcccgcagcagctccagggctctccattcgccctgacatttgcccacttgtcctgactgtcacatcctgcctatgccttactcctccaccagctccctgagatctgccattctctacctcttgtgttcacatgggcaggacctgacatggctctgcatccaccaggcttgtcctgagctcagctgtcccctctcagagcgccacactccccctgggagctgctgccccgtatgccggggtaagtgcccagccttggcctccaccctcagagaggagcccagggggaacacaggaaggggaggcattcatgggccaagcgggcagcccagggtttgtactcggtttctagaacagaatgcagggttcattcttttctagaaatggaggggggctgttcttgaggtggagaagagacccatgaggcagggggaagctgggatgaagcctagattctcaaggtctggcctgatgcctgtcaggrggctcrggatccccaggcccatgaagagggcattgcactgctgagcgggcagctggcccagagtggggttccagcctctggccctttgggctcctaggaccctagagacatcctgagctctgatgtgaggcctgatgtctaataggccctgtggatattggctgaagaaatcaacaccatcagggtggtagggacayggagtgggtgctttcctgccgtgaaatgctgggtaagctccaaggagggaggatacagcaggagggacagtgcctgcccatcccatgtctcccccctcagaatgtgtggtggaggccgagggccggagagtggcagatggagagagctggcgggaccccagcaatgcrtgcatcgcctgcacctgccatgtgagctggggtgggcctgggagggtggaggatctcgcagatggataaagggaggagtgtccaacactccaccagcagatatggggtctttaagggtcaggggcatccctgcaccggggcatggagccgaaggctggatttcattcccctcttgaactgtgaagaatgtattgtgggaggggcaggcagaagtccatgcccagaggcccccagaagcatgaggctggggactccggccctgcagaaaaccccagaacaatgatgtctgtcctcagcggggccatgtggagtgccacctcgaggagtgccaggccctctcctgcccccatggctgggcgaaggtgccccaggctgacagctgctgtgagcgatgccaaggtgcgcagccagggtgatgggggaggggtaagccagaccttctgggcatgtgggaggagcagctgaccctcccagctcctatcccttcagctcccacccagtcctgcgtgcaccagggccgtgaggtggcctctggagagcgctggactgtggacacctgcaccagctgctcctgcatggcgggcaccgtgcgttgccagagccagcgctgctcaccgctctcgtgtggccccgtgagtgccgcaatctaaaatggtggggagggtcagggtgggggcacatggtaccgccatcctggtgtgaccaggcatcagagagggaggctgggctcctgccgccagctgggagctggggacagtgctgttcccagtgcgaccacgatgtggtgccctgacctcactcacagggagcctgggagccagagtcctggagatccctggagactcctgggagatgcttggttttctgggagggtctgcgagaggcatggcggggagggcggtgtgtctgacagtgtctggggctgagtgcaggacaaggcccctgccctgagtcctggcagctgctgcccccgctgcctgcctcggcccgcttcctgcatggccttcggagacccccattaccgcaccttcgacggccgcctgctgcacttccagggcagttgcagctatgtgctggccaaggactgccacagcggggacttcaggtgtgcatcccctgtctctcttctccccaacccctacacccagccctgctgaccattggcacctgggactttcctgcccacagtgtgcacgtgaccaatgatgaccggggccggagcggtgtggcctggacccaggaggtggcggtgctgctgggagacatggccgtgcggctgctgcaggacggggcagtcacggtgagcaaagccgaggagtggaggaaggtggatcctgtgctgtccacccatgtgcctcgacatcacccctcctcccacctcctttatcctccaggtggatgggcacccggtggccttgcccttcctgcaggagccgctgctgtatgtggagctgcgaggacacactgtgatcctgcacgcccagcccgggctccaggtgcggctccagggcgagtctgggtgggctgcctgctgggagcttcagtcctgtttaggcctctgtatctgtagagggggtggggatgccagctacctcctagccaaaaaaggcaaggagtggggtacaggggtgtgaggggaggtggatcagggtcagagatctccccaggcagtcagaggagttctgagttctgagcccgatttctaatctcggctcagcctcttaagccaccaccagcctcctctgggccacagatttctcgtctgtaaagtggggaatgggaagggtcagtggcagtggggaggatgtcagctgaagtctcctgggggggtgtctcaggttccttccaactctcatgtggaagagtaatttgccccctgcccccagcaggaaacacaactcgtaaattcgtagaataagggtgtacacttctaatccggaccctaattgtgctttgtcctctgcaaggcccgaatgcccatgagaaagtgaatccccggaagggggttgcatttcacctggggcccagtgcagggatggcagcaggagaaggtgccctcatgcaggagctgtgggcagctcctcctgtcatctgtctttgcccagggctggcacagaatgtatccacttggccttggccagggtggtgtttcttccaaggggagcctccacctgtccattctcctcccctacagcactggccgcactgaacacagtgcctggggccatgatggaccctgggcttcttaaggcccctgtccttccctgctccccagtctcaggcctctccacacaggtgctgtgggatgggcagtcccaggtggaggtgagcgtacctggctcctaccagggccggacttgtgggctctgtgggaacttcaatggctttgcccaggacgatctgcagggccctgaggggctgctcctgccctcggaggctgcgtttgggaatagctggcaggtgagtggtacaggaaccggggatggggattaggggagacgcagctgagcatgagtctcagagcaaccctctggcatggaaagcagggaaggggggcgaagtcacacaagataggcttttgggctttcagggaggtgtgggggcttcttgcctgtcttggtgctggagaggtagggtggcttgtcaaaagaggcctcattggccgggcagggtggctcatgcctataatcccagcactttgggatgccgaggtgggtggatcacctgaggttgggagtttgaaaccagcctgaccaacatggagaaaccccatctctactaaaaatacaaaattagcccagcctggtggtgcatatgcctgtaatcccagctactcgggtggctgaggcaggagaatcacttgaacccaggaagtggaagttgtggtgagctgagatcgtgccactgcactccagcctgagcaacaagagcaaaattctgtctcaaaaaaaaaaaaaaaaaagaaggcttgttacctgaaccctcaagccttgctttgccactcactggctgtgtgaccttggacaagtgctgacctactctggccttggtctgtccttctgtaaaatggggacaaaaagaaggtagacagtacttcatttgctgttcttttagggaggttttggggactaaagcaaatgactgggtgggaagtgctttgaagagcacggcatgcagaggccagctgccagtggtgctgtcacgtcagggctgctctccccacccaggtctcagaggggctgtggcctggccggccctgttctgcaggccgagaggtggatccgtgccgggcagcaggttaccgtgccaggcgtgaggccaatgcccggtgtggggtgctgaagtcctccccattcagtcgctgccatgctgtggtgccaccggagcccttctttgccgcctgtgtgtatgacctgtgtgcctgtggccctggctcctccgctgatgcctgcctctgtgatgccctggaagcctacgccagtcactgtcgccaggcaggagtgacacctacctggcgaggccccacgctgtgtggtgagggggtgatgcccgctgcaggttgggggaggctcagcacagagaagaagggcagcccggagggctcagggcaggaccaggccgggtatggcgagtctcgcaggggtacgcacagcaactggggcagtttcaggtgccttggtaaccccgcctcccactccccctgcagtggtaggctgccccctggagcgtggcttcgtgtttgatgagtgcggcccaccctgtccccgcacctgcttcaatcagcatatccccctgggggagctggcagcccactgcgtgaggccctgcgtgcccggctgccagtgccctgcaggcctggtggagcatgaggcccactgcatcccacccgaggcctgcccccaagtcctgctcactggagaccagccacttggtgctcggcccagccccagccgggagccccaggagacaccctgagccaggacagtgcctgataagggttcatcaggccaggagtctccccttggcgagcagttcccaccctggttagggctatggagagaatgccctgcctggacactggagcctgggcccctgccctgcaaagacccccgccatgttgagtcaccagcagtaaactctaggcctgcccgaaggcttccttgtgtgtgtgtgtatttcctcctggtgctgggacagaggctgggctgccaggaacatggggtccagtgatcagtggccgcagaatcacggcaccatgcttactccttgcacctgcatgcctgggctgccccacccagccactccctggtgctgtctgggaaaccctgcagtgggtagaaggaggaccctggtgccctggtcttagccctgtgctcattctgtgtagcaggcatgacgtgtggccccatgtggtaccttctgtggatccatgtgggatcctgcaggggctgaggaaccacggagaaggggctgcatcagagaatggcctcccccttccttgtggcttggggatactgagtgtgcaggcaccttctgggccactctgagagctagtgacacagggaccctatgcctggggtgagaaacagaagcaatagaccacaatgcagtgtggacatgtacctgcgtgtgcacacagaaacacacatccctcagaaacccagataagcacgtgcaatgcatacctgcctgccttcacagccacacccaccctgggcagacatatgggcagtagacactggcagcatgtaaagacgtcactgtagggagggaacatgggttttgagatagaaaaagtccagaattcaagttttctttgctgcctaccagctctgtgaccttggtgttttagggaccttggtcatgaggtcaggggactccatcctcattgctccctgctattccaacagggagtgaagggctttgtgctcaggcaaggacgcaaaagagcgccaggttgaattggaggccactcagcctgattgctctttcattgacgctgttttctcttctggccaagaggagggtctgctctgttctctcacggaatggggacaaagtagccagcaggcaaatctgctcacgacagggcaggatgtaaagatggcagagctcctgcactcagcccctctcctgattagataacttaaatgacctgtctattcatctgcgagatgaggatgatagtaacaagcgtctggtatgtgttggggaatgaacagtgatgcatggacagcacttactaggtggacagcatggataagcatgtgggtagtgctcgctggggcagggcctcttaccactcgcctcttgctgatggacggcctgggctcccgggaccatgtcttcccagagggtatcacatccatccatctccagaagaaaaaaatgctgccacatgttaagacaagctattccttttttttttttttttttttttttttaagagacaggatcttgctctgtcactcaggctggaatacagtggcacgatcacagcttactgcagctttgacctcccagcctcaatcaatcctcccatctcagcctcccaagtagctgtgactacaggcgcgtgctaccacttctggctaactttttttttttttttaagaggtggggtcttgctatgtcacccaggctggtctcaaattcctgggctcaagccatcctcccacctcatcatcccaaagtggtggaactgcagatgtgaagcaccacacttggcctaggagaagttgctttctgagtcagtcttcttgcctataaagtggggataataatagagcctgcttcatagagttgctgcaaggaaggattatatgtacgaagcatcttcattcccgcacaagctaaactgttggtagcggctgctgttgctacccatattgggcatattgtgtgcccaaataatgcagctgtgtggttgatgtgcatatgtatgcttgtacagtatatgtcaaacaaatgctcactgggggctgtaaacaagcatatgcgtatacctccctctttcgggg

SEQ ID NO: 97468 - DNA, 18546 bp, Homo sapiens
acctgggaggtggaggttgcaatgagctgagattgcgccattgcactccagcctgggtgacagagggagactcagcctcaaaaaaaaaaaaagaaagaaagaaaaagagcggtgagaggaaagacaggcgagcagctcagggtggctccttcgtggcttcaccacgggaagtttgcattgttttgcaaggagcagtagagacattgttgaaggtatttgagtggatgaagagtgattcgagttgtgctttaggtagattagcttggcagcagcaggtgggtgaatcggagtgaggagatggtgagatggtcaaagcgagagggaagggcctttcctttccgggccgtcctgatggaatttaggtgaggggtgggtcacccaacctgcctgtggtctggtggctaatgtgagcacctccctcccagccctaccttcacaggcggtagtttccctgtttctggtccgtgctcctccagctgggccttcttcccctgaccttgctgatccttggtgaccacctccgaatgtcagaatccacatcgttaggctcacaatgtgggctgcttttgccccagtgggtccagttgccccaacacgctgtgtagtgctgaccagtgtttacgtgtggggtcggctccattcctcgctttctcccgaaacagatgtcaatgccaatcgcatcatcccgaggagacgtggagagtgtccgccgctgcctggctcacagcctcttcatgagcaccgccgagcttcagccagatggcacctatgccaccacggacacccaccagccagtggccatccacccgtcgtctgtcctcttccactgcaagccggcctgcgtcgtgtacactgagctgctctacaccaacaagtgctacatgcgggacctctgcgtcatagatgcacagtggctgtacgaggctgcccctgagtactttaggaggaagctgagaaccgccagaaactgagccgccccaggatgccgccagaatcactggtccctgggagcttggactacagttgtccttacagcaggcttccaggttggcgcttagagaagccttggaatcagctgaaggtgcctgacttccaggagcgtgaaagcatctttgctcaactcctgggactgaaccatatagacatggacatatcatttgtacctggaaacctcaaaattatgcttttggttcttactgggtgactttgacttaatttaacacctgagcctcagttttctcatctgccaaatgggagtaataataataatccttataaaattgggttcataaagtttagagaaaaggaatggaaagtacccagaactatgcctggagcacgcacgacacacgtacagtgagttgggagccgttaggctgaatgttactgcttgccatatgatgtgaagtacagcaatatcccaagttcttgtgactgagggagattttctggaagggccacaggaggttgcggagcttggatgttgcccttagttcttgtttaatgtctctctgaatgcagttttaaaatagaaaacaaaactgacttctgtagaagtttccagagggaggtgctgttatctcgtacctcctgggatggcgatccctactgaacgcttgtgtctcagggtggaccactctgtgtctgtctccaagcagagaccagtaaaggagcctcctggtcctcagtgcgtgaccctgtcagtgctttcaggagacatgtaagcttcctgggtgaaggttgatttgtaccttctgaatcctgtcacgtgtagacatgggaaactgacctatcagtgttttgtgtgtgtaggtgactcccacatacacagttgccatttttctctctaactgggcaccagtgaacatgcgggcatgaggagtgactgtgtaccatttcagctgtttcttttcgggcagtcccctggtcagagggggtgggggtgggggaggggagaggggtacctagaacccagagaacattggcttatgccagataccacaccacatctgggcttacattcttgtatcttttttggtgtgtgggcggggggggtggggggcagttcagtgaagtctagaagacctgctggacaaattctaaaagagctagagctgtaacacttattcttgcatcttattaattttctatgatattttttccttcttcgtagggacttgggacaatctggctttgctgctttctaactgctaggcacctctctctaaccctcattgtcagagggaattggaggatatccacagtctgttcctgttctgatattctgagcagagaaaaggcactaacggttcctcttagctatttaattatcagaagcaagtaatctttccccagataatattttgccctagaagaagccgtgatttagctcttttattgtgcttacttggtccaaatacatctgtggggtgttttgtcatttcttaatgaatgaatcatagttataaccaggggccaagctgcccaagaggctcttcagagatcatggatgctctctttctggaagctgtggcctgatggagcagccccattccagggtcccatctgtccggagttgtgtatgtcaagtccggctcagtctttatttccaacactagccgtggtcctgtgcagtcaagctctcagctagtgtttagggctgtctgtcagaaatggttatacgtgggcaaaagaagatctgacagctcctatataccttatcttactgaattcttaaactttgaaccagttcttccacttactgacttgttaccactgctgactttctgaaaagttttccagtttttgttttttgttttttgttttccagtaggggattagaatgtttagtcctacttagtaagaaaaatattgtatttttaatcattcatagtgctggtaaaaaaaaaaaaaaaaaaaaaaaaattggggggtggccgggcgcagtggctcacacctgtaatcccagcactttgggaggccaaggcgggcggatcacctcatgcctgtaatcccagcattgggatgggaggctgaggtgggtggattgcttgagaagttcaagaccagcctggccaacatggcaaaaccccgtctctactaaaaatagaaaacttagctgggcatggtggcacacgcctgtaatcccagctaccggggaggctgaggcacaagaattgcttgaacttgggaggcagagtttgtagtgagccaagatcacgccactgcattccagcctggccgacagtgtgagacggtctcagaaaaaaaaagaaagaaagaaagaaaaagaaaaaacttggggtaatttatgtccagcttaagtacctgaacagtttccggaaatgtatattttttttctgagaggcaaaggatgtaaacagcttctaagtagctttaatgtttctgtacagaaataagtttatccctgtaacattgtggtagagttttaatacagtatttagttttttattgggcttttttaaaaagttaacttttaacatagctgctcagggattaaatcagattggaaaacccattctgactccacatactgctacaaagaaatacatcgttgtttatattgagctgcaggagatagtacactttaaacttaagaaagttaaatgtttcacaataacattgcaatataatcttcagctactctctttccattggtaaaatctctgatggtgtgataactctttgccaacctacgaaacccatatctggaagaatcaccagctcccgtgagcagcttcatgtaaatagatgcactccaagcagattgcatgcctcaggtgtttgtcttctagtaatcatggagtgtgcaacacccagagtaacactacaaggggcaggactgcaaacagcaggtcctggctaaaaacccttaatgctgcattgctgccagttgtaaagagatgcctgaatggaggcaagttctgccctgtgggtgaaactgatgatgtactgtactgtcatatataaatccactaaatccagctaccaggaactgcctggaactgtggccatgcatttttttttttctttaaagaccagtgtgatagtaggccatgcatctgagatacgatattccttggtaactagagggagaaaaaaaaatcaagtaggttcaggcttatgttgtattttgagagtctggttttatttgaacagaaataactctacagaaagctcttgtaaataatgctcaaatttgcacccgacgatcaaatccattaaaaatgaatcttgtatatgatgtgtgtggcttgtttcttgcatctcttttccattattcatagaaaattatttagaaaatattaagtgttagtcttaccatgagttagtaagacataccttcttagtagcttatatgtcctgtatatcctgggaaggtaggattgttgatttttaataaatctgaaccctgtctttgggttatattaatttactggagaaactcacagaactcagggaaacacatttaccggtttcatacaaaagatatgaccaaggatacagataaggagatgagcagggtggggaatggggaagaagctcccagcctccatgccgtccctggaccaccaccctccaggaacctccatgtatttagctatcagaggctctccaaaccctgtcctcgggtttttatggaagcctctggacttatctaaatgatataagctggcttcttgtccccagaaaaatgatgttccattagaacttggatgcaaggttggaggtgcagagagggaaggtcacaaaaattaatcatggatcctgcccttgaggatgtcacagtctggttgggtttaacctggttaaagcagcaacgctaggaggttcctgttgaaaagagaatgaagcatatgggctgggtgcgcacaagcatgagttccgagccggtggaaaaaaaggttctagaaggcctctttcaggaaaaccctcagactttcctttgctctcacaacacaacaatcaacacagaagacttatgtggccaaaggtttgggtttttcccctccacactaagcagcagacaccagctgggtgtcctccaattcaatcccaacagtatctacctggagatagtgtcagatcccataggttgagggctcagtccccaagaccgcccccaccttcagacagcaatggcaagtctgggcctctgaaacttccgaccaacccgcttcaagttggggttcccacgacccccctctttggattatgttaactcactggagcagttcacagaactcagggaaacacattcaccggtttcatataaaggatatgaccaaggatacagatgagatgagcagggtggggaatggggaagaagctccgaggttccttgcctaccctgggccaccaccctccaggaacctctacgtattcagctgtcagaggctctgcaaaccctctcctcttgggtttttatggaagcttctggacatcagcatcccttcccccagggtatatggtgggaccttctctgggaagggacttaagacccataatcagaaatgtggaaggagattagagtcctgctttggggcaggtaaaaggagggcaggagaaggggagagtctgtttcctgaggcctaacacacccaacattatcacagaacattgtaacaagggctataggagttacgacccaggaactgtggatgaaaaccaatacatatatatatcataacaccacagcctcctagaggaaagtgaccgtggaagggtctggtgagagctggcgggagacaagagtgcattccacgcagcccaaaagccttgcgtgctttgagaacagcaggtggaaagtgggtaagcggccactagagggaattaaacagcttcggacagcggactcggcagcgcagcaagaaagctccggaatccggattcgaggcttcccgggctgcaccggaggtctccagcagagggcgcgattccgcccgctggccttaggtcgtcagagcgccggcgcgggaagcgcttccgggcaggggcggggcttccggcggcgcctcaggtcgcggggcgcctaggcctgggttgtcctttgcatctgcacgtgttcgcagtcgtttccgcgatgctgcctctgctgcgctgcgtgccccgtgtgctgggctcctccgtcgccggcctccgcgctgccgcgcccgcctcgcctttccggcagctcctgcagccggcaccccggctgtgcacccggcccttcgggctgctcagcgtgcgcgcaggttccgagcggcggccgggcctcctgcggcctcgcggaccctgcgcctgtggctgtggctgcggctcgctgcacaccgacggtgaggtttagcgggccgggggtgtggtttgcgttcaacagagggaaaacgtagaccaggaatagggcctgcaaccgacctctgaggtctgggacatttttccattgattggcaaccagcgggctaaacccacgtatgatcatatttcccccacctcccctatccagcagtttcgttttcttttggtagggggtgaataaaattaaatactagggtacctttttccttagtcttattctatcgaaagtggacctttgggaaggcccatggtcgtggttgaaaatagcrtagttatatcgtttggcaagtggaagagkattggaaattctcctggtttatagcggaaagtggtaatgcgttcattgttggaaatcacttttccagaatcaggctcagcttcctactactattayggtatttttaccgataaggaaacaggcttctagagtaaccgtaatagcagagagattagaaacagtccaggtttctggctgcaataacctgggtaatagttttatgttttagactaactggctttcctttttatgtatctggatttcttttctaggagacaaagcttttgttgatttcctgagtgatgaaattaaggaggaaagaaaaattcagaagcataaaaccctccctaagatgtctggaggttgggagctggaactgaatgggacagaagcgaaattagtgcggaaagttgccggggaaaagtaagtactggtctggggatcccagggcagcaactcccttaaccttgcrggacccatcctgggtcatccccagaagagccttgagttcaggtgtggatactttgataaatgggtttcaagagagtgaaggatwcatttggacaacttcgtaagccccaggcagtccattcaccgaacacaaatttgctgtgggctggttactaaggagacaaaaatgtagtgcaaaaaagtactggcagaatcagtttgatctctgatttacagccctgataaaataggacactgctctctaatgtttagtatgggtgaaaatgaaaaatatgtaacttctatgtaacaggatggggttacactgtagtaagggctgccatcagaggtggggagtttgtgacstaagtcagctcccccatcatctcctaaactgttaaagtgtttacacttttctgcattatagtcatccataatctcattacacagataaacatttggcatcttccaggtttttaaattgagcctgggcgcggtggctcacacccataatcccagcactttgggacgggcagatcatgaggtcaggagaaaatcctggctaacactaaaaccctggctctagtaaaaattaaccgggtrtggtggcacgtgcctgtagtcccagctactcgggaggctgaggcaggggaatcgcttgaacctgggaggtggaggttgcagtgagtcgagatcgcgccaccgcgctccagcctgggcaacagagcaagacgccatctcaataataaataaataaattgaatttccttcataattgaccttatgatgtgtatgtaatttttttaaatcacagcttttatgagatttaattgagatggcatacgatttacccatttattgaagtttattaaattaagtggttcttagtcctcgcagaattatgcatcagttatcactacctaattctagaacactgttgtcatccccaaacaatacctattagcagtcactcattattcctccctgtagccaccccaggtaatcactaagctactttctctatgggattgcctcttttggacatttcatataaatggagtcatacaatttgtagcttccccccccaaccccacggagtcttgctctgtcacccaggatggagtgcagtggtgcgatcttggctcactgcaacctctgcctcccaggttctgacaattctcctgcctcagcctccttagctgggattacaggcgtgcgtccggttaatttttgtatttttagtagagacagggtttcaccgtgttggccaggctggtctcaaagtcctgacctcgtgatccgcccgccttggcctcccaaagtgctgggatttcaggtgtgagccaccctgcccaccctatttacctttttaattgttgggttgtaaaagttaagtttttctgggtacaactatcttatcaaattaatgatttgtaagtactgtttcccatcttgtgggtttccttttcactttcttggtaatgtcctctgacacaaaagtttttaattttgaggaagttcagtttacctatttttttggtcgcttgtgcttttttatttattttttactttgcttctaattcaccaagtgcaacttgtgcttttttagtgtcacgtctaagaaaccactgcctaacccaaggttgtgaagatgtatgccttaattttttcaaagttttctagttttagctcttagtttaggtctgtgattcattttgaatatggtgtgaagtagggtcctgattctcttgcctgttgcatagtgtgtttttgccctacacaggtcaattgtgtcttctgtaatctcacctaaacaccatttgcgcaaggttttcatagctatttgggggccattaaaaataatgctctgatgaacgtcattcaatttctgtgcccaggagctcagcttagtcagcacagttggaattagacagattttgtcaacctcagactgcctctgttgccatggaaaggtggcttcctggcagagcagctagttagcacaagtggagggcggcacttcatgtactcttttttttttttttttttttctgacagagtcttgctgtgtctccaggctggagagcagtggcgtgatctcggctcactgcaacctccacctcccaggttcaagcaattctcctgcctcagcctcctgagtagctgggattacaggcgcgtaccaccacgcccagctaattttttttttttttttttttttgtattttttagtagagatggagtttcatcgtgttggccaggatggtctcgatctcttgacctcgtgatctgcccacctcggcctcccaaagtgctgggattacaggcgtgagccactgcgcccagccttcatgtaytcttgtgtggaatggtgcctgccagagttgcatagcccagcagttttggttctaaaccttatgtcccargaattttgactcaaactttggaacatgatttgtcaggtgtggattcttgcaccttaaaattgtcactagttggtgtgtctggcctgctttgtgattatgaaacttcccacaagtactctaagggatgagtctctactacagcccttgttctttgtgaggcattcccttcccsgttccagggctgctctcggtgtttagcagaggcascctccatcgcttcttcctttccttgcagggcaaattttctgacggggaaagtctcttaaaggggcttctgttccatctcaccagcctctcaggtccttactttgaccaagggttccctggaaagaccagggtgggcagtgtcagctggctgtggccatgagatgcccagtcagcacatggcagtgagccctggggtactggccctgttgggagtaacccatgcatgacttgtttggctgagataaactgaggccagctttggcttccagcagctggtacatggtaggcacacttcagacctgctgagtcactcaggattggatgtaggcacccagcctagtttgaagttctgcatataattcagccagctaggacagagacattgtttcaatacgcctttttaactgtagcagatttccatgtttatgtgttaacctgctcggttaaaaccatgccttgtctgttttgccttgtctgttttcccttgccgttttagaatcacggtcactttcaacattaacaacagcatcccaccaacatttgatggtgaggaggaaccctcgcaagggcagaaggttgaagaacaggaggtaagctaatactataatcagcttttacctcagttctgacaggctgtgcctggggcttagaggaggagcgtttttctttggtctttcaaaaaaaaaaaattcctctaagtccagtcgcatggctcacgcctataatcccagcactttgggaggccgagacgggcagatcacgaggtcaagagatcgagaccatcctggccaacatggtgaaaccccgtctctactaaaaatacaaaaattagctgggcatggtggcaggtccctgtaatcccagctactcgggaggctgaggcaggagaatcgcttgaacccgggaggcagaggttgcggtgagccaagatcacaccactgcactccagcctggcgacagagcaagactctgtctcaaaaaaaaaaaaaaaaaaaaaagagagagagaatggcaggggcataagagactttaactggatcatgcctactcttcaaacatttcaggaagtgctgtgcccagcctagtaaccagccagtatgagggccacagagtccctagacattctgcccaagagccatcagtacagtgttgggtcatgacctggtgtggacggcgcagctctctggtgtgctgctttcccagccaccccaactagcatctccctgacgttggacccagtctgctcccagagctccgcatcagaggaaaagctgctgctgttattcagccataaggatggccaggttccccagcctttgaccctggtcccttatgaagactcctggaacagtcaagctggaaagagatcttgaaactttaggaaagctttgcagtgtacgggtggaggaaaaggcttggaatgttaagggactgatataaactcagttaattggcacatagctgaggctggtatccacatttcttaactgaaaacccagtgtgttatttaaccaagcagggtgccaacagaagtgagatcaagctcttcatttgggaatagtatggcataagactattcaaatggctacataatatcctaatagtggtggccatcagacactctgaacagagatccttgatccagscatccatctccttccagcagcagcatgtattgacttcttgtttccccagcctgaactgacatcaactcccaatttcgtggttgaagttataaagaatgatgatggcaagaaggcccttgtgttggactgtcattatccagaggatgaggtatgcaggatggagtgctagcctcttggcacccctggggaacagtgtgtcccttgggaacttcctgtccctattttagcagaaatttaaacacttttctagcttagaccagcccagcagggggagagaggtggggagtgagggaagagggttaaaacctgatgagtttcatgctgtcagtggccccctttcttcccmtgagtctagcttgtcstggagaacccttcagtttcccaatattgtttcttctcaggttggacaagaagacgaggctgagagtgacatcttctctatcagggaagttagctttcagtccactggcgagtctgaatggaaggatactaattatacactcaacacagattccttggactgggtgagtgcttgataaggtkggggaaccttttgggccttggaaggaagggtcctagttcaaggggagaaaaaagcattttaatgttcattacagakttttttttaactagtaaatattgttctttgcaggccttatatgaccacctaatggatttccttgccgaccgaggggtggacaacacttttgcagatgagctggtggagctcagcacagccctggagcaccaggagtacattacttttcttgaagacctcaagagttttgtcaagagccagtagagcagacagatgctgaaagccatagtttcatggcaggctttggccagtgaacaaatcctamtctgaagctagacatgtgctttgaaatgattatcatcctaatatcatgggggaaaaaataccaratttaaattatatgttttgtgytctcatttattatcatttttttctgtacaaatctattatttctagatttttgtataacatgatagacataaaattggtttatctcctccaaggcagtttgtctttttctattcctcccccttcaacctgygtcacaaaagaccaagaacagatgtcggaaaagtttttttttcttcagtattgtttaaaagtttcaatacaaaataagttataaataaaaggcttgtatgtacaaggctcctcagagggaatgagttgtcttcaaccccatagaatgatgtgagtccaagctggctctagaggatcacagcccaagtatcacaggcctaggtttaaacaggaaaataattagcttaaattgtattctagtcatgaaagatatctgataaaagttgtaatcaatgagaattctacacattagatgaggtctcctgagtccagtttcaattagttcagtagtgtagtttgtcatgatgaccgcccctctttggcattgctggacctctgtcctgcagccttcaaacaactgccctgggaaccatcagcatcaatagtcttcaagctaagatcaaatcctgtagatgaactaatcaaacatcctcaccatcaggaaaccactgaccagaaagattgtattcaaactcttgatagcctggagcttttagagcccagcaggaagatgagactccaaatctacacaagattgaagcaggtatgtatcataggggaggtgcaaaccatgcatgatcagtacgggcagaaaacatgtaaagacatgatcagtaagcacctgagtgtaaaactgcctcccgactcctgggtggctcagcctctccactatgctaaggaatccagtctgtccttaacccatttatgccagaggttgcaaatttttttgtgtgaaaaatcagaccttggcgatgaccttgagcagtaggggatcaataactcccacaggcttagcgttccaataattaaacagtaggcataagtgggttactcttgtttcttaccacttccacaggtaatatgtttggctttctctaaaagacactgtaactctgctaataggcggtttggcatattccatcccaggaccaccacttgagcaccgccacatccgaaacattcctcgtcttgtgatagagtgcaatcttctgtaacccacccctatctttcaacacatcctcagccatctgtcctgagcgtccctacgtcctgacctcactggattctaacacaatggtccttgattcccccttaagtgaaaaccaaaggtctagtggaactagagcattccaaatgtctacctttccaaatgttgaactcaagacctacagaatacaattttgtctttccccctcctcttttttttttttttttaaggcacaatctcgctgtcacccagcctggagcgcaatggcgccctctcagctcactgcaacctctgcctcctgagctcaagccatcctcccacttcagccttccgagtagctgggagtacaggtgcgagccaccacacccagctaatttctgtatttttagtagagacagggtttcaccatgttgcccaggctggtcttgaattcctggcctcaagtgatcctcccacctcagccttcctaaatgctggggttacaggtgtgaaccacagtgcctggctgtgtttctcatatttgctgtgacccccacctcccctcacttacccaacaatggtcttcctgcccaccccagagccggcactgtcaactatgatctccaagactgctgcacagcactcaccttccaaacctcacctcctacttagcttcactgctgctctgagccacagggcactgacggttaggtgagtggataactggggtccataacaattatatgctgagctgaagctgtacacttggcaattaggccatcttccacttaccttttaattccccttctcttcccccgaccagcattttgtctttcacactcaaggggactttcatactcaaggagctgtagactccagctctgctaccattataatctgtgtggatgactcactgttcaccttactaagaagacagaagccaaagccagctgacctgtgcctcaactctcctccctccaccttaactcatttgtacaaacatcttaagcacctctttattaatatatgccaagcactggaaataaaaataaatatgggccttgccctcaaggacaaagacataagcaggtaactacaacactgttacaggtgacatggcatgaggtacggtgaaagcccaaggagagactggccagttcccctctgccagccctcattaggtttattgagaatggtaacacagactccaaaggaatggacttcccaggctggccaattctttttttgtttgttttgctttttttgagatggagtttcactcttgttgcccaggctggagagcagtggcgtaatctctgctcaccgcaacctccgcttcctgggttcaagtgattctcctgcctcagcctcgcgagtagctgggattacaggtgtgtgccaccatgcctgactaatttttttgtatttttagtagagacagggtttcatcatattggccaggctggtcttgaactcctgacctcagatgatccgaccgcctcagcctcccaaagtgtggggattacaggcgtgagccaccgcactcagccaccaattctgtttttgagacagaatctcaccctgttgcccaggctggaatccagcagcacgatctcagctcactgcaacctccgcctcccgggttcaagcgattctcctgccccagcctcccgagtagctgagattacaggcacccaccaccatgtccagctaagttttgtatttttagtaaagatggggtttcaccatgttggccaggctggtcttaaactcctgacctcaggtgatctgcccacctcggcctcccaaagtgctgggattacaggcgtgagccaccgtggccagctgagactggccaattccttgtgaggaatcaggctgaatgaagtacacggcatattgtagtgcttggtaaatatttgtgcaaatgatccttaaatgtagtgggaggagtcaaagtcattcagacagaacagcctaaacaacagcacagaggcctgaaagcactgcatatttgagcatctgctaccagtgctggatagctggaacagaagggaacatatgcttgtagtcaacaggaagtagtgaggggttttatttaaactttcacctgctatgtctctttccatacaagctgatggaaaatggcatccttccaccaaggcctgagcctggagcaggaaacagcaggggcactggaaccacaaagacctggggtctaacaccagctctatcgcttattagtagtaaaattttggccagattacatcacttctctgaatctgtttcctattcctaacaggaactatcctctccctcatgaacctaatgctccagctaagtagaacaagatgctctttgtatatactccagtttcctgcttctctgccttgttcttctatgtggggatcttccacttaagctctacccccacaactcaccagatctccatgtctgtccagatcgattccatgcttcaaggccaagttaaatgcctcctccaggaaggtgtcaccataaaggagatcaccctcctctgaactcccataagccctccttgtacagctctccagggtactgcctgtttattctgttctcttattaccaacccaaggcttgagctctgtgagagatgtgtatttctcaatgttaatgagtcctcaattcattttttttttaatgaatgagtagaatacctatggaagaaacttgataaaggtgaaatggctgttaccaggcaatgctgcttataataaaaatgacctctgtaggttaactgcatttggaatgacagggccatgaaggaattctaaattcccagtagaaagccatggctatgaacttcctgaagtacagtgtgctcctaatcccaaggctccccctgcctgggatctaaaagcaataataatacgtatcatattggttttatgtgtgtttgtgtgatatatatacacatgtacatacatacatacacatatatggaaaggacatggattataagagatattggttcctatagcacgcttctaagacaggtggttcccttacccacttgtgttcctggccctcacacctcagttgtcactcaggttagcgaatagcccttggacctctgtaaaaactccactgacagacaaacctaatgctgccctgctatgcttctgccctgtttccttccgcaaaagtggtgccagcatggcctatctgggtcttatgactatgaaatgaccagctgaatccaaaaccactactactgatcaaagaagagcaggtgtggagccaggcgtcctaactcccagaccaatcctcttgccgtgatcccatgctgcctcttcccttctttctgactggcctttgagtctaaatgacttgttaccttcacttttctatgcaggtaaattcctcagataataaactgcattaaacatttacctgtttataggtcattatttctatcaaggtgggaataaaaccaaccacaggtccctcttaccacagagtgggtcccaggagacgcttaccagacagctcatgagaagactggacttttcttctgttcctccagtgactgaaaattcaggtgtgtggggacaatgtgcactgtgctcatttatactaccctctaaacaggcacgaagcttctgctctgtcaactcagaagactacaaaataaaaaagttcaacctcctctcagtgacttgatagccaacagatggaaaatcctcattcctcatgccaaccaatataaccgtggctcactgtgatggcttgactccttggagccttaaagacactcgggcccatgactgtaccaagatctcttaacccatctccatttaactgcctctccagattaaccaacgccctctactcctgctgtcaaacacactgatggccactcatggcaggaagaacgctcagagattgtaggctactttccagcctccctctgcctctgcccccaccagctgagtgcatccttaccaacaactagcagtatatgctcccgggtctgcttgggttacttgaacttcctactgtaactcagtaatgctaattacttattatgtaaataataagttttatttttatagtgataagtagaatgtttaggaaacaaacagatgagctgcttaaaaaaaaaagaaagaaagaaaaagagctatagaattaggtaaaagatggggaggaaaaattcctaagttgtatactcagtttcttgatccactttatggaattaaaaccggaaactctggactatgtattatagaagttgtttatgtaaaaaaggtgactcagcgaggcacagtggctcacgcttgtaatcccaacactttgggaggccaaggtgggcagatcacctgaagtcaggagttcgagaccagcgtgaccaacatggtgaaaccccgtctctactaaaaatacaaaaattagccaggcatggtggcacgtgcctgtaatcccagctactcaagaggctgaggcaggagattcgcttgaactcgggaggtggaggttgcagtgagcagagatcacaccactgcactccagcctgggtgacagagtgagactctgtctcaaataaaataaaaaataaaacaggtgactcagctctccaatcagcagggccccactcaaaggctggcaaataaatttatgtgtttgaaacttaccataaaacattttatttttataatttgcctctttaaccaatcgctcaattaactggcaaacttgcagtccccatcatgccagataaaagggctttttctgtattttaagattactgaaggccgggcgtggtggctcacacctgtaatcccagcactttggaaggctgaagtgggtggatcacgaagtcaggagttcgagaccagcctggccaagatggtgaaaacccatctctactaaaaataaaaaaaaaattagccgggcgtggtggcaggcacctgtaatcccagctacttgggaggctgaggcaggagaatgacttgaacccgcaaggcagaggttgcagtgagcctaaatcacgccactgtactccagcctgggcaacagagtgagactccgtctcaaaaaaaaaaaaaaaaaaattactgaag

SEQ ID NO: 97469 - DNA, 14881 bp, Homo sapiens
tgtaacctttgcctcctgggtttaagcaattcttgtgtctcagccttctgagtagctgagactacaggtgtgtgccaccacgcccagctaattttttttttttttttttttttttaagacagagttttggtcttgttgcccaggctggagtgcagtggtgtgatctcggctcactgcaacctccatctcccaggttcaagcaatcctcctgcctcagcctcccaagcagctgggattacaggcatgtaccaccatgcctggctaattatgtatttttagtagagatgcggtttcaccatgttggtcaggctggtcttgaacccctgactttgtgatccacctgcctcggcctcccaaagtgctgggattcaggtgtgagccactgcacccagccttgtatttttagtagagatagggttttgccatgttgaccaggctggtctcgaactccagacctcatatgatcctcccacctcggccttccaaagtgctgggattacaagcatgagcccccaggcttggccagactcttgaatttacccagttaatgtgatgtcatttcacaaaaataataaaagtcttatgtccttctttgggaaagtacttactagtaaacaaaatttaactctagcttggagacagaagaatttaaacttaaacctgaattaaaaataaagaatttgagcaagggaatagtaggagaaagtatttcagaaagcctattttgactttgagatgtgggatatattgaagggaaaaggggagagatagtaggagtccatctagtgcaatacttagatatgagaaaaggtgaaggtaataaataggttataacttgtctctgaaagtgcacttttttggaatgaaaacttaaattaaaaaaagcttggaggacatgaaaagaaggagaagaaccagtaggaccttgatcaaatagatcatgagaggtaaaagtgaacagttgatttaaattatgactacagtgtttttattgactgggagattatagaagtcataacaataataatattgaatgagatgatgatgatattagcagttactactgtttattgagtgtttactgtgcatgcaatgctaagctgttttcttcaaggattatctcatttaatatgaatttggtgataaaatttccatttttatagatgaagaaacaggctagataagttaacttattcaaggttgtatgtcataagtatcagaggggggatttgcagccaaagatatctaacttcaaagccttttcttaactaatttactgaggaagagagaagctgagtttgtttttttggtcttagacatgtctaaatttgtatgatgttttgtatggtaactggtggatatttttagacagattgtagagagaattggaactcaggttagcaattgttaacttactgacaaaaagtaaaatactaactagtagacccaaatttctatcccaacattttaagttaagattgtatacttatttcaaaacaaatttttacttagatgtgctttgagttgtggagtatccaacaaagacactcactgtttctgtctttaagataaaatttagaataatatatatatatatatatatatatacacacacacacatacatacacacacattttatacacacatatataatcttatgtaatacatatgtgtaatcctagcaggtggtataacatcttaatcagaaagtatttaattgaagtttggactatgaggagtgtcagacttgattatcctttgagaatgtcatttgcttataagaacgtaatgtgatttatagcaatgtcagaatagtccagatgttttaaatggaaaaaattgagtgtacattaattttgcactgacctgtagttctgaatttacctttttgtgaaaattcttcgttcttttcttttaggttgtaaagctctctgaaatagtgaccttagcgaagcaagcacatgtggatgtgaaatttcagttgccaatatgatctgaaaacccagtggatggctgaaggtgttaaatgtgctataatcattaagaatactgtgttctgtgttattgttctttttctttttagtgtgtggagattgtaattgccatctaggcacacaaacatttaaaaggatttggactgcatttaattgtaccattcagaatggactgtttgtacgaagcatgtataatgcagttatcttctttcttttgtcgcagccagtcttttttgcttctcctacaaaacgtaacttgcaatttgccagtttattattgttggatacaaagttcttcattgataagagtcctataaataagataaatacgaagataaagctttattctttagtgttaaaatacagtatatctaataactagcctcattagtagagcagtatattaaaacaatgttttatgtaaaaagtgtttatcttcagcaccaaatacatgataaatgtatcaatcactatttataaacagagctttcaaacactcctcagaatattcttctaagtattttgatgaagtaactttgtaattatttgaacattgttttaatcattaggaaacactgattaactgcaagtcttcatgattctgtcatattaagaaacacctgtaggtttgcttcaaataaaggcatatataccaaggacttacagacaaaattaagaatgtcaatttaagttaataaaaatctcccaatatgatttgggttcatggcttttgtttgcttgttttgaggtaaacacagtagaagttgatttgttcgttattgcagtatagaggtctaagcaccaattcttagatcatatacttgccatgacagtgatttgtttttttttttgagtcagggtctcactctgtcacccaagctggagtgcagtggtatgatcatgctcactgcaacctctgcctcctgggctcaagcagtcctcccacctgagcctcctaagtagcagggactacaggcacacaccacaaaaaaacatatgtgtttttttttgtttttgatttttgttttttttttggtagggacagggtatcactatgttgcttaggctggtctcttactcctgagctcaagcaatcctcctggctttgcctcccaaaatgttgagattacatgtatgaactactgcacccagccaaccatacatattatacagctacttatagatagatagttcactggaagtctgctatttatgtgtatgccatctagtatatcctctaaaggaaacagaggggagaattgaatccaagatgcctaacttcaaagccttttcttaactattttactgaggaagagagaagctgagtttattttttggtcttggacatgtctaaatttgtatgatgtttttgtttttgtttttgttttgagatggagtctcgctctgttgcccaggctggagtgctgttgcacgatctcagctcactgcaagctccgcctctggggttcacaccattctcctgcctcagcctcccgagtagctgggactacaggcgcctgccaccacacccagctcattttttgtatttttagtagaggcagggtttcaccgagttagccaggatggtcttgatctcctgatctcgtgatctgcccgcctcggactcccaaagtctgtatgatgttttatatggtaacaggtggatatttttagacagattgtagtcacatggttctttttgtccatatatgtaaatatatgtgtgtgtgtatatatacatattgaccttttgctcactgcataaaacttggtagttaactaatgccatggaaggaaatgttgaccaagcagtagactatttaaccatactgatggatttaagaacttctacctattgtgatgttcttaaagtgtgatcagatgtatatactatgagaggcagcataacgtagtgatgatgagtacagactttgaaagtagactgtctgctttgaatctggatccactacttactagctatatgagggcttcttttgttttttgtttttttgagacaggatctcagtctgtcaaccaggctggagtgcagtggcacaatcatgactcactgcagtttcaatctcctgggttcaagtgatcgtcctgcctcagcctccttttgtagctgggactacatgtgcatgccaacatgcccagctaatttattttttatagagatggggtcctgctacattgcccaggctggcatcaagcagtctttctgccttagagtaagttttaatgctagtgtccctcagtttacttagctcttttcttatcagtgaagtttatttagtaagggaagagaacaaaaatatgtgagagaatttatatgtagaaaacaatatgtatttttagccaaatatatatttggtagtttacatatatatgacacagagtatcagagccataaaccatttaaaattgtagccaggtgcggtggctcacgcctgtaatcccagcactttgggaggccgaggtgggtggatcacctgaagtcaggagtttgagaccagcctggccaacatggttaaaccctgtctctactagaaatacaaaaattagccagacatggtggcgggcgcctgtaatcctagctacttgggaggctgagagaggagaatcacttgaacctgggaggcaggcggaggttgaagtgagctgagatcacgccacagcactccagcctgggcaacaaagagcaaaactccatcttaaaaaaaaacaaaacttgtgataattaaaagtccagtcatttagtttttactttttaaagattcattccaaagaataccagccagtgattaactaagattggcattatttgtattatttgtattattcaaggtctacttaggagttaaaaacaatgcttggtatatcagagaggatataatacagattattggtaatactagtgttttagttatctattcttgcataacagattaccccaaacacttagtgagtttcaaacaacaacatttactatctcatttatatctcatatctgtaggtttgggatcagtttagctgggattagttcttgtgctgcagttattcaaaggtgacactgagcctggatgacctacttccaaggtggctaacttgtatggctgttggccagaggcctcagtttcttaccatgtggacctatccacagggctgctcgtgtccttgtgacatggcagctggctctttgctgcccgccccctgccccccaagccacagtgcctttgtgttctagtctcattgtcacttctgctgcactgtttattagaaaatccagcccacaaaggggagggaaattaagccccactttttgaagggagaagcatcaaatattttgttaacatttttcaaaaccatcacaattcatgcttggagactgaaagaacaaacagtggatgttgagttaactcagagtttagtagctgctaggacagaggtggtacttcgaatctgctaggagtttggaagacgtctgatgcttggaatgcaaaaagaagagtgcatggctttaaagtgtttcttaagtgactgaaggggaaaactgtaacaaaattttagggaaggcaagggaaaaatatttcaaggatagagtcatcaatggtatctaatgcagctcagaagtcaagtatagtaaggactaaaaagtaaccagtggaattgaaactaactagtcttggcaagaatggttatggagaatgattgtggagaatggagacttgaaacaaccagctggtagctacttacacaccttcacacctcatttcctaaaacacataaaaccttgagtattctttatgcagtgctgatacttgcttccttgtggccctacccgcttcatatgaaaaaagcctattttaacatttgagttctctaaggtatagttgagtagatactaaatactatggtttgtaccaagagtataaccaattttgactattaaccttgcagttgcaaagcctagaccaagccagcttgattctggcacttggtagcagatgcccatgaaggggaaaaataagcaggcaaaaaccaaaaaacagaaaccaactctcaaaactccagcagarggcaatgaagctgttaatattttggtgagttgtttccatctggcaaagaattctatttagagaagttgcaaggccgggcacagtggctcatgcctgtaatcccagcattttgggaggccaaggtgggcagatcacgaggtcaggagatcgagaccatcctggcctaacacggtgaaagccgtgttaggtttctaaaaatacaaaaaattagccgagcgtggtggtgggcacctgtagtcccagctacttgtgaggctgaggcaggagatggcgtgaacccagaaggtggaggttgcagtgagccgagatcgtgccactgtactccagccygggcgacagagcgagactctgtctcaaaaaaataaaaaaatgaaagaagttgcaaaatgatggatgtaaatgttggatggtgggtcaagggtagaggtctgtagttagtcatactcttttgtcctgtcaaaatgtaaagggtgaggaaagtcctgtggcttttagatttctataatttaacgtgtagtggtaaaacagatttagaggtttgcagtataaaatgaggaaaaaagtaggctgggagcagtggagcacacctgtaatcccagcactttgggaggctgaggcaggtggatcacctgaggtcaggagttcaagaccagcctggccaacatggtgaaaccccatctctactaaaaatacaaaaaccaggcatggtggcataaaataggggagattatcctggatttccctgcaggcccagtctaatcacatgaacccttaaaagcaaagaataatccacagctggaggcaacaattcaatgccctgttgctgcttctgagatgtagggtttgtgtgcaaggactggagagagacctttagctgagtgtggctgttagctgatagcgagcaaggatgtgggggtctcagtcctacaagtgcaaggagctggcttttgctagccatctgaatgcattctgaggtaggttcttctcacagcctcctgatgagagcacagctcactgactccatgattttggttttgtgaaattaagcagagaaaccagccaagcctatccagatgcctgccctacagaactgtgagataatacgtttgtgttgttttaggctatgaaattgctgctaatttttgatggcagagttaggaaatttaatacactaccatatttatgcttctgtgcataagttataataagccagctcttaaactgagaggaaagatgagtttttaaaaataagggccattttttttaaattggaaattaaaattctataatggactgattcttttataaaaaacaattactagaaaagtgaaattttcaaaaagcacagaaaagcctcaattcttttattcatttatttttgattctacaggataaaattgctctttcaaactgctgtagaagtttctaaatattttaaaatatctgtttatcacttgcagatttgtgatctgtttgtggactggcatcagtccacagataacattttgagcaggactgaaaaaagcaccatcacatccaatttgtgaagatataaacacaaattggaagtaagctataaacaaatgtctagggataagagactcagcattgagtagttgtgattaacattatggtactcatagctatgtaaatctgcgaaacaattgccattaactaaagaagtcatgactgttgggtgccctagagtctagtcagcactaatacagtaacacagaaatcactaagtttagcaagttgggagaagtattgaaagggccaggagtggcctaagcttcctggttcatttgttgccaattatattagtccattttcacactgctaataaagacatacctgagactgggtaatttatagaggaaagagttttaatggactcacagttccacatggctggggagacctcaatcatggtggaaggcaagaaggagcaagtcatgtcttacatggatggcagcaagcaaagcgagagcttgtgcagggaaactcccccttataaaaccagtggctcacgagctgtaatcctagcactttgggaggccgatgcaggcagatcacctgattgtcaggagctcaagaccagcctggccaacatggtgaaaccctgtctctactgaaaaaaaaatacaaaaattagccaggcatggtggtgtgtgcctgtaatcccagctactccagaggctgaggtaggagaattgcttgaacccaggaggtggaagttgcactgaaccgagattgtgccattgcactccatcctggtgacagagcgagactgcatctcaaaaaaaaaaaaaaaaaaaaagaaacccaaaaagcaaaaaccaaaaaaccatcagctcccacaagacttattcactgtcacgagaacagcacaggaaagacccacctccgtgattcaattacctcccaccaggttcctcccacaacacatgagaattgtgggaacacagtcaaaccatatcaccacctaaacactaacatctattaatgtcttcaataggagttgattgaccaccagttgagagcctgcagttcatcagttgagagtgacaattccagagtgaccagctgagcatgtaatatgaaggaaactggagaaaagcctcaactactttatgattattcctatgatttgttcttaaagcagagaagcatctttttatttgtttttgatatccttgtttgatgaaaccagcatcgttttagaaaaaatatctttgttttagtaaaaatgacacatactcattgaaaaaataaaccccttcaaaactggaatgatacaagaaagtgcagacaagtaaagatcacctgcagtgccagaacccagaaataactaatgttaacagttttgtaaacaatcttctggtcgtctctaaatatgagcatatgtggatagatatgaatacacttttatataaataggatcataaacataatgttctataatctgcatttcttcaaataaggatctttccatggcatcaaatataggactacataatttttaatagctgcacatacaagagaatgtgtatatcatggtttatttaacctagccttgcaattattgacatttggtttatatgtctttaacattataaataataggtgaacactctggtgcatatgtctttcagcacatgggtaatttctccttagggtaaaaacctgtaagtggaatagctgtgtaaaagcatgaaccgctttccagaaagtctcttttggttactcttccattcataatgcacaataatatttccatacttgataacattgtattgctaattccaatgggcaaaaaccatgtcctgtttaatgttgattgagctttcatctgttgactgggcatttgtgaagtgtatgtgtgtgtgtgtttgtgtgtgtcagcgtgtgacttccttttcatgttctttttttttttttttttttttttgcgacggagtctcgctctgttgcccaggctggagtgcagtggtgcgatctcggctcactgcaagctccgcctcctgggttcacgccattctcctgcctcagcctcctgagtagctgggactacaggcacccgccccgctaattttttgtatttttagtagagacagggtttcaccgtgttagccaggatggtctcgatcacctgacctcgtgatccgcctgcctcagcctcccaaagtgctgggattacaggcgtgagccaccgcgcccagcccttttcatgttctttgactgtttttctattgactgttcattcttcctagtattaataactttttgtatatttgagattaaccatttttgcctattatgtattttatatatatgtcatatgtcattttaaatataatgaaatgtattagtctttgtggtttctagttttcatgatatgttttgaaaggcttaattgttttgttacaaagtctgaacttgagttatgaatgcaaatttcccctctcaaatgcctaatctgtttcccaaacaccatttacttatcccttaagggatttacttttccctatttgatctatttcccaccaattttaaaatgtcatctttatcatatactaacttcctgtatgttcttgcgtgtatatgaaactggcacatacagggagactctttatttaacttttacttaaagtaggaggtaggaaagagatctgttgaaaccatgacagagagtgttgcagcgcctgtcaaagttatccttgcttatttgtagaaaaattgaactttccattttcctaactttcaacttgcaattgaatgacactgattctactaggaaaaaagtaaaagctatactatttgatgccagatgtatgactgtgggctgatgaggaagaactggaaacaaatgacaggtgattcactgctttgtgtctggtgtgccatgactctcttgaaggggggcagtgttgatctgaatctttttgtctaatgctttttcttcctctgggagggatgctgaagaggggcagctgaaggagcagtcttaagcaaattggtcatggctttcttaaatattgtgattcgattgatatggaacattttttcagtctgtgagagacttttcattatggactagctcataaaaaaccgtagatttaatttgcccaggctgttggttctcttgtgtttgttatcatacgtcagcatgaaacctttggcctttgtggaagccttgtggagaccactgaacagacttggagccatatctgactcgcctgccagcattcctgatgttcagtgcctgttattgcccctctccatggcattctcctctgtggttatgtgaaaggaaaataaatcactaagccaagggaaaaatcaaactgggagctatgtcaggcaaacctgcctcccattttattcctaaataacatagctacatacctccctcgcaatttgccacagatcctcgtccacaaggaaattcactgtggacaaaggacagacagaactcaaagtcatccctctgagactcacctgagacaaatgcatatctgattgcttcctttgccctattgtttatgtaaaaatgcagattcactgagtcagactaagttgtgtattgagtggaaggctcatcaggactcaaaagaatgcacccttaatgtcttttatctacttctaacctggaagcccccacattgagttgtcccgccttacctggccaaaccaatgtacatcttacacatgttgactaatgtctcatgtctccctaaaatgtataaaagcaagctgtaccccagccaccttgggcacatgtcgtcagggccccctgaggctgtgtcacgggtgcctccttaatcttggccaaaaagacaaaagaaaaacttactaaattgactgagacccgtctcagatactttgggttaacagttaggttctaccctttgatgcctgtttacttgactgtgtactgagaccagttgcttcactgaacattaataccacaacaggcaacgattttgttttgtggtagggtacttggcctagtgcccattttgtagatgtgtcattgctgagaaggcagaacagtaaggggatttaaaaaatttatacactgttatacattgtcactgaaatgccaaatgatttagcttttgttattgtcactcagcctgcttacttgagcagggtttggcaagccagtaatttaggggacttgtgagtgaaataccatgtgaataaagtccattgtttccttagttagaaaaaggctaattgacttacatgctgtttctgaggtgaggaagttccattaacaaaacgaaaccaagccaaagaatccagtgtttctcaatttaacctagtcaaatatctgacatctctttgagaaatggatacccagtgtcaataatcctatgaggttaatggcagttaaacaatggtttgcttaaacagtaactggcaaatgctatagggcaaagcctatttgtggtgtagggggtgcttgcatcagttgatcggctatgctgtattcacttgctttctgaaatatctgtggcagggacaaaagttcctatttggtgctcactttggacttttatttttgtttcctttgcagttgcaaagatcttttctgtagcctcagctgatctaatgcagtggttctcagatttcagtgtacataaatcttttggatgcctgttaagcatacagattcctaggcccatacccagctattctaattcagctggcctggcaacaggcatgtttaataaatttcttaggtgattctaatgcatgtgttcctttgaaaaaaaattggattgggtcaggatgtaggagaaaaggaattgataccgttttatgcatgtgttatgtactagatctggttatggcaggatgcctcatttcagtggttcccttctaaaccccaaataccatgtccacctgttcgagacataatatccctatgtttgtgagaacctgtgcttagggaatgattccttcagtttgaagcttcttattgtcctttaaaatgcagatatgcaggaggagatatctttttatggcttagcacaatgctgctcaaagcgccagtctctgaagctctttgttcctgacttgcaaccaggtaaggatcttttgccaggatttaagtcaattatgtcatgaagcacactatttagttcatctgaaatatatttttatcttggtagcaaggtagcaagacttttccaatgcaggaagcttcagtgctttcatttatattctgatgtaagttatcttattgcagaccggtaacaaacactgtcttcacagccatttgagccttaggtatgaatggagcagctttgggtggagggatatctccatgactgggtgggaaaaggtccagaaagacaacattggagtcaccaaatactaactgttcactaggcttggctgttataaaagctgccataattcatgcttatggtttgactggatttcttttctctgcttagtatgcccttcagtagaagtgccaaaaaaaaaaaaaaaaagacaaacccagttatatagcccaaagaagaggattaagttagttatctgcagcctctggattgactgtgaagtctgtttgaaaatgggagtgttggccagtaaaatgtttccctaaaaaactcgaagctgaggccgggcgcagtgtctcacgcctgtaatcccagcactttgggaggctgaagcgggtggatcatgaggtcaggagatcgagaccatcctggctaacacagtgaaaccccgtctctactaaaaatacaaagaattagctgggcgtggtggcaggcgcctgtagtcccagctactcgggaggctgaggcaggagaatgccgtgaacccggcaggcggagcttgcagtgagcccagatagcgccactgcactccagcctgggtaacagagcaagactccgtctcaaaaaaaaagaaaaaacaaaacttgaagctgagtgtttctggggactctcatgagcatttttgaccatcaatttagaagaaatattctgatattactattgcattaccattattttatctagattaaattgcttcatttcttaaatggttcagtctaaatgggaagacttgataataaacaaataataactaaaaggattagaaagattctatgattctagaattctttcaagtacacagttattttagagatccacttccagtatttattcacttcattcaacaaatattaagtgcacacctcctatgtgccacacaatgtaccagggctacatggtatacaatgatcaataggagacatggtcccttatggtgtttgtaatgtagtgggggagatataagcaattaaatccaagtcaatgtatgaataaatatataacaatgaatcgtgaacctcatacgaaatgaaaaggcaaatagttaataattgtcagacataaatttcagttcagttgaattcagcaaatggtttttgagcatctattttgtgccaggcactgtgcttagtattaaggatacagagatgcataggagaacattcttgtcctcagatccacttggcactatacctgagtaacacctacccctctcctcaactcccatttgattttgttggttgatttgtgtaggtttggctatttcacctgctgttcattccacactcttagtgtgtaacagtgaggtagggctttctggtacctgtttgtctgcagatgtagaatcaactcttgtgtttgtgaatttgactcagagaaaatatttaaatgatttgacctttgagatgcccagctgagctgctgagcggacacagactcaacagaactaagaattgttgaacatctatcataaaattataggcttagattcaaagtgatcacaggatatgctcatttcttcccttcccttcccttccctccctcccttccttccttccttccctttcttccttccttcctttctctcttttctctttttctctttctctctatttttctctctttccttcctttctttccttccttttctttctttttttttttgctttgctttgctttcttctttctcagggtctccctatgttgcccaggctagactcaaacctctgggctcaagcaatgcccctgtctcagcctcttaagtagctgggactacaggcatgcaccaccatgcccagtttgctcatttatttattgtatctgggagtcttccacatgctaggcactgttctaggcacggggtaatagcagtgaacaaaacagacacacaccccctcccctcatgcaacttgcacctcacccaacgtttaacatatcctgacagtcggt

SEQ ID NO: 97470 - DNA, 48152 bp, Homo sapiens
ttctgattatgagtcagacactgtgtttggcagggaagagttcaaaatgtataagccaaaagaactgttctttatagattcaaagttcagtaaaaaaaataatgagcataatttgaagttgagttgaatttgagatgccttctgaacattaagggaagatacttagaaagcaactggaaacacaggcccgcagctcagaggagtgagattcaaaattataacttgcatcaggattccccaactcaaatccctacagaggctagacagggcaaaaagaggactgaagaatgaggaagcacccagaggtggcttggtgagaatggtcaaataaagcttgtgggacagtcagtgaccttggtgttttttctatagcaccttctctaaaaatgaaggctttctatatctgcttcctgtgaaggatactgaatttaaaaaaaaactattccatcatatttgtctcttctagtctcagctttatttgcccatagaaaaaagaaaaataagaaaatgtttagtccatttcttctttttgagacagggtctcactctgtcgctgctcaggctggacagcagtggtgcaatcatagcttactgcagccttgatctcccaggctcacatgatccttccatctcagcctcccaagtagctgggattacaggcatgtgccaccactctggctaacatttttagttttgtagagacagggtctcactatgttgcccagtatatgtgtgtacatccctttgtcagagacccttcctaaccaccctatctgatacagcactcatatatccctttcttacacagctttattgctctttttagtccttattgctactatcataaaatatctgtaatctgtcatttcccccgcccactaaaatgtaaagtccaagagggcagggactttgttctacgcaccattgtttctttagtgcctagaacagtgtctcaatactcaaaacactgtactcaataggtatctgttgaatgaaaagattcttccctattagagaagaaattaaatgtttagaggggaggttcaatacataagaccacttggataaagtttcatatggcaaggaatatattcaaaaagtttgatatttttctctttagttccttttctgactgttttatgagaatttgaggagagatggtaaacagaaaacccttagaacaatgcttagcacacggtaaataaactttcagtgcactcaattcaacatagagggtaacagataatgaaaccacctttgcaatattataacagtgagagatatctaacaaagctgactccaccttgcttctaacctcacaaactgtctcctcatttctacacacaggccaacctaactatgggaggaatttagtttacagtttaactttaaagcaaggatggtaatagtcctttcccaaaactaaccccctccttgttaagggaccaaagctgcttttgtagaactaataaaaggccacaaggttaaaattatggtaagggccagaactctattaataaagatgtaggcatagttaaactctaaccaggcatcattttataacttgcttttttgtaactgcttactgctcaggaagcatgtagcccgtggtcaaaagatttataactttcctatttacacctacagatgacattgctattgtaaaacctaagactagtgtttgagatatttttcagactttgcattctaatggaccaactggtaccacccaaatcggtaagccacacaaagaaactgactcaagtggtcctgtgaaccccccatcgaggaactgactcagcacaagaagacagttttgacatccgtatggttttatccccaacccaacaaagcagcatttctcattccctagccccttgcttgtcaaaccatccttgaaaaaccctagcctctgaattctctatgggtaggatttaagaattatctcccgtcctcctcatgcagctgccctgtgattattaaactctttctctgctacaactcctactgtctcagggtactggctttttctgggtggcaggcaagaagaacccaactgctgtgaaacaataattgttttatcagtgtaattatttaccgtaaatggatggtattaactctcctgcgcaggtgagaaaactgagtaaaacagataaaatattttccttaaaattactgcctgaaacaaaattaaacaataacaataaaacttactgtgttcacgaggttcttcgtatgtaaatccttacaagaatccatccaaggtacttattattatcacggataagaaaagaggcccaggcatgaaataatttgcccaaggtcacaaagctctaagaaccaggacacaaacacagtctggttcctcatggtccaaatatatttacctatctatatctctatattacatctctacattcatatatcttaggctatttggactgctataacagaatacttcagactacatggcttatgagcaacagaaatttatttctcaacagttctagagactgggaagtccaagatcaagacactggcagattccatatctggggagggcccacttccaggttcacagacaacgatcttctctctgtatctttacatcatggaaggggtcaggggtctcttttataagggcatgaatcccattcattatcttatgatctaatcacctcccaagggccccaacctcctaaaacctcgtcatgggagttaggatttctacatagaattttgggggaacacaagcattcagacaatagcattctcttcatatggcaacatactgtaatattcctccagaccacttgctctcctgaaagaaaaatgcatgattatatataattctcttactttcatttttttcaggctctacattctttggttctgaatcatgagtcacatccacttctcctttcattaatatagtaacataatggtaattctccttctcaatgaaagaattcacaactgaggcaaagtgaacatttttcaggtgaagagctgcttcttcccaggtttccctttgagcacattcttcccaggtttcactggaaaacagaaacaaaaattagattaattctatttttttatatatacacatgtgtgtgtatatatatgtatatatataaatgtatatacgtgtgtgtgtgtgtatatattttgccatgaaattcttggctagaaaattctagtgtaaaacaaaaagaactgtaattggttcctgctttaaaacaacaaatcagctgggcatgtggctcatgtctgtaatcttttggaaggccgaggcaagaggacagcttgagttcaggagttggagaccagctgaggccaacatagtgagacctcatctctcaaaaaaaaaaaaaatagccgggcatggtggtgcgtgcctatggtctgtggtcccagctactcaagaggctgaggcaagaggatagtttgagcctgggaagtcaaggctgcagtgagccatgatggtgccattgcactccagcctggacaaacagcaagactttgtctcaaaaaatagtaataataattaattaaaaagataaagatttaaaaccagtaaatcagcaaccttgcccttgacattatatcctgtatctagttatctaaagatgaaaaggacttaatattgaataaaaattaacatttagccatctcagcactaatttacagccctggaacctgtgtgtaacaaggaggcagtttagtgcattaagagcagactttggagtcaactagacctgggattgagctcaaagttcattactttccaccttggacaagtaaaaagagattatattacttcctcatggggtcactgtaattgtatcaagaagtgccactatgtcttttccagcagtctcagaatttcaatttaagcctcaaaactgaagacaataggtaaaaagcacttctaaattctcaagcaaaagggcaaacagatgtcatctgagctcaagctcaagctaaggaaggccagactagacctgtgacttctccgtatccaggctacataagaaagacaggaggccgggcgcggtggctcacgcctgtaatcccagcactttgggaggccgaggcgggcggatcacgaggtcaggagatcgagaccatcccggctaaaacggtgaaaccccgtctctactaaaaatacaaaaaattagccgggcgtagtggcgggcgcctgtagtcccagctacttgggaggctgaggcaggagaatggcgtgaacccgggaggcggagcttgcagtgagccgagatcccgccactgcactccagcctgggtgacagagcgagactccgtctcaaaaaaaaaaaaaaaaaaaaaaaaaggagatgtttgagacagaggaaagtttggagttttcagcctagtaggagcatttcccttccagactacaaggggccaactctgcccccccaagacaggtgaggaacattccaagagaatcagtcataagattgggagtgactcaagaaggagatactcagtgtgtcactcccctgctaaagacatcctgagctgcagaaactcacaggcctaccccagtgcatcagaaaaggtgtgctacaagggtgaaagctcttgggtaaatctgaaatgtgtccctcggagtttccagatgcagatgaatacagaggtagagcaaggaaaaagggcagcagtggaaatatcattcccattgtgtgtttcctttgggccaagcagatgccacaagagactgctgggtaatcaaataggagatcccagtagaaagaaaatgtggggtgatgtgctaaaagcaagagctaggaggtgggccagcatcacagaaagcccgtcacctatgtcaggaaaatctctgtgggacttcccaacaactgacaaacataccctgagaaagcacacatgtggatatcatgcccagaggacaccaatggatggatcagagcagcatcagtcacctgaatggcttgctctctctcctcctccaacacactggagaaagaaggaaactcagagacagccaggtgagaagaggaggaggatacagaaaagcagaacaatggctcacacctcctttatgcactgcaggggagggattagaaactggaagtgacactgaaggtttaaattggattggacttttaaatgcttggaagtgaatcatactgacccaaatgtgatttatttttataaccaagtgacaagaaaactatagaatttgcaggaaacgtcactgaagagggaaagaaaaaatcatgtttgaaggcagtggaaggagaaaataaaaccatttcctgtttgttctcccatcaaatttagcccactgagtatgccagttatgtaaagatcaaatgaaagtatacatgcaaagagcttggcatattatccagcctttaacaaaaagcccattagagctcaatgttggctatggtcattgacctcacgggtggatcacctgaggtcaggagttcgagaccagcctggccaacatggcgaaaccccgtctctactaaaaatacaaaaattagcacggcgtggtagcgggcgcctgtaatcccagctaccaggaggctgagacacaaaaatcgcttgaacccaggaggcggaggttgcagtgactggagatagcaccactgcactctggcctgggctacagagcgagacacagtctcaaatcaatcaatcgatcaatcaatcaatcacatggaaacggtgcaatgtcttagctgacaatatcgggctgctggaggtttacacacacctgctttcctccttttgtgtgtaagctgtgagaaacacacctcacagacgaactcccaaccaccacccagcaggggcgcagccggaaagacccagctagcaaagacctcgcctgacccagcacagcgccccctcctgggcgcgatcctacgtcgcccagaagtcgaggggaggaaccgagggaacgcgcaagaaaggacgcagcgtcagcgcggacgttctcacgcacggcacacggaagcaagcacggcgtgagwtcgtccctctgcgcacgccccggtttcctcgcgtccgcggctgctcacccgaactccagatgacctccagggagttggaaactgccagctccaaccgagcctttcctcttccccaggaggacgcaacgcggatgcttgcagctggtcaccacgactccgactccgactcckggccgccgcccgcgcggctgtgcgctggccgtcatagcgcgcgggaggacgcgcctggcagcggcaggaagtgacgcgctcactaccccgtcccgcggccgcagccaatctctccccgcgagggcggaggcgccgaaatcaaagcgagagcgcctcggcctctccagctgtccgcggtgcgtaatgcgtcgcggagggctatcaggttggggaatgccgtgtttccttccgaagggcagcgtgccttagagtttcgctgtaactaaagtcgcttacagttgtgctttgaatattcatcacccgtcagcctatccactcccagattcctgcaaaccatgcatttacatgtacaagccgcctgctcttaccaacctyggcaccactgcacattcttttttccgtgaatgacctcgcccaccatggtgcacccatttgccctgtagctcaaatcagcgtggtaccaggataaggataggtcgtttagaaacatcccattataaacaactatgcttaaggtatattcataagtcatgggaggaaataaaggctaattgataaatcatgctgggaagagttagttacaaacagtggaaaacagacattttcagatgtttgcacaccatgcaccatgcaaaatacaaaccagctgaatcataaaaacaaatgactagttactgggagggttttctctctttctcattatttttacttctaccaaagtaatgtgcacatactggtaattttattttattttaattttcaccaagctagctaattttctttctttttttttttttttgtggaggtgggctgtcggtcttttgtcgaggctgatctccaactcctgtcctcaagcagtccttccacttgggcctaccagagtgctgggataacaggcgtgaaccactgcgcctgacctatagctataattttaagaagtaaaatggtgcaaaaaccgcaacaagagcaacctgaccctcctactttcagaaacaatcacttttaactctttgaactgtatttctgatatttgcctacttatttctaagtaatatgcttactctccatgttatactaaatgggtattaagcttttcacagcatctctcctcactatcaacattcacattcattacaaaggtacttacaatatcttctcaaaaaatggtagtatataaaaaggataatatattgaacaatgagattaatcccagaaatactaggttggcttaatatttgaaaagccaatgtaattcagcatattaacagagggagaaaggaaatacatataatcatctcaatagatgcagaaaaaaattaataaaatccgatactcagttgtgattaaaaaaactccacaaaatctctgagcaaactagaaataaaatgaaactttaacatgatatatggcatctacaaagacctacagctaacatcatatttaatgactgttttgagctgaattgtgtcccctcaaaattcctatgtcgaagtcctatcccccagtacctcagcatttggagacaggatcaagttaaaatgaagccactagggtaggccctattctaatgttatgactggtgtcctcgcaagaagtagagattagaacccagactgtgttctattggaagactgtatgatgacacagggagaaggcagccgtctacaagccaaggagagcagcctcagaagaaaccaagtctgctgacaccttgatcttagaattctagcctccagtattgtgagaaaattaatttatgttatttaagccacacaatctttgatactttgttatggcttgatactttgttatggcagccatagcactagcctagccttatcttggtgaaagacaagatttgggaggagctagggtatccactctgagcacgtttagtcatcatgttgctggagattctagttagcacaactcataaaatttaaaaatcaataaaacgtagttaaattggaaaggaataagtaaccgtcttttttttttaaaacaatcctgaggaattaattaaaaagccattagaagaaataagtttagcaaggtcgtaggattcaaggttaatatacacaattgattatatttctatatattagcaatgaacaattgaaaagtaaatttttaaaacaataccatttataataccataaaaaacataaaatacttagaaatatatttagcaaaagatatggaacacttgtatacagaagactataaaactgaaccaaaaataaaattctaagcacctccacccccagccatctgaatggactccttcctcttggccagagcactccaaagttaacctgaaaaactggttgaagccatgacagagcaggggtcagatatgcctcattatgccacctttcttttggaattcaggaaaagccaactagcatttaacattaacacagaccttaagtctgataagaaacatttacaatctagtctctctgaagcctgctacctggaggcttcagctgcatgataaaattttggtctccacaacgtcttatcttaacccagacattcctttctattgataataactgtttcaaccaattgccaatcagaaaaatttaaatctacctataacctggaacccctgccccacttcaagttgtctcgcctttctggaccaaaccaatggtcaatctgtatcttaagtgtatttgattgaagtctcatgtctccctaaaatgtataaaaccaagctgctccccaaccaccttgggcatatgttgtcagggtctcccaagggctgtgtcacaggccatggtcactcatatttggctcagaatacatcccttcaactattttacagagtttgacttcttccttttttttaatttcaagtttttggttacatggattcgttctttagctgtgatttctgaaattttagtgcacccatcacctgagtagtgtacactatatgtagtcttttattcctcactcccctccaaactttcccctccgagtccccaaagcccactgtatcactcttatgcctttgcatcctcatagcttaactcccacttgtgagaacttacaatatttgcttttccattcctgagttacttcacttagaataatggcctccagctccatccaagttgctgcataagacattatcttgttcctttttatggctgagtagtattttatggtgtatatataccacattttctttatccattcgttggttgatggacacttaggttggttccatgtctttgcaattgcaaattgtgctgctatatgtgcatgtgttttttttttttttttttttttggagacagtctcactctgttgcccaggctggagtgcagtggcgcaatctcggctcactgcaagctccgcctcccacgttcacgccattctcctgcctcagtctcctgagtagctgggactacaggcgcccaccactgcgcctggctaatttttttgtatttttagtagagacggggtttcaccatggtcttgatctcctgacctcgtgatctgcctgcctcggcctcccaaagtgctgggattacaggcgtgagccaccgagcccggccgcatgtgtgttttttatgtaatgacttattttcctttgggtagatattccgtagtgggattgctggattgaatggtagttctacttttagttccttaaggaatgtctatactgttttccatagtggttgtactagtttacatttccagtagcagtgtaaaagtgttcccttttcctcacatccaggccaacatctattgtttttttacttttttgtaatggccattcttacaggcgtaaggtggtatctcacgttttaatttgcgtttccctgatgcttgtgatgttgaacattttttcatgtttgttggctgtttgtatattttcttttgataaatgtttattcatgtcctttgcccactttttgatgggattgtttgtttttttcttgctgatttgtttgcattccttgtagattctgcatactagtcctttgtcagatgcgtagtttgccagagttggactcttttcattgatagaatgttgctgaagaaaataaaatacttaagtaaaagaagagaaatattatactcatggatcagaagactcaatattgttaaaatatcaattctctacaaattaatttatatagattcaatgcagtcctgatcagaataccagaaggcttccctttccagtagaaatagataggttgattctaaaattggtatggaaacacaaataactagaataatagaaacagtttttaaaaagaaaacatttagagggttcacaccayttgatttcaagacttaggattaagccacagtaatcaagagagtatggtgttggtaaaaacatagacatatagatcagtgaaacaaaatggactggaaatagatccatatatatgtatatatccatatataaattaatttttgaaaaatgtgcaaaggcaattcaataaagaaaagatagtatttttaacaaatggtgctggaacaagttgacataaatgtaaacaaaaagccttgatttataattggcaccatatataaaaattagctcaaagtggattgtagacctaaataaaaacatctaaagtatacaatttgtacaagaaaatataggtaaaaatctttgtgatctttggttaggtatagatttcgtagctatgaaaagaatgacccttaaaaaatgataatctggctttcacccaaattaaaacctttttctctttgagagatactgctrtggactcaactgtgttcccacaaaattgacatgttgaagccctaatccctaaaatgatggtatttggagatggggtctttgggaggtaattaggttaaatgagatcgtgaggctagggttttcatgataggattagtggccttgtaagaagagaccacagagctttcttgctcttgcgaaatgaaaacagaattctaagcttccaactgactgaatggacccctcacacccccaacttggccaagggaatgccagagaaaccttggatgctgaatttacatctatgataggataggaggttggacacacctcattataccccctcccttgttaacagtcattaggttttcagccgggcyctgtggctcacacctgtaatcccagcactttgggaggctgaggcaggcagatcacctgaggttaggaattcgagatcagcctggccaacatggtgaaaccccgtctctactaataatacaaaaattagccaggcgcggtggctggtgccygtagtcccagctacttgggaggctgaggcaggagaatcgcttgaacccaggaggtggaagttgtgtgttgggagaaaagctgagtgttgggagagaagctgaggcagggcttgcatgtctgatataatgtgaaagagtcttggaacatgtccggggtccagggtctaaaacccctcgtggcctttagaacaccaagctctgtgctaaagggtggaaggctgccgtgccgcaccataatctaaggccagggcataaaacccctcatggcttggatggaacccagggctcagggcataaaacccctcacggcctctggaatgtgtcagacttgctggctccttgcttctagcactcccattatctcaagtagcagaacatgttccatatgcttcaaagaaaatgctaaagcatcacagctatagcttatttgcttgatgcatcgctacctttcaacctccacatcctcaccacctgtttctttgtttgatcaccaacaaatagcgtgggcttccagagctcagggccttcacagcctccatacttgcgttggccccctggacccactttctctctcaaactgtcttttctcattcctttgactctgccggacttcatcaccccccatgacctggtgttgggtctgatcaccccaacattgtggtgaaccgagattgcaccactgcactccagcctggctgacaaagtgaaagtgtctcagaaaaaaaaaaacacaaaaaacagtcattaggttttcttccctaaaggctgaacagaagctagccctttcaaaagactgctagttttatcttcccaggtgtagaacaaaaacaagatgaaattaatagttccttcaccagtccctgagataagatgagattaatggttcctttacctctcccctagatggctgcttcctctagtccctttttcttcaaatgttcaccttatcatatgtaaaatatagatttactkggctttaactaaagtctcataagtaggtaatcatttatctcactgctgtctcctgttttttaaggaaaatgtataaatactaaagctcctgtgaacctttttggaaaaaatagccacagatgcttctgtgacttacgtttttcccaggcacagcctcaagctggctcaataaacctgggtgatttgagacttatgcctcaatcactcattttggttgtcactctatctgctgtggtttgaatatgtaccccaaagttcatgtgttaaaaacttaatccatagtgcaacagtgttgagaggtgagagctttaagaggtgattatggcagagccctcatgaatgcattaatgctaatatcttgagaggaggttagttattgtgggagtgggttcctgataaagagacgagttggcccttccaacttttcccttctctctctytcatgcacacgtgtgtgcatatatgttctcttaaccctctacccttccaccatgggatgatacagcaagaaagcccttattagatgcmgtctcttgactttggtctttccagcctccataactgtcagaaataagtctctgttctttataaattaccaaacagaaaccatcccttatagtggcacaaaacagactaagacaatctctctgctctgtgagaagacagtgagaaggcagccatctgcaagcctggaagaaggccctgaccaggaagaaaccctactgtcaccttgatcttcttggacttgcccgcccccagaacagtgagaaataaatgtctcttgtttaagacactcactctatggtattttgttatagtagcctcagttcactaagacactagttaagaaaacaaaaaggcaagctgtggactgggagaaaatgtttgcaaagaacatatcttatgaaggacttggacctagaatatgtaaagaatcctcagcaatcaataataaagcaaacaacctgataaatatatggacaaaagaattgaacagatatttcaccaagaagagatattgtattagtccattttcacactgcttataaagacatacacaagactggataatttataaagaaaaatagatttaatggactcacagttccatgtagctgaggaggcctcacaatcgtggtggaaggtgaaagtcacatcttacatggcagcaggcaagagagaatgagagccaagtgaaaagggataccccttgtaaaaccatcaaatctcatgagacttattcactaccatgagaacagtatgggagaaactgcctttatgattcaatttctgtcactgggttcctcccacaacttatggggattatgggagctacaattcaaggtgagatttgggtggggacacagcaaaaccatatcagatatgatggcaaataagcacatgagaagatgctaaaygtcatgagtcattaggaaaataaaagcctaaaccaaactgaggtaccwctgcacatctattagaatgaataagaaaaaaatccccatgaaaactggcaataccaaaggcaggtgaagatacagagttgttagaactctcatacattgttggtgagaatgcaaaattgcacaactkctttggaaaacatgtataatgttaatcatacacttataatagaacccagtaaccttactccaagatatttactcaygagaaatgaaaacttacgttcataccaagacctgtatgtaacagttacactggctttattcataatcatcaaaatctggaaacaaacgttcttcaactggtgaatggataaatcaactgtggtaaattcatacaatggaaacccactcagcaagataacagagcaaacatctgatacactcaacaacatggatgaatctcaactgcattatgctacatgaaaagaatcagatataaatggctacatgctgtatgatttcatttatatgcattttggaacaggcaaaattctggacatagaaaacaggccagtgtttgcctggggctgaggatgtggagaggggttgacgacaaaaggacatgggggattttttgggggtgatggaatggttctgtatcttgattatcatggtggtaatatgatgatgtatttgttaaaactcatagaactgcacactaaaaaagatgaattttactatctgtatattaaaactaaaatcaaacttttttaaaaagccaaaaaaagaaaaatgtaacgtggatttgcagaaagaaaaaaatcaagatacaattcagcagtagaaagggtcaaagcaaagctgagctgaactgctccacttaatatcaaaagtggtcatccttgtgggtggagctgagtttatgaagattatatatctgcagaggctagccttagcaggttcctyctctctctgggccttagaggacttggagagcctggctctggggtgatggtattcatcgtcccaggcattcctgttgaggtgagtaggccgctcctagaacatagtaagtaggaaatctggggctaagaggggatgggaaggtgaataggagaacctatacattcagaagtcacatttgctagccagtttaaagttttcttttattgcatagtagttgcattttattatcccaaaaccttcaataaaacctggttatatgttatagcctgatctttactaagctttgaagagttggaatagcctaagtctaccctcccataaaggaatgacaagaaaggarcatcagcccagagaagcattaaagtcaaggaggatgcctttgatgtcagtatctctagtacccaaatggtgactaacacatatgtaccccataaatgagtatttgagtaaaagctgctctaccttataccagtgtaacaaaatacagatgtccccagattaaatggtytgatttaatgatttttctattttacagtggtgcaaaagcaataacattcagtaggctccttatgatgggctatttccagataaactcgttgtaagttgaaaatatagtcaagttgaaaatcttgttttcaacttacaatgggtctatttagatgtaaccccattgtaagtcgaggagcatctgtccttytaaatagttaaactagaaaacatttttcttctcctgaaaactttagcctgtgtggagaaaggtggcatgattcacataaagtacaaatggtcatgaaaaaaaaagcaccaagctgatgtttatgaatcatataaaagaagtgtcaacccacataaatattactctaattagagaacccccatattgaattcccttctgcaggattctcaaccagttgaacaggatctaccaggagttattgcagcatgagaacctgatgcagctccttattgctacactttcttttgcatttttccagattcctagatgaaggaaaggtgatccaggcaaagaggcccctctcctgcccaattccaggactctaccaggagagcaccattttcctccctccatttacacagaaatagcctcagtctgggggatgctggaatgctcctcatactggctattttgttctgctccagtatatccttatgttaatggcagcctctctgttctattttcatacctcttttatgtatctrttattattgagtcagctttttaccagaagataactgaggctgagaatattcctagcaatgaagtatgaagcaggccctccttaatttacctgaagaacatgtaacgaatacagttaggttataaggtgaaataatgcagttaaggtcatgctgcccaattcctctttccttcacctgtaactctttctcaggagattgatttggaagagagagtccactgtagctggaaccattctttcaccccaccctgccctgggcaaccctgtgctgactggatgtgcttgattattattttattttattttattttattttattttaattatattttattttattttattttattgtaagatggagtcttgctctgtcgcccaggctggagtgcagtggcacaatcttggctcactgcaagctccgcttcccgggttcatgccatcctcctgcctcagcctcctgagtagctgggactacaggcacctgccaccacgcctggctaatttttttgtatttttagtagagacggggtttcaccatgttagccaggatggtctcgatctcctgacctcatgatccgcctgcttcggcctcccaaagtgctggaattacaggcgtgagccaccgcgccagmctggatgtgcttgattctactcccagacctgagcctcttgtttaaactcatccagtttcttttccctctttcctctggtctatccctatgtttgatatttgaagcttcatatgtaaaactcaagaatccaccttatggtttcatgtagtattatatggtatgtattgtaactgaatcacaaatttaactcacactgcaactcagatgtgtgaagaaaatgagtttctttctttcttttcttaatagggagtctgattttttcctaaatctctttgtcattagttgggatatgggtctgtgtaaaatgaatcaaatgttcaatgtggttcaacttggtctcattaaatcatgttcactctgtcctggtttaaagggctgtcctctcagtcatctttcttcttcttgtgcctctttttttttttttttttttttttttttgagacagggtctcactctatcacccaggttgtagtgcagtggtgtgatctcagctcactgcratgacctctcagatgaggcctcagatgggaagcacgacaaggctggggcagaacaggagaatcccctcctgccttcaacactatcctcatttatctaatgcaccttctttcaccagagtaaagatcacagagatgaaaaactaacatttcactccagtctttcctctttatttctatttactactatccttatgggacagaaaggggaaggttaccaccctcactctataaaatctataatttatggactagccctgatctttcatattcttaagggagagatataggtccgacttgcaggcatattgccttactccataatcccattytgaatgttagaaattgaatatttagtctggacacggtggctcaagcctgtaatccgagcactttggaaggccaaggcaggcgaatcacttgagtcaggagtttgagactagcctggccaacatggtgaaaccacatctctactaaattacaaaaattagctgggtgtggtggtgcatgcctgtaatctcagctacttgggaggctgaggcacgagaatcacttgaacccaggaggtggaggctgcagtgagctgagattgcgcctctgcactccagcctgtgggacagagcaagactccatctcaacaaaaaaaaaaaaaaagaaaaagaaatcgaatattacattggtctatctctttgcattccttctgcaacaaacactaattatttggccctgcaaaatgaatgtgttagtcgtatgtcagcctgtggtaaattaaagacaatattagccaaattctttgctacttcttccattgagaagtggaatttattttcccttcctttggatctgggctgccaatagtgactttcttacagtccctctatcaaatatttgttttgcagatattttatctcagtgcacagtttgcttttatatatatatgagtttattaggaataattaaatcacatgattacaaggcgaagtcccaccataggccaccagcaagctggggaaagagagaagccagtagtacctcagtccaagtctgaaagcctcaaaaccagggaagctgacagtgcagctctcaatctgaggccaaaagcccaagagcccatggggggctgctggtgcaagtcccatagtccaaaggttgaagaactgggagcttgatgtccaaagaggacaggaggaggaaaagctgacttccagcaccacacaggaagagagagagaaatctgactcagaaagccacgctacttatcccccttcttccacctgctttgttctagctgccctggcagctgattgaatggtgcccacctgcactgagggtgggtcttcctctcctagtccactgactcacatttccatctcttctggcaacaccctcacagacccacccagaaacaatgcttcatcagccatctaggcatccctcaatccagtcaagttgatgcctaatattaaccatcacagcatggaagtaagagttcataattcattaccctcgtgtttgctacaaggagagtacaccttaatattaaaccttatttgtatcccaggtacagaatcccaaaaggtggtgtatatcatttttccttaagtaactcttgactgcaaccattggctctctaagtttcaggacttggtaagcatcttccagacygagccatcagccttttaactctattcttctgaagcaagtagtattgtccttttgattgacagaaatgtaaccacaccacacagatctctggtttctgaaaattttttctattggcccagatttacttgatgtttgactacattagcttgatttcctaagaagctctctactacyactgtaaatggttccctctccccagtgctgcacccgcttatttattttttattatactttaagttctggggtacaagtgcagaacgtgcaggtttgttacatagttatacgcgtgctgtagtggtttgctgcacccatcaacccgtcatcttcattaggtatttctcctaatgctatctctcccccagcaccccagcccccgacaggccctggtgtgtgatgcccccccacctgtgttcatgtgttttcattgttcaactcccacttatgagtgagaacatgaggtgtctggttttctgttgttgtgttagtgtgctgagaatgatggttttcagcttcatccatgtccctgcaaagaacgtgaattcatccctttttatggctgcatatattccatggtgtgtatgtgccacattttctttatccagtctatcattggtgggcatttgaattggttccaagtctttgatattgtaaacagtgctgcagtaaacatacatgtgcatgtgtctgtatagtagaatgatttataatcctttggttatatacccagtaatgggattgctggtcaaatggcatttctagttctagatcctggaggaattgccacactgtcttccacaatggttgaactaatttacacgcccaccaacagtgtaaaagtgttcctatttctytacattctytccagcatctgttgtttcctgactttttaatgattgccattctaacttacatgagatgctatctcattgtgatttggtttgcatttctctaatgaccagtgatgatgagctttttttcatatgttygttggccgcataaatgttttctttcgagaagtgtctattcatatcttttgcccactttttgatggggttgtttgtttttttttcttgtacatttgtttatgttctttgtagattccggatattagccctttgtcagatgtatagattgcaaaaattttctcccattctgtaggttgcctgttcactctgatgatagtttcttttgctgtgcataagctctttagtttcattagatcccatttgtctattttggcttttgttgccattgcttttggtgttttagtcacaaagtctttgcccatgcctatgtcctgaatggtattgcctaggttttcttctagggtttttatggttttaggtcttatgtttaagtctttaatccatcttaagttaatttttgtataaggtataaggaagggatccagtttcagctctctgcatatggctaaccagttttcccaacaccatttattaaatagggaatcctttcttattgcttgtttttgtcagatttgtcaaagatcagatggttgtagatgtgtggtgttatttctgagggctctgttctgttccattggtctatatctctgttttggtaccagtaccatgctgttttggttactgtagccttgtagtatagtttgaagtcaggtaacgtgatgcctccagctttgttctatttgcttaggattgtcttggctatgcgggctctttttgggttccatatgaaatttaaagtagttttctccaattctgtgaggaaagtcattggtagcttgatggggttagcattgaatctataaaatactttgggcaatgtggccattttcatgatattgattcttcctatccatgagcatggaatgtttttccatttgtttgtttccctcttatttccttgagcaatggtttgtagttctccttgaagaggtycttcacatcccttgtaagttgkattcctaggtattttattctctttgtagcaattgtgaatgggagttcactcatgatttggctctctgtctgttattggtgtataggaatgcttgtgatttttgcacgttgattttgtatcctgaaactttgctgaagttgctcatcagcttaaggagatttggggatgagatgatggggttttctaaatatacagtcatgtcatctgcaaacagggacaatttgacctcctcttttctagttgaattccctttatttctttctcttgcctgattgccctggccagaacttccaatactatgttgaataggagtggtgagagagggcattcttgtcttgtgtcggttttcaaagggaatgcttccagtttttgcccattcagtataatattggctgtgggtttgtcataaatagttcttattattttgagataatgtttcatgaatacctagtttattgagaatttttagcatgaagggctgttgaattttgtcaaaggcctttctgcatctattgagataatcatgtggttttgtcatttgttctgtttatgtgatggattaggtttattgatttgtatatgttgaatcagccttgcatcccagggatgaagccgacttgatcgtggtggatacrctttttgatgtgctcttggatttcatttgccagtattttgttgccgatttttgcatcgatgttcaacagggatattggcctgaaattttctttttttgttgtatctctgccaggttttgstatcaggatgatgctggcctcgtaaaatgagttggggggattccttctttttctattgtttggagtagtttcagaaggaatggtaccagttcctctttgtacctatggtagaatttggctatgaatccatctggtcctggactgtttttgtttggttggctattaattactgcctcaatttcagaacttgttactggtctactcaggaatttgacttcttcctcgtttagtcttgggagtgtgtgtgtttgcaggaatttatccatttcttcaagattttctagtttatttgtgtagasgtgtttatagtagtctgatggtagtttgtatttctgtgggattagtggtgatatcccctttatcatttttttattgcgtctatttgattcttctctcttttcttctttattagtctggctagcagtctatcaattttgttgatcttttcaaaaagcagctcctggattcaytgattttttgaagggtttttcgtgtctctatctccttcagttctgctctgatcttagttatttcttgtcttctgctactgtttgaatttgtttgctcttgcttctctagttcttttaattgtgatgttagggtgtcaattttagatctttcctgctttctcttgtgggcatttagtgctataaatttccctctacacactactttaaatgtgtcccagagattctggtacattgtatctttgttctcattggtttcaaagaacatctttatttctgccttaatttygttatttacccagtagtaattcaggagcagcttgttcagtttccatgtagtagtgyggttttgaatgagtttcttttttttttttttgagacggagtttcgctctttttgcccaggctggagtgcaatggcaccatctcggctcactgcaacctccacttccaccasggttcaagtgattctcctgcctcagcctcccgagtagcttggattacaggcatgcaccaccactctggctaattttgtatttttagtagagatggggtttctccatgttagtgaggctggtcttgaactcccgacctcaggtgatccacccgccttggcctcccaaagtgctgggattacaggtgtgagcaactgcgcccagccttgaatgagtttcttaatcctgagttctaatatgattgcactgtgatctgagagactgttatgatttctgttcttttgcatttgcttaaactcccacacaataatagtgggagactttaacaccccattgtcaatattagacagatcaatgagacaaaaaattaacaacgatgtccaggacttgaactcagctctggaccaaggagacctaatagacatctacagcactcctcaccccaaatcaacagcatatacattcttctcagcacatcgcacttattctaaaattgaccacataattggaagctttttaattttttatagtgcctcttgaaaagcagaaggaccagatggtacaagcaggctggtgaccaataggatgtgacataaagtatsctatatgttttgccaggctaggtcataagaatccttgcagtttttttctcaggctcttagactactcactctagaggaaaaccagcaccatgtaaaaagtatgattgccatacaactgccatgttttaaagaagcccatgctagccacatagggaggctatgtagagaaacggacaaagcttttcaggagccgccctgggcggagctggacttagatcttcagtggcctcatgtaaactcggcagccagcctcttctagaaccctagcccaaggactggagcaggaaatggaccttcaaagtgaagactgccttgtcctgcacctccttctggcttagattgaaaaatgggtttcctaatgggttaaatcctttaaaacaaggagttgggggggaagagtgtcgtgcattcctagagaaaggtacacagttgtccggctgggaacgtgcttggcacgaccccgcgggcatctgactggtcttccagctcaggaaaaagaatttgaaagaggcttagcgtgaaggggaatcaaagaggaggttgtgatttggctgaaggtgactggtttagtgctataattgtcttattttatatatatatatatatatatatatatatatatatatatatatatttcttggagtaaacattttaaataaacgacatcatctaaaaaaaaaaacaggagaaagggacaaagatgcttggccatccgtaactttttcatccattccaacacaggcaacgagatatgtgcataaagaagtcatctttgacatttctgtgtatgcagacaaaaggtagagaagaatgaagaacccaactgacaaccagaagtgagggactggctacataatttgaagggcccaatgataaaaatgtggaactccttatttgaaatttgttgagaacttcaagatggtgggacctttttattattgcgtaagcacaggtcacacatccatgaattcagacctgctccagatatatggcctgtttgaagccatcccaacaatctctagtgtcttgagccacagattaatattttgaatatataaagaactcctataacacaacaacaacaaaaaacaaacaacctgattaaaaaatgaacaaaggacttgaataggcatttctccaaaaaagatatacaaatgcctaataaatacataaaaagattggccgggtgcggtggctcatgcttgtaatcccagcactttgggaggccgaggagggtggatcccctgaggtcaaaagttcaagactagcctgaccaacatggtgaaaccctgtctctactaaaaatacaaaaattagccaggcctggtagcacatgcctgtaatcccagctaactgggaggctgaggcaggaaaatcacttgaacccaggaggtggaggttgcagtgagccaagatcgtgccattgcactccagcctgggcaatacagtgagactctgtctaaacagcaataacaacaaaaaaaactacatgaaaagattttcagcaccacttattgttgaggaaatacaataaaaaagctacaattaggtcaggcatgatggcttatgcctgtaatcccagcactttggggggctgaggtggatggatcatttaaggtcagctgttcaagaccagcctggccaacatggtgaaaccctgtctctactgaaaatacaaaaatyagcccggagtggtagcaggtgcctgtgatcccagctacttgggaggcggaagcaggagaatcacttgaacctgggaggcggagcttgcagtgagccgagatcactccactgtactccaacctgggtaacagagtgagactgtcaaaaaaaaaaaaaaaaaaaaaaaaatctacaatgagatcacttcacacccattaagatggattataaaaaacaacaaccagaaaataacaagtgttggtgagaatgtggagaatttggaacccttgtgcgctgttgggaatataaaatggtacagccacggtggaaaacagtatgctggttcctcaaaaaaatgtaatgtagaattaccatataatccagcaatcacacttttaggtacatatacaaaataaatgaaggcagggcagggacttaaacaaatatttacatactgtgttcaaagcagcattattcagaatagctaaaacaaggaagcaacccaagtgttcattgatgtttgaatggacaaacaaaatgtggaatataaacacaatgaaatactattccatcttaaaaattaattaaattttgacataagctacaacatagatgaaccttgaagacattatgctaagtgaagtcagccagtcacaaaaggacaaatattgtatgattttacacttatgrtgaggtacctagagtaggcaaattcatagagacagaaaatagaatattggctgcgaggggctaaaaggaaagggtattgggaagtatttaatgggtacataatttaagttggggaagataaaaaaattctggagatagatggtagtaatggttagtaaacaatgtgaaggtacttaatgttacagaactgtacactttaaaagggtaaattttggctgggcatggtggctcatacctgtaatcccagcactttgggaggccaaggtgggcagatcgcttgagcccaggagttggagaccagcctgggcaatatggcaaatccccatctctacaaaacatacaaacttagctaagtgtggtggcacgtgcctgtagctcaagctactcaggaggtcaaggctgcagtgagctgtgatcatgccactgcactccagccttggtgacagagggagaccctgtctcataataataataataaaagaaaaaaaagaaaaaaaggattcactgcccagttgaggagcatcgttaggcaacagtgtccagtggtggctccttcagggtccccctctatttgaactgaggtcacacttttctcagggtgtccccagccagtgactgtgattattgtcagaatcagtggtacaaagcatttccacccaatatggaattcctctaacaggcaatctctgctccagagctccgtgttgggctccggtctttctggcttcttgtcaggttatgatttgatgattcctctgtccaatatttctttttttaaaaawttttattattattatactttaagttttagggtacatgtgcacaacgtgcaggtttgttacatatgtatacatgtgccatgttggtgtgctgcacccattaactcgtcatttagcattaggtatatctcctaatgctatccctcccccccgccccccaccccacaacagtccccggtgtgtgatgttccccttcctgtgtccatgtgttctcattgttcaattcctacctatgagtgagaacatgccgtgtttggttttttgtccttgtgatagtttgctgagaatgatggtttccagtttcatccatgtccctatgaaggacatgaactcatcattttttatagctgcatagtattccatggtgtatatgtgccacattttcttaatccagtctatcgttgttggacatttaggttggttccaagtctttgctattgtgaatagtgctgctataaacatacgtgtgcatgtgtctttatagcagcatgatttataatcctttgggtatatacccagtaatggcatggctgggtcaatggtatttctagttctatatccctgaggaatcgccacactgagttctacaatggttgaactagtttacagtcccaccaacagtgtaaaaatgttcctatttctccacatcctctccagcacctgttgtttcctgactttttaatgatcgccattctaactggtgtgagatggtatctcattgtggttttgatttgcatttctctgatggccagtgatgatgagcattttttcacgtgttttttggctgcataaatgtcttcttttgagaagtgtctgttcatatccttcacccactttttgatggggttgtttttttcttgtaaatttgtttgagttcattgtagattctggatattagccctttgtcagatgagtaggttgcaaaaattttctcccattctgtaggttgcctgttcactctgatggtagtttcttttgctgtgcagaagctctttagtttaattagatcccatttgtcaattttggcttttgttgctattgcttttggtgtttcacacatgaagtccttgcccatacctatgtcctgaatggtattgcctaggttttcttccagggtttttatggttttaggtctaacatttaagtctttaatccatcttgaattaatttttgtataaggtgtaaggaaggaatccagtttcagctttctacatatggctagccagttttcccagcaccatttattaaatagggaatcctttccccatttcttgtttttgtcagatttgtcaaagatcagatagttgtagatatgcggcattatttctgagggctctgttctgttccattggtctatatctctgttttggtaccagtaccatgctgttttggttactgtagccttgtagtatagtttgaagtcaggtagtgtgatgcctccagcttcattcttttggcttagggttgacttggtgatgtgggctcttttttggttccatatgaactttaaagtagttttttccaattctgtgaagaaaggcattggtagcttgatggggatggcattgaatctataaattaccttgggcagtatggccattttcacgatattgattcttcctacccatgagcatggaatgttcttccatttgtttgtatcctcttttatttcattgagcagtggtttgtagttctccttgaagaggtccttctcatcccttgtaagttggattcctaggtattttattctctttgaagcaattgtgaatgggagttcactcatgatttggctctctgtttgtctgttattggtgtataagaatgcttgtgatttttgtacattgattttgtatcctgagactttgctgaagttgcttatcagtttgaggagattttgggctgagacgatggggttttctagatatacaatcatgtcatctgcaaacagggtcaatttgacttcctcttttcctaattaaataccctttatttccttctcctgcctgattgccctggccagaacttccaacactatgttgaataggagtggtgagagggggcatccctgtcttatgcccattttcaaagggaatgcttccagtttttgcccattcagtatgatattggctgtgggtctgtcatagatagctcttactattttgagatacgacccatcaatacctaatttattgagagtttttagcatgaaggttgttgaattttgtcagaggccttttctgcatctattgagataatcatgtggtttttctctgtccaatatttctttctcaccttctggaaaacaagtattactctttactaaacgcgttgcactcctaactccgtctcaacctctgttttctggagaccacaactggcaccatttctttagagaggacttgcttactccccttacacctctacttacactagagctccttttctaactccctgtttttcttctatcccatagttttctcataattatgttggatttctttgtatctctcataacaatgtaaaataatgaattctttttttgttttttgtttttgagacagggtcttgctctgttgcctaggctggagtgcagtggtacaagcacggctcactgcagccttgacctcctgggatcaagggtaaaataatacattctttttttatgtaattattactcgttactcctttcccctagccattacactgtaagctgtttgatgacagagctatttccttcttgttcaatacagtgcatctaaacatagtaaagtgcctgacacgtgctaaactggtcacccagtaaatatctgttagattcattttgcgtgaatggagtacctgacttttcaagatccctcttccatcccagagagggaggtatagcttaatagaaagaacaaggctttggaaacagataggcttgtatatatatttctgttctgtcctttcttcctgtatattagttagctttttctgcataacaaaccaccccaaaagttggtgattcaaaacaacaactatttatttagcttttcattctgaggcccaggtggatggccatctcagcatgtctctgctgggctttcatgtatctgttgcaaggtggtgcactggcacatgcctagatgatctaaggtggcctcattcacttgtctggtgatgtataggctataagttagtacaataggggcagctgagccacgtgtcactcatttagaagggtgatcatggcagcatggttccaagagcaggaaaagggcaagtccctgtgtgcaaacatatttcaagcctctgcttgctgtatttgttaatagcccgttagtcaaagaaactcacatgactagctcagatttaagagtggagaaagagtctacacttcttgctgagaagatcagatatgctatagtatttgaaagctcacctggggaggaggcttccagggtacattgcatttttgaaacagtgactttggaagtcaggggacaagggcaatttgcaaagcttctcttgaggggatagactttcaatttactttgtgctgtatatccaccttatttccattgagggaggtttaaactgaattttcccacccatttccccatcatactacaactggagcaacagtcaattcattctcacttttttttttgagacggagtcttgcgctgtcgcctaggctggagtgcagtggcgcaatctcgactcactgcaagctccgcctcctgggttcacgccattctcctgcctcaacctcccgagtagctaggactacaarcacccaccaccaygcccggctaatttttttgtatttttagtagagacagggtttcatcgtgttacccaggatggtttccatctcctgacctcgtgatccgcctgtctcggcctcccaaagtgctgggattacaggcgttctcactttaacaagtatattttaagacatgcaagggtatggtagccagaagaggaagaattttgatcattttcccaatctaccacacatactttgggctaattggaaaacttcagttttcccttaaataaaatawgaatgataaatacctataatacattatagagctactgaaaggcttaaatgggatccataagtacaggatatagtgtggtatatatctatagcaaacattctatggtagctatccactaagctcctaaggatataaacaatgttttttatcttcactgcatttttcttgagacagagtttcactctgtcacccaggctggagtacaatggcgcaatctctgctcactgcatcctctgcctcctgggttcaagcaattctcctgccttagcctccgaagtagctgggattacaggcrcccgccaccatgcccagataatttttttgtgtctgtgtatttttagtagagatggggttccactctgttggccaggctggtcttgaactcctgacctcatgatcctcctgcctcggcctcccaaagtgctgtgattacaggtgtgagccaccacacccagccttcttcactgcacttttctagtgtttaccaccatagtaaatgctctgtaagtgaatgaattttgkgatgkattatattattatgccaaatattcattgtccctttccctatraaaggattgcacatctctgtccaaggccatgtgaatttagtgcatcccttggaaggagtatacacccctgccatagtatcaggcttagcaacgtgacttcctttgaccaataaaatgaggttgcaatatccaattcttagtagaagctttgagtctttgctgtttgccagtaagtcaatattttcctcagacttgagaataygtctcagtrgagactgtttgttcagcctaagtcctagaatgaaaagaaagatggagtgaagccatagccaacctgcagcccctaacatgtaacatgagtgagaaatacactattgttgtaagccactgagatttacggggctgtttgttactgtarcacaatctagctaaagcagactaatacacatttttggttcttagttgtgctgaaatagaggatatatccttgttgatactttaaggaaaaattgtgtttaatttaaaaattctcatctagtgactaatattactctgaaactatttgaaaataatagttatttacttatttccactttagtagcttgtcatgctgatttcctaaaatgtgtatcttcctcccattataggtaacaagttttcctgcagctctgaattttctcttttatatactgtagatggtgttttgtgatacgtattgacattaagtcacacagctggtgttttagcatgttgtttgcttttctaacacgtttcatttttatgaaatttactatattgattcttcatcattactgtactactactgaaattattggagataatttattttggagctttgtaattcctttagtttgcaaccaattttaccctaaaaatagctgttatgtgcttgtgaggaattttaacagggcataaatatttttctacagtttttctaaatatcaaaattatatatattcgatatagacaatacagatataaagaattgtacaaagaagaaaaaatgtctcctagccagagaccacaatggtatttttaacattatgctgtatttctttccagtccttttaagaattagcaagtgtcttatctagccactgctctttccttcagataaaacttagaataaaattaattgagacctgaatttccacctttgagttcaggtgattcctagttacaccctcttctaacaggtctctctttctctcctatttctctcttcctctctttctctcccctatttccactactgctcagcctctgctatagtacttgaaagctcacctggggaggaagctttccagagaatttctgaaacaatgactttggaagtcagggacagaggcactttgcaaagcttctcttgagagtatagacttttgtattcgtttgttctcacactactatgaagaactgcccgaaactgggtaatttataaagaaaagaggtttaattgactcacagttcagcatggctggcgcagcctcaggaaatttacaatcagagtggaaggcaaaggagaagcaaagcaccttcttcacaaggcagcaggaaggagaagtgctgagtgaaagggaggagcccctcataaaactgtcagatctactgagaattcactcactatcatgagaacagcctgggggaaaccatccccgtgattcaattatctccgcctggtctytcccttgatatgtggggattatggggattataattcaagataagatttgggtggggacacagccaaaccatatcaactttcaatttactttgtgctttatatccaccttatttccactgatggaggtttaaactgtgaattttcctacccacatcccttccatactacaactggagcaagagttaattcattctcactttttgtttttgagacagagtcttgctctgtcacccaggctggagtgcagtggcatgatctcggctcactgcaacctccgcctcctgggtttaagcaattcccctgtctcaacctcccgagtagctgggactacaggtgcctgccaccacacccaactaatttttatatttttagtagagatggggggtttcaccatgttggccagtatggtctctatctcttgacctggtgatccacccctctctgtctcccaaagttctgggattacaggtgtgagccactgcacccagcctcacacagcttttagtcaagtgataaaacacaatcttagaggcggccaatctgttttctcttaaatgaatgaatatttatttattctactataccagaaatagcctttttcctccatctcttcatcaacttatcttaactgaaatctggtttttcctgaggtcagcactttcccagacaaggccaagctagcccagagtgtgggtctgaacaatttgaaaggcataccttttgagctgacacagtccactggggcacagcgtaggcaatgattcttctaacgtgtctctttctctacgtttagtgctggctgtttactcttttctgctgcacttacctcaggatctgccatgaggttttgtgtctgccttgctttccactgcttcttctagatcattactgcctcactctcctgagacaaattatctcataccacaggtcatacttttttttttttgtaatggagtctcactctgtcacccaggctggagtgcagtggcacgatctcagctcactgcaaccttcgcttcccaggttcaagcagttctcctgcctcagcctccagagtagctgggattacaggcacacacccggctaatttctttttgtatttttagtagagacggggtttcacgatgttggtcaggctggtctcaaactcctgacctcgtgatctgcctgcctcggcctcccaaagtgctgggattacaggcgtgagccaccgcgcctggcaagtcataccttttgactctttcctagtccctgtcccatacttgcctccaggttacactctatcattcaacaaagacttagatgtgtggctcacagacttctctttccagtgtgccctcaccttccgtggagggccctcaaaaactccagtttcctcatttccactaatctctctacctcttccatgtacttccacgacactgttatcacctggaccttctaccttcaaaatagcaaatttaagcattttgatctgtaaccatgccctcccctcttaacagtcccagccggtctctgaccctgggaggatggaacctgggagggrgtagagcgtagagtgtaatctgaggcctgtgctaatagtgattgacagaggagcaacaaggatgctaaaaagtcatcaccttttactacttgtctttgcatcttggctctcactgcctagctttcatgcygtatcctctaatacsttttcatcataattttaatatcctgaacattgttgaagaagtgcaatgtttggagaacgttcggggtagctccaccaccccactttccacaagccatgcttctactttcccttctagcctcatattcaaccattttcgctattgttgttctttaatctccttgggtcctccagtccactactgccccctctcctttactccttccagtccatcaggcttctcctcttggattcatggtcttttatttcaataacattctcaccaaatactctaaattgccttgacccactgccacttcctcattacaatttggcaaaaccacaccctgaatgaacacaatggtttgctttccctgtgtttgccccgggcctcccaggctgctggagaaaaattacacaataggcacatttttgtaggtatatagtcaccatcaccaacctcagatggttcttaacacaccccagcaatcctgctrcttttttctgttaactttctttcctgcactctataatgaaaacttcaaaccctcttcactcccttcaaatttctgactccctcacctttcacctaatttccagtagatcattttgactcctttcactcagacaaaatctaagcttttgacaggacctcattcaattcacttgtacaaaacctaccctctacctacctctgcatctacttcctcagttttccctcctgtggcttcaggagaggtgtttcttctctcatccaggctagtgtctcgacaagagttgtagaattctttctatcctcaagaggcctactgtgttatttaatcattttctctccttttattgtttgctattatttaacctctcacatgcacctgaattattcccattaagtcttaatcatactcagatctcttccatctaaaatccaaacaaataaacaaatgaaaacaaaatgaaaggaacaaaaatagtcaaggtcatggtcctttttaactgctcttgttgagccgtactcttcatcctgcaaagcacatattttagttttagttatttattcattagtgtgggtatttaactcgtgtctgcactccaagtagagtgtaagtcacgtgaacagtgatgctgtgtggatttttgcttgccattggaccttcagctgcttagatccacagctggaacagagctggcattcactcaatagttattttttggttaaatttcttcattcattcagcacttaacttcttgacactgaatcagcaccaaagatcaagcgcatagacttgccttcaaggagctcaagtctggagaggaaaagaggtcaaataccccagtgatttcaatataatgtgatatgtgctatgaaaaggcatacacagcacaacaacttctgcctcagccacggtgagagtggagcatgagaggtaggcagaggcagtcaggaaagggttccaagatgagttgtcccttgcattgaatcctgatagagtttggctctgagtccccacccaaatcttgttttgaatagtggctcccataattcctccctgttgtgggagggacccggtagacggatcaagagattacaggctacagacatattaaggaggaagaaaagaagtagatctttctgtattccattggcagggcagagaggaaatgtggtattgtggggaaaattctgcagctagagtcaccaagtctggtttagaaggtcagctccgtcacttatcggctaagacaattctccttcctcagcctcctgagtagctgggattacaggcacacgccaacacgcctagccaatatttgtatttttagtagagacggggttttaccatgttggtcaggctggtcttgaactcctgaccttgtgatccgcccacctcagcctcccaaagtgctgggattacaggcgtgagccaccatgctcggcctttccccccattttaataaatttaagttttaaattatgggcccatgaatttttattttattaatgacttgtaatatgatacattcttttttaatgtttacattcattataggtagataattataggttgagataattataggttcacatgcagttgtaggaaataatacagagtgatcccttggaccctttacttagtttccaacaatagtaacatcataactaagatattgatacagtctagatacagaacatttccatcactaataaggatccctcttgttgtccttttatagccatacttctctcccatacctctctctcattctggcacctactaatttgttctccattttgtcattttgagaatgttatttaaatgaaattatataggctgggcgcggtggctcacgcctgtaatcccggcactttgggaggctgaggcgggtggatcacgatgtcaggagttcgagaccagtctgaccaacatggtaaaacccagtctctactaaaaatacaaaaattagccgggcgtagtggcatgcgcttgtaatctcagctactcaggaggctgaggtaggagaatcgcttgaacccaggaggcagaggttgcagtgagccgagatcacgccatggcattccagcctgggcgacagagggagactccgtctaaagaaaaaaaaaaaaaaatggaatcatataatgtgtaaccttttgggattggcctttttttttttttttctgagacaaagtctcactgttgcccaggctggagtgcagtggccggatcttggttcattgcaacccttgtctccacagttcaagcaattctcctatctcagcctccctagtagctgggactacagacatgtgccaccatgcctggcttatttttgtatttttgtggagacgtggttttaccatgttggccaggctggtcttgaactccttcctgacctcaaatgatctgcccgacttggcctcccaaagtgctgggattacaggcataagccaccatgcctggctgggattggctttttaaactcagtagaattctgaatgtattaatcgtttattcctttttatttcttagtattctgtggtatgaatttatcacaatttgtttagctattcattaattagaggacatcagaattatttctaatttttggctactatgaataatgctgctataaacattagtgtacaggtttttgtgtgaacacaggtcttcctttcactgggataaatgcccaggagtgcatttcctgggttgtaccgtagttgcatgtttagttttttgaagaaactgacaaactgtttcccattttacattcccaccagcaatgtgtgaatgattcatgcccatgtcagcatttttattgcactactttttattttagctaatctgacaggtgtgtagtaataccacattgttgtttyaatttttatttcccccaatgtctaaagatgttgaacatcttttcatgtgcttatttgctgtttatatgtcctccttgggaaaatatatgttcatgttttttgcctattttataattggattatttgcttttatatgttgtgtttgaaagtaattcatatattctatgtattagctttgttggatgtggtttgcaaatatttttcctctgtgtgtagcttgactttttatccttttttttttttgagatggagtctctcccaggctgtagtgcagtggctcattctcggctcactgcaacctctacctcccaggttcaagcagttctcctccctcagcctcccaagtagctgggactacaggtctgcgccaacacacctggctaatttttatatttttttattagagatgaggttttgccacattggccaggctggtcttaaactcctgacctcaggtgatccacccccctcagcctcccaaaatgctgggattacaggtgtgagccaccacacctggctgaatttttaccttaacatggccttttgcaaagccaaagcttttattttgatggggcacaatttatcaatttttgttttatggatcatgcttttggtgttgtctaagaattctttacctagttttagatcttgaaattttctcctatttttttctaaatgttttatggttttgtgttttacagttaaggtaattttgagttaagttttgtataatatgtgagattttggtcagggctctttttgattgtttgcttgcttatggatgtccaattcctccagcaccatttgtttaaaagaccatatttcctccgttgaattacttttgcacctttgtcaaaaatcagttgggcatatttgtgtgagcctatttttaggtttcttattaagtttcatcaatctatgtgtctctctctccagcaataccacacagtcttgattattgtagctattatagtaaatgttgaactcagactgtttcttcccactttgttcttttcaaaattgtttcagctattctagtttgtcttttcacataaagtttataatactacrtctgtatgtataaaaagttttgcttgaattttaatagaaatacattaaatgtatatatcaatttggggaagaattgacatctttactgtgttaggtcttccaatccattaacatggtaatatctcttcacttatttatcttctttgatttatgtcatcagtattgtgtagttttcagcaggtaagtcctgttcatgttttattagatttacatgcatttcatttttaaaaggaattttaggtggtattgtattttcgatttgggtccatgtgttcattgcttgtacctagaaatacaattgatttttgtatatttttcttgtttcctgagatcttgcagggctcacttatcaattcaaagagttttttttttttttttttttggtaaaatgtttgggattttatacacagacaatcatcttattcttgtcaggcctctgagcccaagtctgcacgtattcatccagatggcctgaagtaactgaagattcacaaaagaagtgaaaatggcctgttcctgccttaactgatgacattccaccattgtgatttgttcctgccccaccttaactgagcgattaaccttgtgaaattccttctcctggctcagaacctcccccactgagcaccttgtgacccccaccccagcctgccagagaacaaccccctttgactgtaattttgctttacctacccaaatcctataaaacggccccacccctatttccctttgctgactctcttttccgactcagcccgcctgcacccaggtgattaaaaagctttattgctcacacaaagtgagtttggtggtctcttcacatggacgcgtgtgaaaattgtgtataaattacctgagggttggtaattcataaagaaaaaaggtttatttggctcatggttctgcaggctaaacaaaaagcctagagccagcatctgcttctggtgagggactcaggaaacttccccaaatggcagagggtgaatgggagctggcatgtgcagagatcacactggaagagagcagaagtgagagagagaaagagggaaggtgctaggctgtttttaacaatgagttcttgggagaactctcacaggagccaatacaatgagaacttctcattacccagaggacagcaccaagcccttcatgagggatcggcctccgtgatccaaacaccttccaccaggccccacctctaacattggagaatcagatttcaccatgaggtttggatggtcagatatccaaactatagcaacaattatgttatctgtaaatagtgagagttttctttctttcttttcactccatatgtttgtaattgcttttcttgtctattgcactgacaagaactcccagcactatattgaataaagtggtgagagcgaacacccttgccttgctcccagtcttatgagaagagcattcagtcttctctcaccattaagtatattagccgtaagttttttgtaatccggtttatcaagatgaggaagttcccctctattcctgtttatctgagtttttaatcatgagtgaatgttggaatttgtaagatgctttttttgttttttttttttgagatggagtttcactcctgttgcccaggctggagtgcaatggcacgatctcggctcactgcaacctctgcctccctggttcaaatgattctcctgcctcagcctcctgaatagctggaattacaggcacatgccaccacgcccagctaattgtgtatttttagtagagacggggtttctctgtgttggtcaggctagtctcaaacttctgacctcagatgatctgyctgcctcggcctcgcaaagtgctgggattacaggcgtgagctaccatgcctggcctgtttkttttttttttttgtaatgggggtctcattatgtcactcaggctggagtgcaggggcacgatcacggttcactgcagcctggacctcctgggctcaagtgatttcccccccatctcagtctctggagtagctgggaccacaggtgtacaccaccatgactggctaattttaaaattatttatagaaatgaagtcttgctatgtggcccaaccagtttggtctcaaactcctgggttcaagcaatcctcccacctcggcctcccaaagtgtttggattacaggcatgaaccattgtgcccagctactttttttgttttgatcgaaattatcatgtgatttttctaacttaatatagtgcattacacatattttcaaatattaaaacaaacttacatctctggaatatatcccacttggtcatattgtacaattctttttatatatttctgaattatatttgctaatattttgctatggatttttccatcaatattcatgagaagtgttggtatttttttctttttgtacggtcttttgctggctttggtagtggggtgattctaacttcatacagtacattggcaactgttccttcctcttctatcttctggaagaggctgtatggaattggtgttaattcttgtgtaaacattttatagaattcatcagtgaaagcttttgggcctggagatctcaggttttttttttttttagtttaaaaattacaattacaattttctctagttagaggactatttaaattatccttttcatattaggttatttgtagtaatttgtgccttctgaagaattcgctcatcttgtcaaagttgtcaaatttatgttatgtggtgttatttatggcattcctttttggtgtctgaaggttctgtaattatattccctggtatgttcctcacattggtaatttgtgtcttctctttttcttttttctttgcagtcttgctggaggtttgttaaatttatttatcttttcaaaaaccagatccttggctgggtgtggttgcccacacctgtcatcccagcactttgggagactgaggcaggaggatcgcttgaacccacgagttggagaccagcctgggcaacatagagagattctgtccctaaaaaaataaaataaaaaaatcaaccaagcctggtgacacacatctgtggtcccaaactactccagaggctgaggtgggcggatcccttgagcatgggaggttgaggctgcagtgagctgtgatcgcgtcactgcactccagcctgggtgacagaccaagaccctgtcaatcagtcaatcaatcaatcaatagcttccctggagactccagcctgccaccagctttggtaactagtggccgactgtcaggcctctgagcccaagcctgcacgtgtacatccagatggcctgaagcaagtgaagaatcacaaaagaagggaaattggccggctcctgccttaactgatgacattccaccattgtgatttgttcctgccccaccttaactgagtgattaaccttgtgaaattccttctcctggctcagaacctcccccactgagcaccttgtgacccccgcccctgcccgtaagagaaaaaccccctttgtaattttccgctacccatccaaatcctataaaacagccccacccctatctccctttgctgactctcttttcggactcagcccgcctgcacccagttaaaataaacagccttattgctcacaccctgtttggcggtgtcttcacacggatgcgcgtgacaccgatctctttgagcatcagaagcgcatgacaccgaccatcttctctttgagcatcacaagcgcgttacaccgaccatcttctctttgagcatcacaaatggttttattcattgctgtaggccaagggctcaaggctgtttagcacgaagtagacactgggtaatcatttcttgaatgaaacacattttacagatgaggcaactgaggctgagagaagttaagatcacacaagtggcggcgctggtcacctttacattgcaattcactaggaagtgttcaggttgctctgaccgcagggcagatattggggctgcggtgcccagttccaaaggtgaaagcttgctccgcgcccgccagggagctggtctagcggctgcagtgttaacccgaggccccgcccccaacgggtggcgcgaggcggggcgtaggtgagcgctgcagagaggctgcgccttgggccgcctgtcgcctgtgcgcctgcgcgcggcgccgaggggacggggtccgactcagaaatggcggcctccatgttctacggcaggctagtggccgtggccacccttcggaaccaccggcctcggacggcccagcgggctgctgctcaggtaatgccttccagtccgctgtcatctcgagggtcggcaggagaaagggtgaggtgtgaggggtcccgtggcccggctcggggtcacttcgccggcagtgacattttctgggtgccctgcaaggccctcgggcgacttgcctgggagtgctgctcgccaggactacgagcgagcccatgtttgcgcggctctgacccagcccttagtccgcgaggatccccggcggcccggccgtggctgctcctgcagtttctaagagatgggcgggagcaggtgggctctgagtggaggtgagggggtcaggacattttctgctgccattccggcgtctggcacggtgggctgagacttgcgccgcccctttttgggcaggggggaatgcccttcaaaagtacttttgtgtttcttgggagctgtcataggtgggaatgtcagaggaccagcggtgcttactgacttgccttttgtggggcaaggtagggaagtttcccctctcctccaagtagttgtatactgttctacttgttaatagcagtaataagattatgttttctacctaaccagttggagaggtaagaaaataatcttttgtatagccttatttctggataggctatagcataatagttactggccttgttttgaatatttgatgtgtgccaggtaatgtgctaagcgctttacgtgtagtttctcaggtttttcagcaactgtgaggaagtcattcaacacctgcatcattgttgaacatattatggttaagagaacaagtaatttggactaggtcatataggaggtaagatcaaagctgagatttaatcccagaggtgtctggttctaaagccgtgtacttgagttggctccacaacttcgaaaacaaacatcttccttccaactttgacaacaaaaaactgtggaagggcattattggtgtcctaagtcaattccagagttttgggtttttttctgaagtaactcttcatacatgtcatagtatgaattgatttagggccctcccgcccctacctttttttttttttttcatttttattgaagttgttcatactttcagcctaggggtagtgagttctgtgagtttgcttcccgatagaagtgactttttgaccttgaacttccttcttatgaatcttagaagagtgctatttagtttttagaaaatggggaatttagtgacaaatacgttttcattctagtcaaaatctttatctttttggaagttcatttaaaagccttcatttctccttatggaaatttccaatattattttctttataacagttgctgtcttctaccctggtattaagaaatgcagctctagagtttggaaggaccttagtccaaccctttgcttttgtagatgaggacatagaagtacggagtcttaagaaactcgttcaaggtcacacatttaatttagcaatttgttttccacatttttttttttttttccttgagacggagtcttgctctgtcgcccaggctggagtgcagtggcgcgatcttggctcactgcaagctccgcctcccgggttcatgccattctcctgcctcagcctccctagtagctgggactacaggcgcctgccaccacgtccggctaattttttgtatttttagtaaagacggggtttcaccgtgttagccaggacggtctcgatctcctgacctcgtgatcctcccgccgcggcctcctaaagtgctgggattacaagcttgagccaccgcacccggcctgttttaaacatttgtttaagttctctgaccctcctccaatttcttggtatctttagcctagtgtaccttcgttgaaaatagatatttcagcatatgtctttaagaataaggacattcttccaaataaccgcagtgatcatacttaggaattcaacattgctgtaacatgaatatatatagtttagattcagatttttctagttgtccccaaagtgttctttatagacattagattttttaaaaatttaaactgggatgagaccttgtgacattttctctgaccaactaaccaattaggtgccacctagtgacttatgtgctagtgacctagtgctcttatatgtgttgcagttgtttatttacatgcctgtgaactctgtggctgggacccaagtgtctttatttttttagtgtccctagcccactgtctagttcatagtcatcacaaaaaatatttgagtgtatgactttttgccaggcttatgctagttactcccctacccactaatttttattattattttgacgtataatttatgtacagtaagatgtacagcttaagtggatagctagattaatttttatgtatgtattcacctgtgtaaccatcgtctgcatcaagatatacaatgtttccagccctcagaaggctctcatgtcctctctcttatcaatactccctgacagaaggtagcaaccaattatgacttctgtcaccataggctaattttgactggttttgaacgctataaaaataaatcatgtaagtatatattcttgtttctggcttctttctctctacattatgtttgtgagattaatccatcgatgtgtgagccatagtactttttttctttttatttctctgtagtatactattatatacatataccacagtttatccattctcctgttgatgggcaatcagctaatttctgttttctgtctgttataaataagcctgctctggacactctagacatttttatgtgtgccttttgacagatgtaaggactaatttctattgatacatacccaggaatgggatttctgagtcagaaggtggaggtatactaaacagtagtttgagaggttgctgggtttttttttctttttttttttttttaacttatttatttgtttttttagacagggtcttgctctgttgaccaagctggaggacagtggtgaaatcacagctcactgcagtctcaaactcctgagctgaagggatcctcctgcctcagtctcaggagtagctgggattataggtgtaagccactgtgcccagcttggttgctggcttttaatattgaagtgacactaaatcaaggaattgagctacctaggtcaaatgttaccaaggattttagcttgctaaatggatcagaaataagttgctattatatatgattgatttgtaagactagtagttctcataactgtagggttcttaagaatcaactgagtgacttgttatgaatgcagatttccttgggcccagtccagagattctaatagtgcagttgagaatgggtctcaggaatctgcagattacaagcacccagttaattttgaggcaaaagcttatgaacctactttaagaaacagattgtttctatgacctctttaaatttaattcttaggacactgtgtgtttcatatgaaccatgtttcagtatactgcattctgtattgagattatggaaatgcgtggataacatttaaatgtgtgattccattgaccagtcattgggtgcaggctgacagtgggaaggaggtgtgactttgggcaagtaggctccagtaagaggacttggctgagagctgtcagcaaccagcactcccagcagcagcagtgggggctatgaatgccttggtcctgaatggggagtgccagggagatctgggcagcatactgcaacatccactacagatgaagccatggttttgaatatcgagtgtatgaaagagtaatggtatcaaatcattttattattacatatctagtgccaggtgacttgttaggtgtggaggaatggtagagagaagaaaattgggaaggatttttggtttggtggaaaagatgagattggttttagatccgctgaatttggcattgaggtagaactgccctgtagatcattggagatatgatagtaaagctgaaatctaaaataaggaatagagatgatgaggaaataattaaaatgacagtggtaacagtgatatttagctgataggctagcttttagttttatgctgtaattcaggtactctgaatattgtactttgctaatgtaatgtaacagttttgttatagttatgaagaaccaagtagttaacaagagtgactgccaaatcactgtcatatataaatatgtccccaatctttctaggttctgggaagttctggattgtttaataaccatggactccaagtacagcagcaacagcaaaggaatctctcactacatgaatacatgagtatggaattattgcaagaagctggtgtctccgttcccaaaggatatgtggcaaagtcaccagatgaagcttatgcaattgccaaaaaattaggtactaaattaagaaaagcttttgccaccttgacatgagagctctgagaagatttgaagtttgtttttggtttgataacaacttttagcttttttttaaaaaaaatacattttctttgcttaaaatagaaggtagaactttattattattgaaattctaaaattattattattattattattatgagcacccataatgccagtgacgtgggagtcacttacattggcattaggaagctgaagtcctgtttttagttggaatataattatggggaagggaattctactactaccactctaactactctggagcttaaaggatggcagttgtgatgattcttcagggaaatggtgaaggaaaatcttagctgtttatgtgcttataaggagaggtccgtgcttccccctccatttttttgtcatgaaaaatatggaaccaaagaggaacaaaaagtagagtgctagaatgtaaactccttgagagcagagtttctttttcttttctttttttttttttttttgagacggagtttcattcttattgcccaggttggagtgcaatggtgcaatcctggctcactgcaacctccgcttcccgggttcaagggattctcctgcctcagcctcccgagtacctggtattacaagcaccaccaccatgtccggctaatttttttgtatttttagtagagacgggttttcactatgttggccaggctggtcttgaactcctgacctcgtgatctgcccgcctccgcctcccaaagtgctgggattacaggtgtgagccaccacatacagcccgagtttctttttcttatttgttcactgatatatcccaaaatcttagaagaatgcctgacacttaggtaatcaataaatactaaatgaataaatattaaatgaatttaatagttgcccatgtttattagcagattcctttattgataacagccttaatagcttttgtcaatttgaattaatctcttaatcaaaaaataatttttg

SEQ ID NO: 97471 - DNA, 15096 bp, Homo sapiens
catctcactgctctggtccaagcattggtttttcaccttgataactacaacagccactatccctctacggtactgtgcccagaaatctatccttcttgcaactgtcaagcaatcctttaaggcaagatttccttttttttttttttgacacggagtttcgctcttgttccccaggctggagtgcaatggcgcgatctcagctcactgtaacctccacctcctgggttcaagtgattctcctgcctcagcctcctgagtagctgggattacaggcatgtcccaacagggccagctaattttttttttttttttttttttgagacagagtctcgctgtctcgcccaggctggagtgcagtggcgccatctcggctgactgcaagctccgcctcccgggttcatgccattctcctgcctcagcctccccagtagctggaactacaggcacccgccaccacgcccggctaattttttgtatttttagtagagacggggtttcaccatgttagccaggatggtctcgatctcctgacctcgtgatccacctgccttggcctcccaaagtgctggaattataggcatgagccactgtgcccagccatggccagctaatttttttatatttttagtagagacgaggtttctccatgttggtcaggccagtctcgaactcccgacctcaggtgatctgcccacctcggcctcccaaagtgctgggattacaggcatgagtcaccgcgcccggcctaagatttcttaatctcagcagtattgacatttctggcaggataattctttgtggtgtgggcatgtctgttctgtgctttgtaggactgagccacatccctggtctctatatgcgacatgccagatcacccctacccgcagttgcaacagtcaaaaacgtctctaaacattgccaaatgtccgctggagggcaaaagtgtcccaggttgagaaccactgctttaaggatgggttatctctgaatgcaggcacctgaataccactaaacattttatacaggagaaagttcaaatttctttgctccccacaacggccccctaacatctagaataatccatggctcatagtaggtgctcaataaatatttgaaaaagaaacccaaaccaaggtcattcacccctgtacctttttctctagttccttcccctgttccaaagtccagctacaagctagtcgagatcacccaaacataacgtgcttgcgttttccatattttttcctgtaacagtctctgtcttgaaccctgccctgtaccccaactcattgtcagcatctggtgcaagtgccagtcctcctggaaagctcccctcgtcttgcctgaggcttcctgtggcctccagacactgtgcatatgtctcacccactctactgagctttaagcagagggaagacagaaaaagagcagcttcctcactgcaggtgggtgtactagtgcaggacactgaacgcctagaagcagcaagatgagtcacatcacagaatctcagttctgaaggtggggatacagggtagagctgagaatagcacaagtcttcatgagggaaaagttagggcccaagactctgtctttcactttacacaagcagaatacatccaacagaaaacaagtttacaccctgggacagtcaaatctaaaactctggcctcaggtacagcgcagactgtaggcgaggaaccagactgaaagccgggcagaacttactgagagtctgcactacagagaaaaagaaacagtcaaggtctcctgtcccatctatgcgttcttgggggtcagaaactgttggatttctaatagggaccgggtactttggaggtgccctgtcttctcttaggccacttccccttagttttcagttctgcatcaccaaagtaaccaccctctcctccaaggactccatggagccagctgagcatggggacctgggtcttcgggcagttataaatggaagccaatgggacctgcaggaagtcatctaggtttagatcttgttatgaccaagactgggactagagtctatctgtcgcatcctccagtaacaacatccgtgagaaagccggcccaggaaaggcaatgcttacccatgctcatgcttcaagtagaatagagctgaccattgcacaatatgggtttgagaggcataggtccacttagaagtggctttttcaataaaaattgcattgagtgtgcctgccttccctttcacctcttcaaccctcttttgcctctgccacccctgagatagcaacaactcctcctcttcctcctcaaggtaaagatgaggatgaagacctttataatgatccatttccacttaacgaacagtaaatacactttctcttccttatgatttttctctagcttactttcttataagaatgtgatatataatacattactaatgtgttaattggttgtttatattattggtaaggcttccagtgaatggtaggttattagttaagttttggggcagacaaaagttatacgtggatttctgactgcacagggtcagcaccccaacccctgtgttgttcaagggtcaactgtgcttgttaagactccaagagtctctcagtttcaggtcacaaccccaaggcaagaatttctcttctccatcctcaccctatcagaggttccatagtttgaaaggaacccaggaaaggctctcccaagggactgggccctatctggggcttggaggtggggaggtgggagttaaggtcaggcaaagactgaacaaaaacccttcctgtttatttcaaaagtacaaaaagagggatgggtcatagatgagaacatgacttaccttccattctacctgggtgccaggagaagaggtatggcagctgctaggttatccaaataaatcatcgagcttgctacccccagctttaactgactcattctatctggtatctcatcacaggagagtgctcagggctaggagtccaaccctcactggatgttcaccttcctgtggcctggggtatgtgctcagggaggggtggtctctctgcatgatggattgaactgctaatatgtatgaatccatgggcccagtgagaggaagagaaggaaagaaaacatcagctcactggtttccgggtgaagataccggcagagcagaccaggggcacctgccaaacatcaacagatccagatccgttaataggcactttaattaattaattaatttatttatttatttattttttggagacagagttttgctcttgttgcccaagctggagtgcaatggtgcaatctcggctcactgcaacctccgcctcctgggttcaagcgattctcctgcctcagcctcctgagtagctgagattacaggcatgcgccaccacgcccggctaatgtttcgtatttttagtagagacaaggtttcaccatgttggccaggctggtctcgaactcctgacctcaggtgatccacccgcctcggcctcccaaagtgctgggattacaggtgtgagccaccaggcccggcaacagacactttaatagagcaggtttctccaacctctttcccttccttctgtgcccttattccacctctacccagtactagaggaaccagtaggttagcagtctcctaggaacagctttggagaaagactctggagtaaaatagaaaaaatcaaccgctatagcaagggagacttgtcttgcttacacgaaagaaagggggcacaagtaaggatacacacccatgtcagagccacgctattagcgaattaagacaaatgacacagtaggttgaggcccttgtcttttggggactatggggactgagggaaagggggaatacagccaagcagaagactgtcagacctctctgctcagaaatgcaaatacagaggaagatgctaaaaaaaggaagaggcccaacatgtggggaccaaccagcacacaaggccacagcccctctggacctaagcatgcagttccatggtaggggcagtctgtgaccctgggcactatgctgtaggctctgggattccctccttttggcaaataccctcccagggatcaaggagcaaggctcacagatgctgggaataagtctctagattaacgctagtaaccagtttcctgaagccaaagcaaggccacagatgacatttaggcagccccaaggctcactggtgcttaagagagcaaacacgtgctagaattaagtgtccaaaaaccagagtaggtagttccaggccaagagtatgggtggccctcgcctttctggcaggggctgggttaggttctgctcagtggccttgccaggaacaaagcctggctccatggagattctctgtggtttaagaatacataagcttgcaacctctcctggctgaggggactttaagcacattatttaaaagcagcctggccaggcgaggtggttcatgcctgtgatccttgcactttgggaggctgaggtgggcggatcacctgagatcaggggtgtgagaccagcctggccaacatagtgaaacctcatctctactacaaatacaaaaattagccagggatggtggcgcatgcctgtaatcccagctattcaggaggctgaggcagaagaattgcttgaacctggaaggcagaggttgcagtgagctgagatcacgccactgcatgccagcccgggagagagagtgagactctgtctcacaaaaaaaaaaaaaaaaaaaaatagctgggcacagtggctcacgcctgtaatcctagcactttgggagggtgaggagggcagattgcctgacctcaggagttcgagaccagcctgggcaacatggtgaaaccctgtctccactaaaatacaaaaaattagccaggagtggcagtgtgcacccatagtcccagctactcaggaggctgaggtaggagaatcgcttgaacccagaaggcggaggttgcagtgagctgagatcgtgccactgcactccagcctgggcgacagagtgagactccgtctccaaaaaaataaataataataaaataataataaaagcagcctccttgaacctggactgttccagaaggggccatttgtttagtcattagcttctgccagaaccttttactaataaattgatctctgacaccacatgtgagcagatatgcctaagcctctaaaacaacagttcctaatttcctcattaggaactccgttgagaataagagatacggatcttcttgcctaaaagtctcataggcacttttaagatttacttcatagccaggcatgaggtagtgcctgtaggccaccacatggggaggctgaggcaggaggatggcttgagcccaggagtccaaggctgtagcatgctgtgaccacatctgtgagaataaccactacattccagcgcatgcaacacagcgagaccctgtcccttaaagtaagttgtttcgtatcttcatagtcccaggctggagaccactgttttttttggaatcctatttcttggaccctgcgtttgtaaggcatcaggacagagccctcaagtctaagatggctgctgcggagaggcctgtgaaggcaacctctactgccctctcttggccatcaggcgggaggagtggttagacgtgcttgattccttgtggcactgaagtcctgcagtttctgccccggaatgctgggggcagataaacttttggcagctttcattagaatctctagaaagcttactcttcctcgaactgggctggagacaagggggtacacatagggacccctgtgaagttgaagtaccacagcctgggtgctgaaccggcgaaggcgtgtcagggtggtccgctcacacaggagggaagcagtgccaatcctccactagacatgccctggctggaggccctagcagcagaggccaccctgccctttaacttagaaagacattaaaggaagctgagaagcttaaagatggcccactgcctgggcagaattccacagagttccacatcgcttgcaatatccattgtatttgtagggggtcagggaacagtggaatgagatacacacacaaytgtggtgcgagagaccaggtgttayaggtgccaggacccctagaactcctcatgctcatcytcgctgtccaaagattctgtgcctacttcataatccttctccagggcagccaggtcctctcaggcccagagagctcaccttcctccatgcccctgtccacataacagtgcataaatgcccgcttggcatacatcaggtcaaacttttggttgaggcgggcccaggcctcagtgatggctgtggtattgtttagcacgcagactgcccgctgcaccttggctacagcacccccrggcaccactgtgggkgactggtagttgatgccaacctaagaaaaaacaaagaagtataagcgcctggttctgtgtttcctggaagggtctgtacagggatccctggaactagggaaggggcatttgtcaacttgtaagaaacaaagaggaagatgatcaccaccacaaggaaacaaacaagtctagaatgagggagcttctgcaagacaagactagtgccttcaaagtcagtcaagaaaaagggggccggatgcggtggctcacgcctgtaatcccagcactttgggaggccgaggcgggtggatcacctgaggtcatgagtttgagaccagcctagccaacatggtgaaaccctgtctctactaaaaatacaaaaaatagccgggtgtggtggcgggcgcctatagtcccagctactcgggaggctggggcaggagaattgcttaaacccaggaggcggaggttgcagtgagctgagatcacgccactgcactccagcctgggtgacagagtgaagctccgtctcaaaacaacaacaacaacaaaacaaaacaaaaaacagggtctcgctctgttgctgaggctggagaggggggtgcaatcatagctcactgcagcctaaacctcctggacccaggtgatcctcccacctcagccttctgagtagctagaactataagtacacactagcaagactggctaattttttaaaatattttgtacagatggagtctcacattgcccaggctggtctcaaactcctgggctcaagccatcctcccacctctgcctcccaaagtgctggattacaggcctgaatcactgcacccagcccagaatatataatacattttagtgtttctcatcctcaaaaaaaaaaaaaaaaaaaaaaagtcaacttcccattagtgtctctagggacaacaagctgaccatgtcctaaaggcagcctattcttcccttaagcagctaaagatcttcctaatatggaggcagaaacagtctgtttcccagatagcctacccctcatttccatttctgagctacaggacaactcttccacactagcaagcagctattattcctgcctgtcctcctgttgtggtcatgtccacagcagtgtcatggggcaggaaagctatatatgttttctttttttatttttatttttttgagacggagtcttgctctgttgcccaggctggagtgcagtggcgcgatgttggctcactgcaagctccgcctcccgggttcacgccattctcctgcctcagcctccccaacagctgggactacaggggcatgccgccatgcccagctaattttttttgtatttttagtagagacggggtttcaccgtgtcagccaggatggtctcgatcatctcctgaccttgtgatccggacacctcggcctcccaaagtgagccactgcgcccagccgctatatatgttttctaatgccacagctgccatctttaatctttctggagtcttatcccacaacaaaacccaaaaaacaaactaggtcatatgcccagcaccctgggaaggtcaactgataacagggtggggcataaatgcgtgcttcttccttattaccgcaaaaggaagagaacgcatccagacgcagaacacaagaagcctctgaccttctgatccgcactttccccatcatctgataatgggcctctctggcttctgaaagccttcccttctgagcaggagcctatagcacgtggttatgtccctagcacaagtgacaaggaggccattctccccatgtgactggcagccctagggaacgcctttttaccaggctaagtaagatgaaattgatacttttcctttcatcaaggcaatctttcaagtagaacccacgctggcttacagtccaaaggcctggcttctagaccagctgagacctatccagttaaaggaatcctctagcggggcacagtggctcacacctgtaacactttgggaggccattgtaggtggatcacccatgcgcaggagtctgagaccagcctgggcaatatggtgaagccccacctctccaaaaaaatacaaagttagcagggtgtggtggcacaaacctgtggtcccagctactgaggaggctgagacaggaggactgcttgagtgcaggaggtcgaggctgcagtgagccaagatgacgccagtgtactccagcctgggtgacagtgagatcctgtgcatttgttcctcacacctcctctgcaggaagctcccgtcttagcaggtacacaggccatgtgctaactgccctttacccccacttgccttgaaacctgtgggacacgtccgcaaaacaaatatttgcttggttttaatggtggcaatggtggcattctcgtccttgggcaccacttctccacagtagagcaggcagcaggccatgtacttgccgtggcgaggktcacacttggccatctgattggagggctcaaagtagacactggagatctctgccactgagagctgctcatggtaggccttcttagctgagataatgggtgagtaggtcaccaggggaaagtggatgcgagggtagggcaccagattggtctggaactctgtgaggtccacgttgagggcaccatcaaaacacaaggaagcagtgatggaggacacaatctggctgatgagccagttcaggttggtataggtagggcgcaggttgtggcagcagagatcatagatggcctcgtctaccatgaaggcagtctgagtgctccagggtggtgtgggtggtcaagatagagttatagggttctacaactgtcatggacacttgggggactgggtagatagcaaattccaacttgagccagtgccatccccaaaactatggaagatcaggaagccctgaagcatggtgcactggtctgtctggagcaggcaataacatcattaaggatgtagatggcatgtcacccgtcccaaccctcttctcctgaggaagcttctgtgttgaaagctactattacctaactatacttgcattcacttctgtattttagaaagactttgaagtatagtttatacttaagtgtgtgcatcttttggacatacaatgaatgatttgacatgcgtagacacctatataaccaaaccaacagagatacagaaattcccatcaccccgagaaagttcctttgtgtccttttgcttcgcctccatagaggtgaaaaaagatcacctgtccaggtgtggtggttcacacctgtaatcccagcactttggcgtaccaaagtgctgggatggcaacaccccatctctacaaaaaaatacaaaaagtatctgggtgttgtggtgtgcacctgtagtcccagctactcaggaggctgaggcgggaggaccacttgaacccaggaggtagaggttgcagtgagctgtgactgcaccactagtggcattccagcctaggcgacagagcaactctctcaaaaaagaaaaaaaaaaaaagatcacctacaggaggtttggagttcctagggaaaagatgacttggaaaggcagtgttgtgcatacgcaatggtagggatgaggaaggacggatgatttgcactcagagagccaggccctctctgttttgttgccctgccccctagttacagcagagtgggagtggtggtggcatcctgttgaacatacagattaccaggcctcacctcagactggaacccaggaacctgcagctttaaaaagtaccccatgtgatgctgatacagctgtttcttgggtaagaaaatcatcagtctataccagacacatggtagtgacagtataaaagaagtctacccctaggaggtattttattttcattcttgaggaagggagcacagaatcctactcctcaggtcacttccaagtcctcagtctctaccgagcagcagagagtatgtctaggcaatccccctacagcaacagggccaaagtcctggctcacaggcagcctcactggtggttctcaatgcctcggataggggaagggtgaactggtgaaatggttgagtgctaaacaggagcccctcccacctggacagatctgcataggagtctaagaacaacaagctgagctgctgtagagatggatcaaaggtcaaagaaggcttggatcagacagacctggcaaagtgaggaaccatcagggcagaagcttgagtccacaaactcaaggcagagcagtttattcaggcttccaaccctagatccgtacccaggacagaaaacacatatccccttaggagaagctgagtggactgacaggctggaggaatgatgtcaggtaccagcacaggctgtggttgcctcccagccaggaagagggttaaggatgcaacgacctcctgtaggtgccagaggcctgctcaccagttttcagattcactccagcaccaaatcgatgatctccttccccgcagtgtagtggccacgggcacagttgttggcagcatcttccacgccagatatcagctgttcagggtggaacagctgcctataaatgtcagttcttaccccatcttgaggggaagaaaggacaaaggtaagacaagctggttcattccccaagggaacgccagacaccagaacctttgctgctaagcctccccaggtacaactgctcaacagagtgatgatgcacggcatcttctttttcttttctttctttttttttttttgagacggagtttcactcttgttgcccaggctggagtgcaatcacgcgatcttggctcaccacagcctctgtctcccgggttcaagcgattctcctgcctcagcctcccaaccagagacccacttctaaggccaggtcctgcctgggcttgagacggggagagcaggtggcaccttcagtggtcccttccctctacagcgacttcattgtgctaggtgaggaatcagagtggtgttaaggagaatctcacttcactttcgaatagggtaagaatacagactaatgtaaattttcaccatggaaaaagaaaagaaaaaaaaaagaatacagactaatgaagaaacccagtgcaccatttaacatctaaaataacagctttaaaaaatggaggaggggtagaattgtcacgattagaaaacagaggagatccagatgcagaagggaggaagcaggaaagcctccggaagccagcaacagccaagttcacataggcccacatcctacgtggggggggcctatttcagttaaggctaagcaggaggccagtatgaatgttcttggctccctgcttcttacgcaatgggccaccctcaagagtctgaggacagggaaaagcaagttttaaatttctgcttttacatctgctcctttctgcagtctgcgttctaggcctgatccctgactcctatctggcagtttcctggcagagttgtgcgaatgatcttcctctcaatataggaagcccccaggacctcttctgaggacagagtctagacaaaagcaatagacttcagacttcaatgctgttcatggcaggggactgcttccatctcaagtattttccccttaagcagagctcccatctgacattggcgctagcaaaaactatggcctgggggaaggagcccccactcctccgtccactcacctatgacagcaggctccaggtccacagacagcccaggacacatgcctgccaggctgggtctccctgaagaaggtgttgaaggagttatcactgctccccagggccttgtggctgggcatggtgccactgggctggatgtcgtgctccaggcagtacagctcccagcaggcattgcccatctgcactccggcctggcccacatggatggagatgcactcacactgtgagggtgagcagaggaatatgccagggcatgagtggtgtggagtgaaaaggtggggacttgaaaagccttccctgggagcaccccttgtctttcctccctaaaggctgaagcttagtgttacctagtccaaagttcagacgactggccgggtgcagtggctcatacctataatcccagcactctgggaggccacggcaggcagatcacctgaggtcaggagttcgagatcatcctggccaacacagtgaaaccccacctctactaaaaatacaaaattagccggatgtggtggtgggcgcctgtagtcccagctactcaggaggctgaggcaggagaatcacttgaacccgggaggcagaggttgcagtgagccgagatcacaacactgcactacagcctaggcgagagagcaagactccatctcaaaaaacaaaccaaaaaaccaaagtccagaagactcggttctctttccaagccttcccatactttaagccaaaccaccttcaggccctcattttccttcattcactcagagcttaagaaggtggttatgcctaggtctctggggcaggaactagagaaagccaaaaccaaatagccaaatcccactgcacagtgtcctccctgctgtttggggtgccttgggaaagctcagagtcctgtattccaagacaggcccaccaagagcttctagattcaagcactggggcctagaagaggaggtctcccatgggcagcaactgtctcccccacatcccaaaagggcagaagactaagttcagacctgtggatcaactgaggaagcagccttggagttagagctagccttctgaaagctcacccacaaactccccttttggggggacaggcacctactctagacacctgtccctgccaactgcagtacaggcaagctaatccaagtcagtactcctaaattaagcgtcgcagcggagaccagaagacccaccctacctttcgactcttttcactcaggtaactcctatgatggataaaccctccctcccttcttctggtccttcacccaacccacggtctagggggtcaatttaaaagggccgagcacctcccagatgtagaagggatcttctagggtgacagtaggcaacagtttaacagtcttaggaactaccctctaagacagcctcagagcctttaagggggctcagagcacaggcagggatcaagaggtttccggggggtacagggacctctgtgtacccaccccaagttctcaggcttttttttttttttttttttgctttgatttctttgagaccgagtttcgctcttgttgcccaggctagagtgcaatggcgggatttccgctcaacgcaaccccagcctcccaggttcaagcgattctcctgcctcagcctcccgagtagctgggactacaggcatgcgccaccacggctggccaattttgtatttttagtagagacgggtttctccatgttggtcaggctggtctcgaactcccgacctcaggtggtccgcccgcttcggcctcccaaagtgctgggattataggcgtgagccaccgcgcctggccagtcaagttctcagttttaacagagggacctcaagtccttgggcaccaaacaggagaaaagtggagtcaagaacattcttttcaaggccccaagagcttacaggaatccctagtcaagtatggggccaaagggcgaggacctctacctctggccagagtcgggcgcccaagacaaagacattcaggggaacaggttttgaactggagaaacctgttagagcttcccaatcatcctggaccttgcctcctgcgcggcaatgtgatctcagagggaggcggggaccgcagctacaagcgggcacctctttgtccaggaccgcagcgggagaaatacggggcgggccctagatcccctccaggctccagagcgcgctctgccgcagagccgactccgctgcccgaccttgagcgcagcgcacaaacgaccccaccatgttctcgcccacgctttaccgctcgccagcctccctagtccctcagcgcttctggggcgctcagaacgtttctagctcgcaccgcctcccgtaggggaagcagggtagaaaagtggtgccgggactcctcgggcgtccccgggctttctgcagagcccaccttcgccctgaacgcccaaacacccctggcatccccgcgcagcccaccccacaccctggactgccggggcgcccttccgttttgcgctgcgggcccttcccaccgaccccccgtgcgcccccggcatcctccccatcgtgcgacaccctcccccgcacagcatccttcaccatggttgatccagtagttgaagttggagggtcgctgactgcagacaccatacgggtctccagcaacaccacgaatcccaacgcgcggttgctggcgggaccttataaatccccggagagccgccggttgtgtctcctggcggggactcccattgggtcgcagctggacagagatcggatcgtcccccgcgcgactctcactgggccaggcccccaccgaggcccgcccctctctccgctattggccagccgcttacgaaacagccccgccgcagcggtcattgggcagttggtaaagccaaagggaggcagagtcgggcgtccgcgtcctcccggccagctcgaccgtcttctctattggggtgagtgctgggtctacgaggtggaatctttgggggaaacaccctcattctgttttagttttaggactttgcaccagtgacaccgctgacctgattcgaaaagtgtgtcggccttggagaagggtgcatacttaagttcagcaaccactgcagaaggaaagatgctgtgatgagaaccg

SEQ ID NO: 97472 - DNA, 25162 bp, Homo sapiens
gcctcagctcagcccctctttcctctccccaggccgggcactgctgcggctgaatgcggagaagctgcagcggatggggctggcccaggaggcccagaggcaggaggtgctgcagcaggtgctccgcctgcaggtgcgtgaggaggggcggagcctgcagctgctcagccaaggtcagtgtgaggtgccagagaggcctgggggctgatggagaagcccctctgagtgtggggtgggatgacctcaggaggtcggctgcaggccccagtaagcgccctaatgcagatgatgccaaagaccccaccccattctcaccctcttccatcacacagcttccttcgggaaaatgtcctagctgctgctgaggcttgaacccagaccccagcactgtgatgggagtccacggctagggaggaggccaagctggccccgcagcgcctcttggaccctgcgggatgccggggcggccaggctggcccaacggacagacaggaccaggatcacacctccaggcgcctctggttggacattccaggtcgtgccctggggctgggtgggtagggggctgcttgagtgtggccccacctcctgggacctgagcccaagccctcccctggtgcagctggcagcatgtggggcagctgcctggagccagaaccggtttggatgtcccccctagactcccagggagtctgtttatttacattcccctctccacgtgatgtcggtcccccatcgcctgctgagtcacttgtctgtccacccacccagcccagttctaggtcgttccccagcacctccaggttggcccacacaggtaccataagctgcctcggctccctgtggcttgtgcccatgcacctgccagggcccagcaggccaacccatcatctagagtagtggccatcagcacccgcctaacgggcaccatgccaagcactttcatcattatttatacatcgtcaccacaccccctctattcatgagaagtaaagctgagaaaggaccagattgaccaagcgccagagacaaaatgtggcacaacgagaaccccagccctgtccaggtggctccgcgcccagggcccaggcttagcagtgctccctgccctatctttgggaaaatcttgcttttatggtcttcccccctcgccctcaagaacaagggccttgtgcgtgggccttcccattgctgctttcccaagaaggcctggattcaggggagaggccttcccagggccactccccttacaccctcccagaggcctgagcaacccctctctgggtggtttggggctggtgctgcctggcggaaggacagtgagggcggccctagccgcctccaccctcttgcgcctctgccctctcccagtccccctgtggcttctgaaaatctcagggacagatgaggctgagcccctagtcccctctgtgtgctttgagcctccagactcgaggctggtcactgcaggtcccaggtggaatttggacaactggcctggccgctcccatcctgtaagcccccaccacggggagaccctcatccctgcccctgtgtggctgcgcaagtattctgcccgcctcccaccatcagccttcgcccaaggggcccttctgcctctgcttccctcccttctcctctgtcttgccctggcccacgcacgcctgtctcgtcttccttgttttgctgcactcacttttttatactctgacaaaaaaaaaaaatcagaaataaagctggttcccaagtgctggcggtgctgggtctgcgaggagagggcgtctgggcagccgcggccaccagggggcagtggcgtcacgccctggaggggcgtctgggcaaccccgcgcagaggctggaaacagggctcaagtcacgcctgtgggcggtccccagtgctggacacaacgcccgacacgctggaagggacggcccagacagcgcgtgagggtcccgcggctgccgtgacagaggaccacggaggggtgctgagaacagcagacattcattctctctggagttctggaggccgcagtccaaaatccagctccctcagggcctcctggggcgactcctcacctctccagcttccagtggctgccgggggaactcgggcgcatgggcattacccgtctccgcctctgtaatcagatcacctcctcctcttctgtctctcaaatctccctctgtctctctcttataaggatgcttggatttggggccacctgggtaatacaggataatctcctcatcacaagatctttcatcacatctgcaaatacccttttcccaataagatcccattcacacgttcagggataaaacacaaacatctggcctggtacggtggctcacgcctgcaatcccagcactgtgggagaccaaggcaggagtgtcgctgaaggccaggagttcaagaccagcctgtgtgacatagcaagaccccatctctacaaaaaacttttgaaactagccaggcatggtggcgcatacccgtagtcccagctacttgggaggctgaggcaggaagattccttgagcccaggagttcaaggcacagtgagctctaaccacacaactgcactccagcctgggcaacagagcaagaccctgtctcaaacacagatcacagcacacacacacacacacacacacaccacacacacacagcaatcagacacataagagcataaaccacacacagagactcaatgacactgacaccagcaaacaccaacacacacaaacacatgcatgtagttggccaggcacacagacacaaaggtatgtaacagcatgcccccatacaaagatgtcattacacaaatacacaaatactagcatgcagacacacaacgacctcctaacacatagaaacacatgggacacggcacatccccggtgcacacaaacacactgtattccacgacaccctggcatgtagatgctcacagaaaacagccgtccctcaccagcaccctgacactgagacatgccgcagcctggacacatggatactgaaatccagacacatcgtccccaggtaccctgaggtctagtcgcccagatgctaaaatacagacaggcattggtctcacctagcatgggacactgtcatatcctgacacggcaatgtccaaacaggtcgcatgtatggacacccagacttacacagggagagctgacggccttggctgcacctaaggggacacacactgacccctcaggaaatcctgctggtcccgtccccagggtgggaaaggtcaacaagggaaggacgtgatgacgctagcctcacagggaatgccctccccttcctcctcgggtcacacaggctggtgtgcactggcctctctgactcagattcccgaaggaaggattgactgactgcctcttctataagagccaacctccaatctccatgtgagtgctctgcaccagccttgagtgaagcagatcccaggcccctttgaggaaaggcaaaaatcttactgcccaaccccctagcagtgcctctgagcttgctccacggggtacagggaaaggggccgactgggccggaagggccccagcgaaggaggcacacctggtagttccatttcctgactagcaacttccagcccacatcaattttaaggagtccagaatatttgtagtatgcaaaaaggggcattacgaaacttttaaaagtctgttttaattataaaagtaatatatgcacatggttttaaaaaaaatgctggctgggtgcggtggcgcatgcctgtaattccagcactttgggaggccgaggtgggtggatcacgaggtcaggagttcgagaccagcctggccagcttggtaaaaccccgtctctactaaaaatacaaaaaatcagctgggtatggtggcacgtgcctgtaatcccagctactcagggggctgaggcagaattgcttgaacccaggaggcggaggttgcagtgagcagagatggcgccactgcagtccagcctgggcaacagagagagactccatctcaaaaaaaaaaaaaaaaaaatgctctatgggcacaagatgaaaacccagagtctccttgactcttccctcctgaggcctgaggccttccctgggagatgggtgctgtgaacaggtaagaatggccctcctaaggccaggggcagtggctcacgcctgtaatcccagcactttgggaggccgaggtgggcggatcacgaggtcaggagattgagaccatcctggctaacagggtgaaactccgtctctactaaaaatacaaaaaaattagccgggcgtggtggtgggcgcctgtagttccagctacttggttggctgaggcaggagaatggcatgaacccaggaggcggagcttgcagtgagccgagatcgcaccactgcactccagcctgggctacagagccagactctgtctcaaaaaaaaaaaaaaaaaaaaatgccctcctagccagaggcggtgggtcacacctgtaatgcccacactgtgggaggctgaggcaggaagatggcttaagcccaggagttcaagaccagcctagtcaacacagaaagacctcgtctctatgaatactttaaaacttagccaggtggggtggcacacacctgtagttccagctacttgggaggccgaggtgggaggattgcttgagcccaggtggtagaggctgcagtgagccaagatcacaccactgcattccagcctgaatgacagagcgagaccctatctcaagaataaaaaaagaacggagaaggagaaaggagaggaggggaagggaggggaggagaagggaggggaggggagaaaaagaaagagagagaaaggaaggaaggaaggagaaagggagggagggaagagaaggaagggaaggaaggagaaaaggaagggaggaagggaagggaaggaaggaagaaggaaggaaaggaaggaagaagggagggaggaaggtaagggaaggaagagaaggaagggaggaagggagggagggaagagaagagaaggaaggaaagagaaaaggaaggaaggaagaaggaaggaaaggaaggaagaagggagggagggagggaagggaaggaagagaagggagggaaggaagaaggaaggaaggaaggagagaaggaagtaagagagggaaggaaggaaggcaggcaggcaggcaggcaggctctcctgggggagattcttgtgggtcctgtgccagtcccgtgtggtgcctcctaccagtcctctttaggagagccaacctttctctgtctcattcattcccaagtcctgtgctgtcagtgccccgccacctccagaccactcagcccacaccggaccccagtgccccctgcctgcagaagcccaagctgtggggcagagaaggccctggcactggttcagaaccactgcccccagagctgggaaagggtgacccaatggtcagtgaccccagtaaaaccccatggccttaagccgccaggcacctccgggggtcagtcgcaaaagtggtctcagggccagttggaagaaggctgaatcctgcgctgccggtgcacggcccccagggccagaggtcagggtcccgagcccagagaccacactcgccgcgcgggccaggatgcggcggaatcaggtcgcctcaatccgtgcgcgccggactccgggcagtgcctagcgcccctatcgggcctcagtttaccccactgtccaaaaaacgtcccccgccccaggacggcagaaccggctactctggactgcgggcccggccgacgggggcggaaccgcggagcgggggaaccacaggccagcgccgggcccccgcccccgcccccgccccctccccgccccctccccgtcgcggagcggccgcgggaataacgcgagagttcgccccctcccccccgcagtaaaactgtcaaaggtgggaggggcgggagcgcgcatgtgcgcagcgcggcgcgcagcctgcgccgcccggacccagcgccccgcgccccgcgccccccgccccggcccggcccggcccggccgcagccccgctgggcgccgcaggtaagcgcccggccgcgccccggacccattctggccgcagccccggcgcccaccgcgccccggatctcgaccctgcgcgcaggccaaggagggggccgggcccggagcccccccgccccccgccgcgcccgagcccccgcgccccgcgccggcgccgtcttcctgcctcctccttctccagaaaaagtcgccattttggttcactgccttcgcccccccaccccgcgcccgcgatcggccctgcccggccaggccgaggcccgcgccccgcgcccgctcccggccccaggtgacaggtgggtggcgaggctggccccaggtgcgcgtccctggccgcgctcacccgcgcgccaggcctgggccggggtcccgggccgaacggcctacgcggcggacccgctgctggcgtctcctgcgcgcagcgcggcggagccccctctccccgcgagggctctgtgtccccgctgggctcgggagggccgaagccccttctcatccggggcgccagtcgcgtctctgcctcccaggctggccctggcctcaggycccactattctgaattcttctcccaggcttcagaaaaattggaagtggggcctcagcaggcacctgcaccccaggccaccggggtcatcaggtgctgggatgactcatgccggccctgtctcctttcaaaagttgcaaagtgaggacttccagagaactttgtccccggacactggcctcccccttggcaatgggcagtgactgtcctgacctctgacctcagctctctggccctcctggacacagcagccccttcccatcccctcggatccaagttaattagaagctatcaggagggggccacctgcccactcaaccctcaccctgcttcctgtcccacccccttccgtggcttttccacagggctgggcccagagtctcctctgctccccagctctcaggatggggttcccagcagcacaggccctcgggggccccagccttgggcagcagggcgttctctctggccagcatcctgggccttcactgctggtgcttccacgacttgtttggctgaagtggtagtggtgggtctgtaggcagaggactgagaggatccagagagaggtggggggcrggtcagcctgccaagcctggagacaagtctgcgaagagcatcaggtaggatagttcagccggcacagggacgggagcttggtgcagtgccagattgggccaggggtcctcagtgcccaccttggctgttttccatctgtgtctggagagaagattccaagggtacctgcctgggtaggctggcattgcatcaagtcagcatgggaaggtatgagggccccagtgagaagctgtgcccccactgctgggcctgggcagcttgtgagccagcagccatcatcagagacataattggcccctggaggaatgttgccagcctccttcctcctgcgcaaggcacctctcccaggggcacaccccctcccagcactgggtaggagtgcatcaccttcggcatcatcttcgcagctgtggggctacgcacactgtggarctgcgtacactgtagagctgcgtgttgggaagggggtctggaagttggtgagggtctcaggacaggactagatcctatcaaactgatgatgactcctgggttatctggggagaccttggctggcagcccctcccctaagtsagaagcccccatcacttgcttttcccacrtraacaaaaccacaggaaggcaggcccctcttccctgaccagagaggacctgccaagggcagggctccagggcagcctcaccacrtgttccaagtggggcccgtcaggcttcacagattgtctacttgctctgcagagatgacggatcctttctgcgttggaggccgtcggctcccggggtccagcaagagtggtcccgggaaggatggcagccgaaaggaggtccgacttccaatgctgcatgacccaccgaagatgggtaagaggagtcagggccagagtcaattccagatggttctgrgcagcaagtggtaggagtggaccattgccctgggcgtcctgtctccaggtacccagctaggcccctagagttcccaaggaccttaccagggtaggggttgccttggacatagcccagggtcctgggttcttgtcctcagctggccgcagcccctgcccccggtgccctcgtgttgggacagcggtgctcactgtgggcctgtgcagccgccggtggtaggcggtgctacacagyttccgagccttgctgtgttgtgtgctgcagggatgccggtggtccgtggtggacagacagtgcccggccaggcccctctctgctttgacccrggaagtccagccagtgacaagacagaagggaagaaaaaggggcggccaaaagccgagaaccaggccctccgagacattcctgtgagctccctcagggccatggtggggctcatgctggggtctccctatccagccactgccctgccctgatttgtcctctgcacatctggtaccaactctatgcctcaagatgtgggcactggcctggcagacttcacgtggcctggctttgtatctgatgtgccgggagattcgggggatcgcgttggtgggctcctagaacgggtcttgtgcatggcccctgccaggtggcttgaattcccactgcagtcccgaggttgaggggctcatgtggtgtgtgtgccctgcaggcccgggggggctctgagtctggggctcgggctggcagtggcccaggtggctgcgggtcagcagcaccacctttccccacgcctagctctccctgatgaacgactggaaggatgagttcaaggcacactcgagggtgaagtgtccaaactcagggtgctggctggagttccccagcatctacgggctcaagtaccattaccagcggtgccaaggggtaagggactgtgggtcgggggagaggaggcctcggggtgtgtttgggcagaggcccttggggccctgtcccaaaccttcccttccctgcccagggtgccatctcagatcgcctggccttcccctgccccttctgcgaggccgcattcacctctaagacccagctggagaaacaccggatctggaaccacatggaccgacccctgcctgcctccaagcctgggcccatcagcaggccggtcaccatcagccggcctgttggggtcagcaagcccatcggagtgagcaaacctgtcactattggcaaacctgtgggtgtcagcaaacccattggcatcagcaagccagtctcggtcggcagacccatgccagtcaccaaggccatcccggtcactaggcccgtgccagtcaccaaacctgtcacagtcagcaggcccatgcccgtcaccaaggccatgccggtcaccaaacccatcacagtcaccaagtctgtgccggtcaccaaacccrtacctgtcaccaaacccattacggtmacaaagcttgtgacagttacgaaaccyrtgccggtcaccaagccagtgacagtcagcaggcccattgtggtcagcaagccggtgacagtcagcaggcccattgctatcagcagacacacaccgccctgcaaaatggtgctgctgaccaggtcggagaacaaagcacctcgtgccacagggaggaacagtggtaagaaaaggtatgggggctcgtcccaggtcggggaggaacagtggtaagaaaaggtatgggggctcgtcccaggtcagggaggaacagtggtaagaaaaggtatgggggctcgtcccaggtcggggaacagtggtgagaaaaggtatgggggctcgtcccaggtcggggaggaacagtggtgagaaaaggtatgggggctcgtcccaggtcagggaacagtggtaagaaaaggtatgggggctcgtcccaggtcagggaacagtggtgagaaaaggtatgggggctcgtcccaggtcggggaacagtggtaagaaaaggtatgggggctcgtcccaggtcggggaggaacagtggtaagaaaaggtatgggggctcgtcccaggtcggggaggaacagtggtaagaaaaggtatgggggctcgtcccaggtcggggaggaacagtggtaagaaaaggtatgggggctcgtcccaggtcagggaacagtggtgagaaaaggtatgggggctcgtcccaggtcggggaggaacagtggtgagaaaaggtatgggggctcgtcccaggttggggaggaacagtggtgagaaaaggtatgggggctcgtcccaggtcggggaggaacagtggtaagaaaaggtatgggggctcgtcccaggtcggggaacagtggtaagaaaaggtatgggggctcgtcccaggtcggggaacagtggtgagaaaaggtatgggggctcgtcccaggtcagggaacagtggtgagaaaaggtatgggggctcgtcccaggtcggggaacagtggtgagaaaaggtatgggggctcgtcccaggtcggggaacagtggtgagaaaaggtatgggggctcgtcccaggtcggggaacagtggtgagaaaaggtatgggggctcgtcccaggtcggggaacagtggtgagaaaaggtatgggggctcgtcccaggtcggggaacagtggtgagaaaaggtatgggggctcgttccaggtcagggaacagtggtgagaaaaggtatgggggctcgtcccaggtcggggaacagtggtgagaaaaggtatgggggctcgtcccaggtcggggaggaacagtggtgagaaaaggtatgggggctcgtcccaggtcagggaacagtggtgagaaaaggtatgggggctcgtcccaggtcggggaacagtggtgagaaaaggtatgggggctcgtcccaggtcagggaacagtggtgagaaaaggtatgggggctcgtcccaggtcagggaacagtggtaagaaaaggtatgggggctygtcccaggtcggggaacagtggtgagaaaaggtatgggggctcgttccaggtcagggtgctcctcggccacggcctgggggtaatggggcccacagttaggccctcctggccctcacctcacctgctccctgcagggctgcggacagcctggacacctgcccaattccacccaagcaggccaggccagagaatggggagtacggcccctcctccrtgggccagagctcggccttccagctgagtgcagacaccagcagtggctccttgtcgccaggcagcaggccgtcagggggcatggaggcactgaaggctgcaggccctgcgtccccgcctgaggaggacccggagcgcacaaagcacagtaagatgagagctccaggggtggcggccggggcaggctcggcctcctgacggttatttcaccagaatcttggcccccgttttctctccccgagtcaggaaggaaacagaaaacacccaaaaagtttacaggggagcagccatccatctcagggacctttgggctcaaaggtaagaccccagcccggtgtgcacctccagggctggggctgtccaccgagtgacagcccctgagcccatccctgtttctctccaccccatgtgtgcacacaggcctggtcaaagctgaggacaagrcccgagttcaccgctccaagaagcaggaggggccaggccctgaggacgcccggaagaaggtgccagctgcccccatcactgtcagcaaggaggcaccggcccctgtggcccacccagctccaggtaggggctgcctggcaggggctcagggcagctctagacggcgggtagatcccacagcacagggatgggggctgagtgtggagactggattctgtgcctggcgtctgggccacccagcagcccccacaagccttcgaggcccctgccttacccacaggtggccctgaagagcagtggcagagggccatccatgagcgcggggaagccgtctgccccacctgcaacgtggtcacccggaagactctcgtggggctyaagaagcacatggaggtgtgtcagaaggtaaggcagctcccggaaggcgctgggagggaggcgccctggccccaggcaggcttctcacatgtgggccatctgcagcttcaggatgcactcaagtgccagcactgccggaagcagttcaagtccaaagccggcctcaactaccacactatggccgagcacagtgccaaggtaccgtcgggcccccagctccygtccagcgtgacctctgacctcgcaccccaccttcaccgcagtgccccyggtttctaacctcggacaacggtggcccaacacctgggcggggcggggccagggcagggctcygtggcgatggtgccgggtcaccgatgctcaccctgtccccagccctctgacgccgaggcctccgaagggggcgagcaggaggagcgcgagaggctgcgcaaggtgctgaagcagatgggacggctgcgctgcccccaggaggtcagtggggggccgcggcagtgtggggtgggggggccctgctggccactcacccaccctctggcctgacccccagggttgcggggctgccttctccagcctcatgggctaccagtaccaccagcggcgctgcgggaagccgccctgcgaggtggacagcccctccttcccctgcacccactgtggcaagacgtaccgatccaaggctggccacgactaccacgtgcgctcggagcacacggcccccgtgagtggctctctgttctgtggcacagtgcttgttcctgtgtgccgtgtgtgttccgtgtgccttgggtgccaactgtatttgtccatgtaccgcccaacgcgtgtgtttcccacccctctctgtaagagacgtgtgtcctggtgggcgggagggtgaaacctccgtgttccctcgggttgcctgcgtcagccatgtccycagcacactgggaggcctgtgggtccaccggccttagggtggcctcgccgcgcgctgacctgactcttgctcccgcggctcactctrgcctccatgccttcctgccctccagccccctgaggagcccacagacaagtcccctgaggctgaggacccgctgggtgtggagcggaccccaagcgggcgtgtccgccgcacgtcggcccaggtggcggtgttccacctgcaggagatagcggaggacgagctggcccgcgactggaccaagcggcgcatgaaggatgaccttgtgcccgagaccgcacgggtgagctgccccccccrgggctgtggacagcgccgtggyctctgcgtggggcatgccttggcctgagacttgggacagccactgctgtgacctgggccacccrctgcccccgccatctgcggcgagtgtcgcctgctgccgaggcgagtgttcttagagcagctggggtgtcttctggcctcaggctcaccctggtgctgtcgaattcacagctcaactacactcgaccagggctycccacgctgaacccccagctgctagaggcatggaagaatgaagtgaaggagaaaggccacgtcaactgtcccaacgacgtgagcggaggcagccgggtggggggcgtggggagccatacagggmcagagcctgggtgtggccctctgagcaggaacagaggctgagagctttcaggaggtgcccaagcccaccccaggcctcacatgcccagcctgcccagtccccaggactcacaccccctcacttgccccaaagagcctcagagatcccctggggtagggcaggggtatatcttggtgtggggtgcccaccagaggccttcgcccacggctcccttccctgcagtgctgtgaagccatctactccagcgtgtccggactcaaggctcatctcgccagctgcagtaaggtcagttctggggcctgccccacggccaggtgcgctgcactcagagctcccagctcaccccacgcgggcttcccacacagtagtgagggaccctgccttgtcccctactttttctacgtggcctcctcttccacgaacccagagactggccggtggctgatggccagcctaggacacctccctcgccccaaccccagccacaagacaacgagtcctagtcctgtccttggagctctgcgtccatgtaggcatgggtgggcaccccgacccacgcagatggcacactggcttacaataagggatgctcggcaaaggtctgcaactcttcccctgggcacctgcctctccctacccttcctctcccctaccacccctgccgccctggtaactcagtggccccctgcattgtctggcacagacagccasagctttccttgggccaccgctgactctgaccctttagccatgagtaggggcttaggacagatctgggtcctccaagggctggggcactggcctgcctatgcattgcagggggcccacctggcagggaagtaccgctgtctgctgtgtccgaaggagttcagttctgagagtggcgtcaaataccacatcctgaagacccacgcagaggtgcgagggccatcaccagggcctgtggctgggggctagcccaggaggggacagggctggggttgggcaccccttgggggtagagaggtcagtggcctgcatggggtgtgcctgggagagtggccaatgtggagaaatctggtagtttctcctcaaagtggggtctggcttccctgggagaactgggaggcttgcaccctgagctggagctgccctcggggtgtccgcctttccagcccccagcagccctgctgcaggtgcttgcctggtcccgaaggctgtgtccagccctgctgcaggtgcttgcctggtcccgaaggctgtgtccagccccctgcaggtgcttgcctggtcccgaaggctgtgtccagccccctgctgcaggtgcttgcctggtcctgaaggctgtgtccagccccctgctgcaggtgcttgcctggtcctgaaggctgtgtccagctccctgcaggtgcttgcctggtcctgaaggctgtgtccagccctgctgcaggtgcttgcctggtcctgaaggctgtgtccagccctgctgcaggtgcttgcctggtccygaaggctgtgtccagccccctgcaggtgcttgcctggtcccgaaggctgtgtccagccccctgctgcaggtgcytgcctggtcccgaaggctgtgtccagccctgcggcaggtgcctgcctggtcctgaaggctgtgtccagccctgcggcaggtgcctgcctggtcctgaaggctgtgtccagccctgcggcaggtgcctgcctggtcctgaaggctgtgtccagccctgcggcaggtgcctgcctggtcctgaaggctgtgtccagccccctgctgcaggtgcttgcctggtccagaaggctgtgtccagccctgctgcaggtgcttgcctggtcccgaaggctgtgtccagccctgctgcaggtgcttgcctggtcccgaaggctgtgtccagccccctgcaggtgcttgcctggtcccgaaggctgtgttcagccccctgctgcaggtgcctgcctggtcctaaaggctgtgtccagccctgctgcaggtgcttgcctggtcctgaaggctgacaggtcttcagctctcaggctatgcctggctcaggtgctcagcatccagtcccaggtcttcatcagcgcttttctctccccagaactggttccgaacatcagcagacccacctccyaaacacaggagccaggactcattggtgcccaagaaggaaaagaagaaaaatctggcaggtggaaagaagcggggccgaaagcccaaggagcggaccccagaggagcctgtggccaagctgcccccgcgccgggacgactggcctccaggatgcagagacaagggggcccggggctccaccggccggaaggtgggagtcagcaaggcgcctgaaaagtgagcatggtgcgtggggcctggcccccatgcagccgccacaccgccctctgttcaaggcagggccagctccgggacctctgtcctccagttctccatcccccacccccgcctcttcatccgtccagtggggcagccagccactctcccttccctgaaggtggcccttcccctgttaaggctgccacagggcacacctgggttggggctccccaaggtgtgcccagcagaagtgcaatagccaggagggttgcccctcctcatgggaatgtgtctggggtcttggtgccacaggggctgcagcgcagagtaggcagatggcctttggccccccggctccgcttcctcaggccctgccgggtcccttccctggctaccccaaggctcaggcatccctggtgacctgtggttctgggctggtgagggcacctgagcaacctggcacgggcagccaccatcctggcctcacctccacccaacactggaactccagcacccccagctacctcccaggacagacccctgtctgaccactgccatgctgacctgacaggctccggcctgcccttggccacccacttggtccccttgcttctgttttctacctctccaggcctgcccactacccccacccctgctcctcctttgtcagtgcgatccctgctgtgctcaggccctgccccccaggcctgtctgtaattctcccagcttggggcaagggaggggttttgcttcttgtacctacagggcagcagaagcttgatgcccttcaacacagctgccagccctgggggtgtggggcccctggagtgtgctctcctccagtgttcagccttctggcactgcaggcctaggttggagcagcctcgtggagtagggacggactagttcgggccctggggtcttgctgrggcccataggcatgtggggcaggaagctgggcagagctggcctggctctgagtggccactgggggaaaggcagccttctgtctgccaatctgggtaggcccagtggccaagctctcatgggagccccctccccacttttttttttaacctgcccccattgtttctggttgtgtggtcatttgatatgggaactgaaggccagccaggggaggggcttggccaaagtcacagcaggttgatggcagctccagagctgtctttgcccctttgtggccctgaggacggctgggtctataggtagggcaggggtcaggcagggagtccagggtgcctggaagaggtggccacagcctgtggctccctccctggggtcctgccttccaaccacggcattgcagggaggatgaggctcagagggggtaggtttggagggaggccattttccagggtgggtgggagtgggctgagggctcggccccactgaccctggacgatgagaattttgatgtttgcccgtgtgcgtgtgtctcctgggtgtagtggatgccagtcttgttgctgtgacaagtaacaaccttttttttaaattgttttttatacaaacactcgcaatccgacatttggtgctaagggtttcctggtgcagacggtgggcctgggggctgggctggaccagggcgtgggtctctggggttggggtcccttgctgctcagggaggcagtactgactgggcactgcctctgcccccagcacccaccctcccccattccccagggagaaggggccccactgggcttggcctgcagtagtagggagacaagttccaggagcactttggggactggggttgcagaacacttcctgtctctggcttcatccttgggccagaaggctccaaccctcagcagcccttgccagatgtgccagggagtgggtgtggagacccggactccccycacccacgcacacctcggcctgatgagaggatggaggctggggcagagatgggcgtgacccagcgtcagagggtcgggggaggcattccttcctgtgtcccagagcttcactggtggagctggaggagccggaggtggagggtggggtctggcagctgctgctggggcagcctcmtgaggggaggggaggggaggggargggagcaggcactgggcgggggcctaggtgcactttgtccttgccaccaatggcgggaggagggtggacctgaacacctgcagggtgtggtgcctgccccagcctctcaggtacttggcccttggggagaagagaagagggtctggtttttgctgggggtgagtttccgggacactcccaaagcccacagataatccctggtgtgggaagaggagtcctggataccttgatgtttagcactttaaccccctttgtctttaaggtaggcgtgggggctactgccagaagtggctgttgggtctgaccccctcctttctgccctccctctgccacatgctggtccgcagagccctcctcccaaggggtggggccctgggtggagctcagcagggtctgcccactccctacgctggcccacataggcctccaggagccctcagtgagagggaccagcatagctgacccccagagtgtggtgggcgccggccctgcccgaggcccagtcggggccctttctgcagatctacctctggctcagcgcacgccccctgccctgagaacaggaaagggcccggaagggctgactcaccgggccgacgctcacacgaaaatgggatgcactttatttgctggtgcaaaggcaggtgagggtgcctcctgtgtgaycgttggccctcctgcctggtggcgctgaagggaaggagccagtgagcctgaccccgggaggggccgtccccgtgtgccgcgtttggcggggccccaggcggctcccccaggcccgggtctggggccccaggctttcccctgcctcgcggccgggcgtcccgtgctttgggtttcttggtttgggttttttaatgccagttctcagtacataagtgcattttgaaagaggttccagctatcacttgtaaccatatatatatacatatatattctatctacaaagtgtttatttgcgagatgtttcaacggtgagttcgggccccgcccgccttgtgaccatctgtccccggtcctcgtccccgccccgcgccctggtcccgagtggcgtggggacgggccatcactgtatgtattaaaatgactgtatcaaataaatgtttattgatttttttccagggtttttgtgcggctcagtttgtggtgaaaaacagggggcggggccctccaggcacgtggcggaggctgccgaactacgggtcccccatgcccgccgcgcggccttgtggggcttgtagtccgcgacgcgcggccttgtggggcttgtagtccgcgacgcgcggccttgtggggcttgtagtccgcgacgcgcggccttgtggggcttgtagtccgcgacgcgcggccttgtggggcttgtagtccgcggtgggcaagagagggacccgccagctcccggcggcccatgcgcgccgcccggccaggcccgcaaagaggcctccgagcgccatggctgcgcccccggcccgcgcggacgctgatccttcgcccacgtcgccacctacggcccgagacacaccaggccggcaggctgagaaaagcgagaccgcgtgcgaggaccggtaggcgtgggcctcgcctccactccactggcgagcgggaaggggctgcagatccggccgagctgggcgggtggtccgtccccgccgcgagcccaagtcccccactcccggaggccaggcggcggcgccccgttctcccacgtgccgggtggaaccccgcgggcttgaagcggccgggaggacggacctggcccaagccggcaggctcctcggggctcggggaaggagtccgggtgcgcacccccagcgttgaccttggtctctgcccccggtgggtggggccctcggcctcgagcgcccggcgggctgtgtgcctgctcgactgtgcgagttggtctatgttgtcggctcggggtgtggccctgcccgacccgcgaggccagggcttaggatttggaggtgctgcggcgcacggtgccttcggattgcctcgcacgcgcgtggcaccttcgagcctctgcgggggctttgcaagagcatgaagtggggaagttgtgggggtgcagcgggaggaacccgcccccaccccggttcgtcaccccgagtggcccctctgggagccgggccctgcgcggcgcctttggggccgtggccgtcagggggcggtggccacgcagtgcccggggctgcaagagggcgctctgggcgctgcccctcccttccgggtctgaagtgtcccttggggagcccgcggggtccccaggaaggggttgttcccactcaggcgcctcttgcctgggttcaggctgtgactcctgtcagaaacgctgtgagccaggactccctcagagatgggctgcgctggatgccgcagggggaagggtgtcccggcacagggtcgctcctctccaggagctgctgagcagaaagagctttcccctggccctgcgtcccttcaggtccacaccctcccagtgggcagtgactaggaactttgcatggctggagtctaatagggcctgagtctgttcctctgctggttccaaagaggcgttgtttttttgttttgagatggagtctcactctgtcgcccaggctggagtgcagtggctcgatctcggctcactgcaacctccctttcccgagctcagttcaagcaattctcctgcctcagcctcccgagtagctggaattacaggtgtgcgccaccacgcccggctaatttttttttgtatttttagtagagaggtattttgtcaggttgtccaggctggtctccaactcctgacctcaggtgatctgcccgcctcggcctccgtgggattacaggcgtgagccaccgcgcccagccaccaaagaggttttgatttaacccgaggtggggcaggccaacgctagataagcactgagagctcttgagaaaggcactcctggatgacacaggttggtggcagcagccatctgggcctgccctgtgcacagacggtgggctgggcacggtggccctcgctgtgtcccacgaggcagagactgttgttatctttctttggtgtggttaccaagggacaggagggaagctccaggcagtgaggatagattgcagcacccttctccaggggccccggtctgccctggaactgcctcttgtcttaggcacatttcttgcactttgtgtcctgatgcttgtgccatcgaggacttcctctgccccagcctagggcttttctcactgttccccgagcgtgtccccaacgttcctgcgtctgcccctcttcaacctctgctgctgcccttagtgttccagagcaggctccagcttggaggtctgtgcacgggtggaggtctgtccccagggctggggttcctccaccaccgttccagtgcctcctgccacatcctcccggcaatcagtctgtccatcttgcctgttgtttattgtctgcttgccactcgtgactctgtcctgggcacctgcccccagagctggcccgtgctggtgcaggaacaggtcctttgtggtgttagcagtgactcctggctgcggttgagatggagtctggggctgtggaagtggggagcagagggaggctgcccatgatctgtgcagggcaggtcctgctgagggaaggtttcctgagtggtggggtgggccagggcaagcccccaacccccagtgctcatccagcctgagaaagcagccctaatgactctccctgagtcagtccggcaccagtggggtcaggcctgcattggctcctgtgggctagctcctccctgctccctcctccccccagcctcattttagttatccagcaaacttcccttaaacctgacctgtcaggaggtgccgtgctacaggcacccagcaggaaggtccgtgggcgatggtgaccccaggggtggtagaacaggcctgaaccacagcaagggagtgcccgagccttcctttctccctgtgtgctctctcccgtggctgtttcctcagtgtcggtttcacatgccctgcgctccctgctgctggacgtttgcttctggtttccttggcattgtggatggttcgtgaggggcagccctgcctccaggtctccacacatgcctgtgcttatttttcttcctttcttttttttttggagatagagtcctgggctggagtgcaatggcaccatctcggctcactgcaacctccgcctcccgggttcaagcagttctcctgcctcagcctcccgagtagctgggactacaggcgcccgccaccacgcccagctaattttttgtatttttagtagagacggggtttcaccatgttggccaggctggtcttgaactcctgacctcagatgatctgcccgctcagcctctgaaagtgctgggattacaggcgtgagccactgcacccggctgcctgtgtgtatttcttttgttttgttttgttttgtttttgagatggagttttgctcttgttgcccaggctggattgcagtggcgcaatctcagctcacagcaacctctgcctcccgggttcaagcaattctcctgcctcagcctcccaagtagctgggattacaggcatgtgccactacgcccggctaattttgtgtttttagtagagacagggtttctccatgttggtcaggctggtctcaaacgcccaacctcaggtgatccacctgccttggcctcccaaagtgctgggattacaggcatgtgccaccgtgcccagctaattttgtatttctagtagagataaggtttctccacgttgaggctggtctcaaactccgaccttgggtgatccgcccgcctcggcctcccacagtgctgggatgacaggcgtgagccaccgcgcccggccacctgtgcctatttcttgacgatgacatcagttatggggcctgatcaccgatgaggcatctgccttggactttatgagctgacccacctgtaatgaacctgctgttagtccttgaggaggaaactgaggcaagctgtggctccgtggaggggactgagccacattcgactgtgctgtggcccagagtaggatggctgaaggtgagggaagggcaaggggtgccctgaagtgactgaggcagcctccagcaccacgggcctcagacagccccacctgcaaggaggaagccttaggcagaaggtgctctgggcagcgcttaccccagcgcggcatcagcacctgtgggtggcgtgggaatgggagttctctggaccggcccagctcaggaagttagaacctgggaggaacaccagtgaataggaccagggcaggctacccctccccaccgtgagcggcccctccctgccgtgggctgctgtggccgagagcagccccgtggaggggcatgttggggaccacgtggcctgcagcgaggcgacgtgattccagggtggggcctggtggttccattcacagctgcgtgcctgggctcctccgtccctcgcctggccagcacagtgctggcttccccaggcctgtagccttgcctcttggccggctagggcagccagggtgcatgcccatgccaggcaagaccagtctgcgtccactctgctgttcagacagcccagccagtggcatggcccccaggagcccggactctgcgcccctgctcaggacagcctccgcctccccgaccctgggctgtctcctgcccacttcccaagtgagggatgtagccgcctcctgggagcagaatgaggagaggaagcacctgtggacacagacagatgggccggtcctgcctctgaggcagctcccaggagtggcctactattgaggagtatgacctccatgtggagtcttcccttttccctgagcttctggcagcccctgcctcagtactagaagctccaagagaaacccatggtaggaggaagctgacacccatggctgacctgtctgcccctgggagagagcttagggctgccaggacttctctgtgcacatccttgactgactctgcggagggtggggccgaaaccctgtttctgtgggcggggaggtggctgtgtcccctgtgccctgctgagccctgggcggggaggtggctgtgtcccctgtgccctgctgagccctgggcggggaggtggctgtgtcccctgtgccctgctgagccctgggcggggaggtggctgtgtcccctgtgctctgctgagccctgggtggtgagccctgggtggctgcaggtccctgcaggatcccccgtgagtgggggtagggcaaggcagttattttcagatggtgccagagggtggagtttcagatttgtttatgcctgtcggaagcactctggggctagggatggggtgcccagctcagcactgacgttcaggacacctggccaagaggcgcctcagatatccttgtcctgctgcggggggttcactctgtagccccaggcaggccggggtactgtagctttttccaggggatccaggaggggtgcaggcacacggcgcacagtggtcctccgcaggcctgcggtcctaggctggccgaatgtgccagcccacacacaggagggggcagttcacaccgagggctggcccgaggattgtcagggccacaccaggcaaagccagcgctattaatatcaggcatacacaagcccccagctgggtgatcctcttatgcctgtggccttggcctctgaggacggcagtgagtgctgttccctcagtacggtggaggcttcaagggcctcctagctgctgtgcctctgctgacatttggcaggcagcttctgccagccaagggtctcaccccagccacccggctctgcacccactgtgctgcccacaggagtggtcctgcccatggaagggccagttcaggtggccggagctcctgagctgccctaggggactgctgtgggtctgaggtggtgatgtcccccacggctgcctgcgcctgagcccccacgcatccacccctggggccactctgctgttcaggagcacccacccgtgtcctcgaccatgagcagccccccagcttaccctggcatcaggatctcagggtgccgggcccttggagcagaaggcaggtgagtctcgactggaggtctctgccgtgaggggcacccacttgtgctgtggtcct

SEQ ID NO: 97473 - DNA, 14890 bp, Homo sapiens
ttttgcttttgtcattttggctgctgttctttttatctttcattcattcaaggtctgaagatggagataataggaatcttctcatctcaatgtgctctttggcccctcctcttaaactgatgcccctctcaggccctgagggatttggcctcaggttgccctggaaggggtgtgagtgatcagacaggtgactgagagctgggacgcctgaggcctgcctaggctgagtcacctagtaatgttgttgtcattgttcctgttgaagtcccagctcagtgtcacagacctttgtggaagcaacaacagctcccatccttccaacctttctggagaagccgtggcctgatggtgagccgaatgggctggggggggagaagaaggcggctggggcggtggggagatctggggcccggatcggtgcccctcctccccatgccactgccacctcctcctcctccttcatgccggggacctgggggagggaggatctccatcttctctctgtcccctgcccctcatacaagaagctccccctcctcattttcccctcccaccgcagggcccccttgctcagtgctacaggggacaggggcttctcagtcttgccacagtgctctccctatcccagccacccccccaacacaggctcaacctgcaatgacacctgcctctgcatctccctcctggggatcccactccaccccacccctggccccggcaacccccactccctcacagcagtgcccccaggactctcctgggctgcgggtaggccctttgatccctgaacaggattatgagcggctggaggactgtgaccctgaggggtcccaagactcacccatccacggggaggagcagcaacccctgcttcatgtccctgaagggctccgaggtatgtgtgtgggtgtgggtgggagagggttagtggtgcctgggagctccagtacttaccccaggctgggcctctggcagcgggttgagaacgtggagaattgatcacatgccaggggctgacactctcccctctgtgcccaggctcctggcatcacatccagaacctggacagtttcttcaccaagatatcctttgcgctaggcctgcagaggtggcatgggaaggtcctcttggagctggcactgttcttggcagggagactccgtgagggcgtcatgggtgggagacttgttggggctgaggggaggtgtcctcaggagaggccccccgtgcctcaggcttgttccttgacacgcagccacatctacagctaccaccagcggaatggctttgcctgcatcttgctggaggatgtcttccagctggggtgagacgcttagcccgggcccggaactcggtcccctgggcccatggcttccttctgtcattttgcttccttaattgtgccagctgcttccatcccatgctttcccgagcagcccaagggctcagcaggggcagggtcagggaggataaccatgggctgctctgggggctggggcaggagcccacctggctgtccctgatcactgcagcatcccggcacccccccttcctcccggcagacaatttattttcattgtcaccttcacaaccttcctccttcgatgcgtggattacaatgttctctttgccaaccaaccaagtaaccataccagacctgggccgttccacagcaaagtgaccctgtcagatgccatcctaccctcagcccagtgtgctgagaggttagtgacaacctggtggggccctgggggtgaagcatgggcagtgggtagaggagtagacgggagccccactttgtcccgtcatctagatcagcagttctcaaagcttttggtcttaggaccaaaaatacacttaatatactttaagttgtacttaagtgtattaagttgtacttaaagtgtattaagtatatcttttttttttttaagacagagtttcactcttgttgctcaggctggagtgcaatggtgaggtcttggctcactgcaacctccacctcccaggttcaagcaattctcctgcctcagcctccccagtagctgggattataggcgtgcaccaccacgtgtatttttagtagagacagggtttcaccatgttggccaggctggtctggaactcctggcctcaggtgatccacccactttggcctcccaaagtgctgggattacaggtgtgagccactgtgcccggccttttaagtgtatcttaattacagtgcattaagtgtatcttaatacacttaaaattggttgagaatcctgaaaagcttttgtttatgggagtcgtatctatccacattttaccttataaaaaattaaaattaggccgggcatagtggttcacacctgtaatcccagcactttgggaggctgaggcaggaggattgcttgaagccagaagtttgagatcagcctgagcaacaaagtgagaccacatctctataaaaaataaaaattagctgggcttggtggtgcgtacctgcagtcctagctaagcctagtcaggaggctaagacagtgactgtctctgatcactgcagcatccctacaccctcctccctcccagcagacgattcattttcattgttgccttcacaaccttcctccctgaagcatggattgcaatgttctctttgccaaccaaccaaataactgttccagacctgggccgttatttggcagggagataggagctatgtttctactgctgcactacagcctgggtaacagagagagaccttgtttcaataaaaaggaaaaaaaaaaaagaaggaaattgtagctgagaacaactttaaaatgtaagagtgcggctgggcgtggtggctcacacctgtaatctcagcactttgggaggccgaggcgggcggatcacaaggtcaggagatcaaaaccattctggccaacatggtgaaaccctgtctctactaaaatatacaaaaattagccaggtgtggtggcgggcgcctgtagtcccagctaccctggaggctgagacaggagaatcatttgaacccgggaggtggaggttgcagtgagccaagattgcgccactgcactccagcctgggcgacacagcaagactccatctcaaaaaaaaaaaaaaagagtgtacaagcacacatttcatcagctgtcagtgtgatgtgacatgttcacgtgtcttgtagcctctggaaaactccactgtactctcagagtacaagaatgaaaacatcagaaagcattagtattatttggaaaaagtttgactttgcacatttgtgaaggccacttcagcacccaccccctgccccgggctctaccttgagagctgctggtctagctagatccccctcctcatgatggtttttcctcactcccgaagtctggtctgcctctttctcaggcgcccacctttctcccccactgcccgcccaaccccatacaggatccgctccagcccgctgctggtcctcctcctggtcctggctgccggcttctggctggtccaactgcttcgctcagtctgcaacctcttcagctactgggacatccaggtgttttacagggaggccctgcacatccccccggtgagctgggtggctgtgtctgtgcagagggtgccgtgagagggtgggcagaggagaggggaagaagtgggactgtacaggtggaagggccaactggaaagagggcagaaagagcgaggtcttattgacacctgccctaggcccagaataatgtcaggagggggctaccaccacctagagagcatggcccttaccctaagggagtttagtttatttagatggctcatataagatgacatatagttacatgtttgtgctaaaaacattgattagagaaaagagaaagggcagttatctggcttttcagagctggaggaatttgggttgggcttcggaagggcaggacaggaggggaggggagcacattctaagccccagtgcaggaaggtggggaaaagccatgagcttttggaagctgcagtgaggagatggacccatcagcctaaaacagagccttcaaagccatcccccgcattgcaggaagccactgcattggcctgtcactgtccactgcttatgctctgccctttgtttcctcaccatcttgagtctgctcctccctcctctgtatctaagttctttctttgaggcacagcttgaaagtagccttctgcagcttgcttcccttgctcccctgggaggtccggagccctctgcacagcctttatgtgcagcaaggggagaggtcttagaaggcccctgagcagaggagagggaggaggccggggaagcagaggtggtgagagcggaagctggacctcggattggctctggcgggagactgctcacccgtctcgttctcctcctcccttctttcccctcctcccctgttccttccaggggaagggaagggaagacactgggatgtactggagaggccagcctgggggacttgactaacctggactgggaaagctgagtgaaactgggctgaagtgaggtttgcagccttcaaatgagatctgacagtgccccactgccagatgtggacatagcccaggtcctgggaaggcttctggtgacagagccgaagatggcctggagtcgggtggggctgggagtgtaaagcatgcccaggcagaaggtggggaggattctgttccagagttggtgggtgcactggaaatgggaaggagagattctcccacgaactgccagacattctggttttttgtttttttgtttgttttgtttcttttgagacagggtctgggtctttcacccaggctggagtgcagtgctgtgatattggctcactgcagcctctgctccccagtagctgcaaccacaggtgcacaccaccacgccctgctattttttgtatttttagtagagacagtgtctcaccatgttgcccaggctggtctcgagctcctaagctcagacgatctgcctgcctcagcctcccaaagtgctgggattacaggtgtgagccaccgcccctggccagccagtctgttttgtgtgtacaactgagggggcctcaggcccttaaggagctgagaagccaggtccagcacctggaggcgtccccaggaagtgcatgactactggccacatgaatggcagggatgatgaacagggcagtttagaagaggatgaaggaagtagggcgcgcccttgttagtgacagggttaagggagggcagaaagagaaaggtgggagagggggacgatgtagcttggtcatggcgagtttgtgatcgcaaactcagtttgcgggttttcaggccgcacacttaggggtgtggagcttgagcatcactgtggagaggaatggggggtcgctggctctcatcagtgcccctttcaggaggagctgagctcggttccctgggcagaggtgcagtcccgcctcttggcactgcagcggagcgggggcctgtgcgtgcagccgcggcccctgacggagctggacatccaccaccgcatcctgcgctacaccaactaccaggtggcgctggccaacaaaggcctgctgccggcccgctgcccgctgccctggggaggcagtgcggctttcctcagccgcggcctggcgctcaatgtcgacctgctgctcttccgcggtcccttctcgctcttccgcgggggctgggagctgccgcacgcctacaagcgcagcgaccagcggggcgccctagcagcgcgctgggggcgcacagtgctgctgctggccgccctgaacctggcgctgagcccgctggtgctggcctggcaggttctgcacgtcttctatagccacgtggagctgctgcggcgcgagcctggcgcgctgggggcgcgcggctggtcccgcctggcgcgcttgcagctgcgccacttcaacgagctgccgcacgagctgcgcgcgcgcctggcccgcgcctaccgccccgccgccgccttcctgcgcaccgctgcgccccccgcgcccctgcgcacgctgctggcccgccagctcgttttcttcgcgggygcactcttcgccgcgctgcttgtgctcaccgtctacgacgaggacgtgctagccgtggagcacgtgctcaccgccatgaccgcgctcggggtcaccgccaccgtcgccaggtgcgacggcagatgcccggggtggtggtgtgtgttggtttctctgatctggggccatgtgaggttccccccgaatccttacctctcccaccactggggccctctagccctacatcccaccgcgcgtcctcctaatcgcaggccccttccccccacggatcccgcctttcaggtctttcattccggaagagcagtgccagggtcgtgcgccgcagctcctgctgcagacagccctggcccacatgcactacctcccggaggagcccggccccggcggcagggaccgcgcctaccggcagatggcgcagctgctgcagtaccgagcggtgagggtgggcgcgacggcgggctgaggaggaagttgtggggtctgtctgcgcggagggtctgtctgcgcggagggtctgtctgggagagggcatgagacaaacggactataccaggagtctagggagtgactgggtggggaggcttcttgccctggcgagggtcgctggggactgcttggtcctgataacgcgcgtgggcccctcagcgacccctgctcagcctcaccgctgcttccccaggtctccctcctggaggagctcctgtccccgctcctcaccccgctgtttctgcttttctggttccgccctcgtgccctggagattatcgacttttttcatcacttcactgtggatgtggctggggttggggacatctgttcctttgcccttatggatgtgaagcgccacggacaccctcaggtcagagccgttccctggccctgggggtttgggctgggtgggagttcgcttgcctctcrggagcagacctgagttccagccctggctccaytgcttgctacctgtgccgttgagcgggtcacttcccttcctgtgctctcgtgccytcgtctgtcagatggcaacaatggcaatgtgctctccagagcacagccaaggccaggcttgtgaasacacagattatgtctgtatagcctatratggagttgctggcacatagtaacgtcagtaaatgggagcaaagaccacctgggggtgaggaatgggcttggccrgtgggtggggctgagtaaggactggtgcctggaccaaggctgtcaggatcaccctgggcaaagcactgaggctcagccctatccccgagctggcaatcagtccaggggtgacgaatagatgacaggcccaggttctgcactgctgctgtatttttgggtgatggtgaacaagtccccattgtggtctgtttccttcacgtggaagatggggcagtgtttcctgtcccacctgttcccataaggctcagtgttcttagcacctgaaagactgtccttgctcacagtggctctcggcgggacagactgaggcctcgctgtctcagcgtgcggaggacggcaagactgagctttctttgatgcggttctccctggcgcatccactctggcgccccccagggcacagctctaagtttcttgggcacctctggggccgagtacaacaagatgcagctgcctggggtgccacctcggctcgcrgcccctccaccccgggggtgctcagcaactgcacctcgcccctggtgagtcccaagcctggcctccccttctgccttcacccccacaactcctctccaaacccttcccctctaggctcaccttaggtagtaacctgcctcaccagcccccgcccccagcctgctctcctgccttctttaggcctctgcttcctccctactccrtttctgtcctctcttctgactccctctttggctttccctctcctcttgcacccagcctgaggccttcctggccaacctcttcgtgcaccctctcctgcctccgagagatctgagcccgacagccccctgtccagctgyggccacagccagcctccttgcctccatttcccgaattgcccaggaccccaggtgaggagtggaggctgagatgcaggggcatgtggaggggggtgggctgatcctgtaggagtggggagctggggcgctgaggggggattcagaaggggagtcctctggggtgtggcgggaggagggcatgacttttgacstgcttcatgttatgttccagctctgtgtccccaggaggcactgggggccagaagctggcccagctcccagaacttgcttctgccgagatgagtctccatgtcatctacctgcaccaggtgagtagaggggtgcccaaaggagaaatgtggagagaaggcaggtgaacaacatggagactgaggtggggtggagtctacggaagggtctagcagagtggcaggaggaggctgaaaagccctctgcctctagcccaggtgcttggccctgccctccttggggtgcagccctcattcctcctcctttccatgcagcttcaccagcagcagcagcagcaggagccgtggggtgaggctgcagcctccatsctgtccaggccctgctccagcccctcacagccaccctcrcctgatgaggagaagccatcctggtcaagtgacggtgaggagggtggggcctgcaggggacagagcctggtggacactgggcatcatggaactgcccagctgatggcctttttcaccaggctccagtcctgcctctagccccagacaacagtggggaacccagaaggcccggaatctgttccccggagggtttcaggtgaccacagacacccagaaggagcctgaccgggcctcttgcackgactgagaygactcctcagggtcagtattgcctcctgtgaggggagggagaaaggacggcataggtagttggtttggagtccgacttgaagcgatgggagcagtggtgggaatttggggtgatgggaggtggtcatctctggaatctagacccctggactgcttgccaagagccgtctcctcccacaggtaccctggcttcggcagccacaggagattggagggtggagtagaaaaacacaaggagtcattgttagaggccccatagatgacaggcccaggtgctttagttgggcaggacctgggagtcagtgaggaactcgccccgagaacagagaaaaggtaggcaaggagaggagatgctgatggcatctggaaacaagtcttagagatggtctgcacccagagggaataaggggagacatccccaactggaatgtgtcctggagcagctgcctgggaagaagtcctcgagtttcctcaaggtgggggacagaggtcaaggatgaggccgagctaaatggaagggcgacagtgaggcaggtgggctttaaggctgtggattcgtcatgctggcggctgccagcagcactttcaggttccttggggcttgtaggggatggggacttgtcagtggaaagacgggagggatgatgtttttggacttcagtacgggtgtgatgtcccaggaagtgggtgtggctccccatcctgtatgaaataagcagtaaagcttgctcatggctgttgcacatctctgtgactcttgtttctggcaggccccactcctggcagctgagtgctgcacctgccttctcgatcacgagcctgagaactgcacgggggagcagcccagactggctggaaaccatgttttcagagtgcagggtcaagtggcgtgtaggactctgtcaaaagaatgacccctttccccaccacatacccacaactgcacaggttaaaacagaaatcttgtcattttataattgtaatccacgccgggtgcagtagctcacacctgtaatcccagcactttgggaggctgaggcggttggatcacgaggtcaggagttcaagaccagcctggccaagatggtgaaaccccgtctttactaaaaatacaaaacctagccgggcgcggtggcaggcacctgtaatcccaactacttgggaggctgaggcaggagaatcacttgaacttgtggggtggaggttgcagtgagctgagatcacgccactgcactccagcccgggcggcagagggagactccgtttcaaaaaaaaaaaaacaaaaaaaaaaaactgtaatccacatgagctggggtaggcactttagtagttctcctaacatctggcacagtcccttatggtaaatcttcaataataaatacttgatttagagattagactttacaggtaagatactcctgagagaggcaagaggaatctaacattcgactaagaaacaggaagcgggtggcagtaggccctggggtaccgctgctgggaggggccttccagattaaggcggacccaggcccgaggcaacaggcctagagagggaaaagaggcgttttgctccttcctggaggaataatgctgaatccttgcagcctctggacagatgtgagaaggcaccacctcaagaggggaggagcggggctgatcctggtcgggcggacctgagtcgggcagccgctctcccggaactggaagggaaagccaggcggctctcaggggctgttggtgtctgagccgggagggtcgaacgcccagggcactgcgccccgcaactgacgctcctgcaaggaaaagctctgggtgcgtatgcggcttgtcacctcctgggtgcgcagcgtgagcccgaaaatgtcttcgtggtagcgttgctgatcctgtcggaaaagagcacagtggatcagaacccgactcggagaccttagcaggaaccccgcacgctcaggcccggcccgcccctccgcacccgcagcacgccgatgacgtcgccggcctcgtccagctccatgtcgccctccgtcgccaggatgcgctgcacggtctgcaggacgttggttgccatggtaacatcgccgcagacaaacatgtggccccgctcgaggcacagcacgcggtgcacctccgcagccagctccgtcctcaggatgtcctgcacgtaggtctgcggggcggcggggttagggcgggccctggtgggggtgggcgcgggggcgcagcccggggctgctggctggccctggacgtgaaagtctccggagcgggcctggtggggcctgcgtgccctggggcggtgtcaacaggggcagagccaaaggggcggggcaggggcgggaggaggcgggcctagaggggccggggcacaagggtgggccagagtgtgcaggggtggctgagtggtcgtgggaggccacgggagggccgtggttggtgtgccccgctggagagcgcgagtcctcccctctctccctatcttcaggttaccattgcgccctcagggtctcacaccttggggttgtcaggttcccgggagaaggcggtgaggactcggccaaacaccccgcgctgctgggcgttctgcacctcgtcgcggtagagatggtcaagttgggagcatcggcagccgaacaccaaagtcatgggagtgggctgcagccctgcaagcaaccccgcgcttgggaaggctcttctccggggcacagtgctagtggggcctccccacaggccaccgtcgcccagcctggcagcccagcgttttgggctgaaaccaccattactttggctgtttcatctctaagagagtgtagaatgctttcacagagaccctgcacagccctgatttacagagggaagggaagcgcgggtgaggtggtggcccctggtggagctgcgctagaatgcgcggcttcggactcagaattccatgccctttgcattgtgtgacatcgcagtccccttccccgctcccacttcatattctcccatacttataactctcctcccagtcacagccctcttcttttgattgacagaccaccctgggcaccccatgctcaatatgaacaccttgtagcatccttaggtcttggacagacctcggtcagctctggcacagtcaagaatccaccttgggcagttcttctttgagtcttagccctaatccctttgaaaattctattttcctttgtcctcaatccagtcaacacctactatgtaccaggcaccaggaagccagaagctcagggcccagcccttgcctttggtacctgccctccccttggtctcatgagcgtcttttcagctttgtggactttgtttcctgccctctctttcctatttcctgccttccagccccacccctctgtccctagattgtgtgactcccttcaggcagtcctttagtccccagcctcacctttgctctcaatgtcatgcagccgctcctgccagaatccccggaagggggcaatgccagtgcctggacccaccaggatgcagggcaagctgggatcgggtggcagccggaaggagggagccctggcaggagagacactccatcaggtcccctttgcctttcctgctccaccattctcaccatgcagggtgggtggagcaaggaggacccaagttcttcccatctcaaaaaaaaattaaaaaaaaaacaaaaaacaaaaaacaactctacttgctgaaactccttggatctgtggtttctggagattgcaccaaaggaaatatagttcattttggattgaagaatacttagatgactcaggggatttagaaaacgtgggaagggtgaaagacactttcagttcataatgggttcactaagtgtgtttattttaagtatccttaatagtggtatttagtttatgttcagtagatgggtacggtttatttgtagtttagccacctgggtggatttgaatcaccaggcccagctgatggcagcctaggaactgttctcagtcctaccaggacttttggttcctggctgcgagagcgggcaagacttctggacacagcatgaaggaagggtctcttaaaatccttcaccctcggtccgggcgcggtggctcacacctgtaatcccaagactttgggaggcggaggtgggaggattgtgaggtcaggagctcgagaccagcctggccaacatagtgaaacaccgtctctactaaaaatacaaaaattagctgggcgtggtggtgggtgcctgtaatcccagctactcaggaggctgagacaggagaatattttttttttttttttgagacagagtctggctctgtcgcccaggctggagtgcagtggcacaatcttggctcactgcaagctccacctcccaggttcacgccataggagaatctcttgaacccgggaggcggaggttgcagtaagccgagatcgtaccactgcactccagcctgggcgacagagcaagactccatctctgggggaaaaaaaaaccaaaaccttcaccttctttgagtccttggtgacaccaaggccaaagggtggtcttaaccctaactagtagttctccctggattgagtgaggatttagtgactgtagttcccaggtgccatgctgcccaacatcagacagcccagggacatagagaggaacacagaagctttcagaaagccacagggccagccggtttgataccagctctggctctgggagctatagtttcagggcagaactctgagtctaaatgaatgagagagccaaagcttagccagagttctgaagtgacctaatgacaccacacccttgacatgttacagagctccttcctgtttccagtgacacccctcaccagtgacactcctcaccaaagctgccaccctgaccctgggcagctccccaccaagtcctccatctcacttacccccggatgaagcagggcacagggtctccgggcttgagctggcttagccacgtggagcagactccatagtgcagggggcccagcccatctgggggtgggaaggagaggccggtgaggggccagagaggggccggtcccaaccctgctgtggccaggcctgctcctgcttgttgcctcaccctgagtcctgtatgccagcacagctacagtgaggtggatctctcctgggtgggtgctgggtgccgagctgactgagtagtaccggggctggagcagaggcagctgggtgaggagcagtggggcaggcagcgccaccgacgggaactgctccagcacctccagcagcgtggggcagcggaaccacttccactcctcgtagcgtcggggatcctggcggggcaggatgcagtgggttggaggccccatagcccttcctagtaacctcccttcttgacccctcccccactgagcctctttagggtttctccctgctcagttcaggccaatagagttttctctaagacctggagaatccagccatgaattcctccctgaggagctgggtcttaaagcaccagtgcatgtcagccaggagaagaaagtccaggggggactttgcatgggggtttcctgccactggggtccccccagctcatcccgtctctctagcccctgtgcctcattggggtggcccccaacctggctgagggcctccagctcctgctgttccctgggctcttctgccaaggtgctgagcagccgcaagagctgagggctgggtggggaggtgatgtccaggaagaaggtgagagcctggcgcagcgtgcacgggggcagccgggggtcccgcacccagccggggggagggccacctggggatagtgcacagggagctctgaggacagggcccagcaggactgcagtacctgggctgatgtttgtgttttggtgactgttagagagcctgcccttgagcagcggggtcggcctgtctaggtagcctcagtgtattgttcgggggcccctggccggactgggttggtctgggctcctctgcctctgactccacccccttattttaaataaagcccaggcattgatgtggcagc

SEQ ID NO: 97474 - DNA, 22723 bp, Homo sapiens
tttttctcaggtttgtcaaagatcagatggttgtagatgtgtggtattatttctgcgggttctgttctgttccattggtctatatctctgttttggtaccagtactatgctgttttggttactatagccttgtagtatagtttgaagtcaggtagcctgatgcctccagctttgttcttttggcttaggattgtcttggaaatgcaggctctttttggtcccatatgaactttaaagtagtattttccaattctgtgaagaaagtcattggtagcttgatggggatggcattgaatctataaattaccttgggcagtatggccattttcacaatattgattctgcctatccatgagtatggaaggttcttccatttgtttctgttctcttttattttgttgagcagtggtttgtagttctccttgaagaggtccttcacatcccttgtaagttggattcctaggtattttattctctttgaagcaattgtgaatgggagttcactcatgatttggctctctgtctattattggtgtataagaatgcttgtgatttttgcacgttgattttgtatcctgagactttgctgaagttgcttatcagcttaaggagattttgggttgagatgatggggttttctaaatatacagtcatgtcatctgcaaacagggacaatttgccttcctcttttcctaattgaataccctttatttatttctcctgcctgattgccctggccagaacttccaacacttgttaaataggagtggtgagagagggcatccctgtcttgtgccagttttcaaagggaatgcttccagtttttgcccattcagtatgatattggctgtgggtttgtcatagatagctcttattattttgagatatgtcccatcagtacctaatttattgagagtttttagcattaagggctgttgaattttgtcaaaggccttttctgcatcttttgagataatcatgtggtttttgtctttggttctgtttatatgatggattacgtttattgatttgcatatgttgaaccagccttgcatcccagggatgaagcccacttgatcatggtggataagctttttgatgtgctgctggatttggtttgccagtattttattgaggatttttgcatcgatgttcatcagggatattggtctaaaattctctttttttgttgtgtctctgccaggttttggtatcaagatgatgctggcctcataaaatgagttaggaaagattccctctttttctattgattagaatagtttcagaaggaatggtaccagctcctccttgtacctctggtagaattcggctgtgaatccgtctggtcctcaactttttttgattggtaggctattaattattgcctctatttcagagcctgttattgatctattcagggattcaagttcttcctggtttagtcttgggagggtgtatgtgtggaggaatttatccatttcttctaggttttctagtttatttgcgtagaggtgtttatagtattctctgatggtagtttgtatttctgtgggatcagtggtgatatcccctttatcactttttattgtgcctatttgattcttctctcttttcttctttatttgtcttgctagtggtttatcgattttgttgatcttttcaaaaaaccagctcctggattcattgattttttgaagggtttttttttgtgtctctatctctttcagttctgctctgatcttagttatttcttgccttctgctagcttttgaatttgtttgctcttgcttctctagttcttttaattgtgatgttagggtgtcaattttagatctttcctgctttctcttgtgggcatttagtactataaatttccctctacacactgctttaaatgtgtcccatagattctggtatgttgtgtctttgttctcattggtttcaaagagcatctttatttctgccttcatttcgttatgtaaccagtagtcattcaggagcaggtttttcagtttccatgtagttgagcggttttgagtgagtttcttaatcctgagttctagtttgattgcactgtggtctgagagacaatttgttataatttctgttcttttacatttgctgaggagtgcttgacttccaactgtgtggtcaattttggaataagtgtgatgtgctgagaagaatgtatattctgttgatttggggtggagagttctgttcatgtctactaggtccacttgatgcagagctgagttcaattcctggctatccttgttaactttctgtctcattgatctgtctaatgttgacagtggggtgttaaagtctcccattattattgtgtgggagtctaagtttctttgtaggtctctggggacttgctttatgaatgtgggtgctcctgtattgggtgctcctgtattgggtgcatatatatttaggatagttagctcttcttgttgaattgatccctttaccattatgtaatgaccttctttctcttttgatctttgttgttttaaagcctgttttatcagagactaagattgcaacccctgcctttttttgttttccatttgcttggtagatcttcctccatccttttattttgagtctatgtgtgtctctgcacgtgagatgggtctcctgaatacagcacactgatgggtcttgactctttatgcagtttttcagtctgtatcttttaattggagcatttagcccatgtacatttaaggttaatattgttatgtgtgaatctgatcctgtcatgatgttagctggttattttgctcgttagttgatgccgtttcttcctagcattgatggtctttacagtttggcatgtttttgctgtggctagtaccagttgttcctttccatgtttagtgcttccttcaggagctcttgtagggcaggtctggtggtgacacaatctctcagcatttgcttgtctgtaaaggattttatttctcgttcacttatgaagcttagtttggctggatatgaaattctggggtgaaaattcttttaagaatgttgactattggcccccaatctcttctggcttgtagagtttctgccaagagatctgctgttagtctgatgggtttccctttgcgggtaacccgacctttctctctggctgcccttaacattttttccttcatttcaactttggtgaatctgacaattatgtgttttggagttgctcttctcaaggagtatctttgtggcgttttctgtatttgctgaatttgcatgttggcctgccttgctatgttggggaagttctcctggataatatcctgcagagtgttttccattctccctgtcactttcaggtacagcaatcagacatagatttggtcttttcacatattcccatatttcttggaggctttgtttctttttattcttttttctctaaacttctcttcttgcttcatttcattcatttgatcttcaatcactgatatcctttcttgcagttgatcaaatcggctactgaagcttgtgcatttgtcacgtagttctcctgtcatggttttcagctcaatcaggtcatttaaggacttctctacactgattattctagtcagccctttgtctaatcttttttcaaggtttttaacttatttgcattgggttcgaacttcctcatttagctaggagaagtttgatcatctgaagccttcttctctcaactcgtcaaagtcattctccgtccagctttgttccgttgctggcgaggagctgtgttcctttggaaggggagaggcgctctgatttttagaattttcagcttttctgctctgttttttccccatctttgtggttttatctacctttggtctttgatgatggtgactgacagatggggttttggtgtggatgtcctgtttgttagttttccttctaacagtcaggaccctcagctgcaggtctgttggagtttgctggaggtccactccagaccctgtttgcctggatatcagcagcggaggctgcagaacagcgaatattgctgaatagcaaatgttgctacctgatcgttcctctggaagctttgtctcagatgggtacccggccgtgtgaggtgtcagtgtgcccctactggggggtgcctcccagttaggctactcggaggtcagggacccacttgaggaggcagtctgtccgttctcagatctcaaactctgtgctgcgagaaccactactctcttcaaagctgtcagacagggacattcaagtctgcaggggtttctgctgccttttgttgggctgtgccctgaccccagaggtggagtctacagaggcaggcaggcctccttgagctgtggtgggctccacccagttcgagcttcctggccggccgctttgtttaccaactgttagtattatatgtataataggaaagtttgtttccaaaaaaaagtactatataaattcagcggagtggaacttgttggctaatgttatttttcctgattttgcagataaaaaaaattgaggcaagacactttttataacttactcttcttcccctgaataactaaaactgagtatcaattactcatgatagtcttttctttattttttgtcttgacccttcagccaaggtataggaaaagaaaaatgtacttcaagccatcagctgtgtggaaactttagtgaaacatttcaggtagcttaaaatttttaattagttgattccccccttcccaaacttaggttatttttttcccgtaattttcttccagatctatggcaaccaagcaacactgtgtcataatagtttatagtttacttttgttactttttaatttgtttaaaaaacagatacattttcagtgtttaaaaatgaacaagtatggaaaggcttatacagtaactgaaaagtctcctttgggaagccaaggtgggaggattgcttgaggtcaggagttcaagaccagcctaagcaacatggcgagactttatctctacaaaaaattaaaaaattagccaggtatggtggtacatacttgtagtagtaactacatgggaggctgaggtgggaggatcacttgagtccgagagtttgaggctgcagtgagctgtgattgtgccactgcactctagcctgggcaacagagcaagatgctgtctctaaaagagatttttcttttaaagaaaaaagtctccctcatagccctgttctacaaaagtcctatttccttccccacaaatagcctctgttacactgttgttagtttcttgtgtgaagatttacttttaaaatagaactattttttagtatatcttctagtgatcttagtttcagtaggcttaggaaatggatctgagagaaatggtatttaataactatgatatgtttaagaattattggcatttattttcaatgaggttacaagactcttttctttgaaaacactgtcaacttacagagtcaactaattcatgaccgaaaatgtattagaaaattgtcatctggagaaactgtcacataccagaaaaatgaaaaccttgaaatgaatggggattctttaatgtttgccagcctcatgaattctgagtcacgtctgaatgaaagccctactgatgacagtgaaaaagaagccagccattctgaaagcaatgttgatgctgacagtgagccttcagaatctgaaagtgcttcaaagcagactgggctgttcagatccagtagtggatccggtgtgcagccagatggacccctttaccctctgtcagcaggtaaactgctgtacaccaaggagactgacagtggtgataaggaaatggcagaagctatttctgaacttcgtttgagcagcactgtaactggggatcaagattttgacagagaaaatcagccactaaatatttcaaataatttatgttttttagaggggaagcatttgaggtcttatagtccccaaaatgcttttcagaccctttctcagagctatataactacttctaaagaatgttcaattcagtcctgtctctaccagtttacatctatggaattactaatggggaataataagcttctatgtgagaattgtactaaaaacaaacagaagtaccaagaagaaaccagttttgcaggtaattatttttttaattacataattattgatctcctgatagtgtctagtgagttacaaatttcactgagaatttyactgagaatcttgtccctatacttgtgttacttaggcagagattgtttcattcatatttgtacctgagcgcttacaatactgggcagaacagattttcaagtttttttatttaaataaagagcaggaagtatacaactctgccttgaaaatgcaaacccatataatcttatttgagggaactacctatctgaaatctatccagaagaaatatccctacaacttttttttttttttttggagatggagtctcactctgttgcccaggctggagtacagtggcgcgatctcggctcactgcaacctccacctcctgagttcaagcgattattctgcctcagcctcctgagtagctgagattacaggcgcccaccaccatgcccagctaatttttgtatttttagtagagatggggtttcaccatcttggccaggctggtcttgaatgcctgacctcatgatccacccgccttggcctcccaaagtgctgagattacaggtgtgagccaccatgcctggcctccctaaaacttctaattgtatcactggtaagataaatgataaagctaatgtgtttcacagatcctatcaatctgttgtaaactcaacgtaagataaattttgaagattttaaatagtagcatgtcataaagctagcgctataattaccatgattagttggtcagagagaagtggagaaagggggaaaataagaaattttcagttcatctttatccttgagtaaatggaaagaatactctgattcttagtgactacttgttttaaaatgtaggctttattattcaggtacggtgaggctraaagatcaggagataattgccactgaagaaatagtgtgttattcatagttcccaagaagtgggggcccaccatgctgcacaggaccacacagggaagcaccagcgtcagtcaggaggtaggggagtgaggggaaaacatgggcaggagcctttagtgtgatttctaaaggaagaaatgggtaaggcaggctaagcaggcttaggattggctagtttgaataatattagtgggctctgggatataggagctgtctytagttatcaggtgcctggtcctagagtgattacagcaagtggatagtgtcccagagtgtaagagcccagtgaaggaggttgttggggtatgcgctctgggctctggattggtttgcatgtgacaggcatgcatatgtaagttgtttactatctctaggaattagccctgggaggggttgtccctccaatgttaaccagaccctagatgtcaaagcatcagaataaagacatacttaatacactagtaataaagaaatgggagaaggaagaaatacctatatgcaattggcaatgttcaaatactaacataaatcttaggaatttagaaattggggctgggcacagtggcttacacctgtaatcccaacactttgggaggccaaggcatgaggatcgcttgtagccaggagttcaagaccagtctgaggaacatagtgagatcccatgtctacaaaaaacgttttaaaaattagccaggtggggtggcatgcacctgtagtcccagctacttgggaggctgaggtgggaggattgcttgtgcctgggaggtcaaggctacagtgagccatgaccacctcactgcacttcagcctgggtaacagcaatctcaaaagaaaaaaaaaaaattagaaatctagaaatctttttaaacccaaattcttcaactacacgtgcttctggtgatttttggctggagggcattgacagaaattaattctagtccatctgctttctaccttccaaaattttgtttcgtgttacctctcctattctttgttcttattaactgtgtgccttaaaaaaaattcctttactttcattttagcagagttttaggaaggagtaaagactgtcctttcatcagaagtccaatttctttaacatttttaaaaatgtggtatgatacytctgtataaatttttattatatggtagataatgtataaaatggaattttataaataaatttattgtattttatgtagaaaagaaagtagaaggagtttatactaatgccaggaagcaattgctcatttctgctgttccagctgtcctaattctccacctgaaaagatttcatcaggtaagtttcttcagtagcaccataattttcatcatgtgttttacagagcrttaagtcctatagaatattgtcaagaattagacaataaccagtaacttattgcattttaaaatgtgtcatgtgagatttactgctcatctagccataatagtttataagactttcctgattaaaattgtttaattcacaatatttgaaaatttaggcagcaggaacctaaatggtatctctgtgtgtgtttgtgtggtaatagaaaataagttttgtggctgggcacggtggctccctcggcctttgggaggctgaggtgggcagatcacctgaggtcaggagttcgagaccagatggaaataagagtcttgctctgtcacccaggctggagtgcagtggcacaatctcagctcactgcaacctccacttcccgggtttaagcaattctyctgcctcagcctcccaaatagctgggattacaagtgcccaccaccacactggctaatatttgtatttttagtagaaataggatttcaccatgttggccaggctggtttcgaactcctgacctcaagtgatccacctgcctgggcctcccaaagtgctgggattacaggcatgagccaccacacccagcccatacaattttcaaataaaaatcttaattgtataaaacaaattatcaagaaaacaaggagaaaacttaaataatttttttgggagggtagaggagagaatctccctctgttgccaggctggagtacagtggcacaatctcggctccctgcaacctccaactcctgggttcaagcgattctcctgcttcagcctcccaagtagctgagattacaggtgtgtgccaccacacctagctaatttttgtatttttagtagagatggggtttcaccatgtcggccaggctggtcttaaactcctgacctcaggtgatccgcccacctcggcctcccaaagtgctgggattttaggcgtgagccactgcacctggcccttaaatgaatatttaacttgacctctgtgtgaaagactttctaaatataaaaccttaagaaggaaatctcaaggaaaactattgatagtttacatatttgcaacattttaggtgggatccagatgtgcgagaggagatttttctccatcctgccatccctatccacagattagattaagttctgaattcttccatagccaaggttgtagaagctcaatggaactgaaatgacacagagaacagaagcagatgtattatgtcttgtcatatcagagcgcctaatggaaagggtacatctgcagtgattctgtgtgaataagagaggataatgccagattgcagaagctaatttcatgatgcaccgcagttattttatatttggtacttgcatccctgtttagaaacaacttacagaaataattcttgcccttaaagggaaatatttatggacatccatctaggtccctttttctctcaagctaaatgtaatgtcagcaaagccacattcttattcccagggtttgrgcattgtagggagcagagtccctaagcaatgcctgtgtttctagttcattgacatccctgaacgccttctctatggtagctttagggctgtatatcagaaacatccacaacacttaaatgcaaatctgaaactgaatagagatctttgtcataaatatgccaaaattttaatattgtaagtatataaagagtcttaaagatcaataagaaaaatatcagaccctaatagtaaaatgggaaaagaatatcaactgacatttctagaagtacaaagtccaggcaagtatgaaaaaggtccatccttcccagcaaaagaaaggcaaaataaaatggcagattcttttttcaacctgtccaaattagcaaagatgtagtagtgttgataaggatgaactgagatagagacattttcatttaccagcattgggagtgtaagttggtaacaccwgctagaaagcaatttagtaatgaatatgaagaacattgagtaattttttttttttttggagatggagtttcgcttttgtcgcccaggctggagtgcartggcgcgatctcggctcactgcaacctccgcctcctgggttcaagtgattctcctgcctcagcctcctgaatagctgagattacaggcacccaccaccacrcctggctaatttttgtatttttagtagagacagggttttaccatgtcagtcaggctggtcttgaactcctgacctcaggtgatccacccacctcggcctcccaaagtgcttggattacaggcatgagccaccgtgcccggccgagtaatgttttaaacaaaacaatttttgaacaaagctaattactcttgactaagaatctaccacaaggaaatagagatatacacaaaaatttgtgtgtgccccactcagatcatgccagacgtaaggcctagcttaaatgtccaatgtgcaggatatcaaatttatattttaatatsgaaaatgcagtgtatcatttcattaaagggaaaaaggcaggagactgtatatgcaaatataagtctagatattttccaaaaattaccacctaaaaaaagattcatcttatattaaagtccttcacacagtctcttgtatgatggggtagtttctcaacagcaaagtactgattgaggagaacacaatagctgaaatgatctcagacagtgctggtattgggtgcttatagaggtcacctgatgaaaaaggcaaagaaattgaatgtagattaaatattcctgggatatgatgtcataatttcatgtcagctattttcaagccttctaaagatcacttgaaaaaacaaatcagtaggtgaatacacttcggcaaaaaaaaagggttttttgtttttaaagaaagataagccataaaaaagcaacagatctacagtaaacttgtgattagtatgcaaatgaaagatcagtcattgacgtcatgacaggttgccccttttcgtttttgtctacccattcatttcagatttaggtatcttttcattccaacagagtccatttctatttatgggtctcctcaatacctttgatattttattagctagtttttattaccattacataatgcaaagcatatactttttaaggtttgcctttgaaaattagaaaaagagagcatatttaagaacataaaagtacaattttattkatgtaatatatagcatttacttttactgataaaatgttttgagtgttcaggttgtttgttttaatgaatgaatataattgaattttagaactgaaaaggacctaatctcatccttttatatatggaatcaagttgacaaccagtcactgagttaggcctagaacaccaatctgtttactctttagttgaatatattttcatgatagcataygtgtcagtagcttagctttyatattgaatttatttttccataagtgttgaaaagccataatgaaagtaactattccccctattgtttgtggtaaaaatccccatgtaaatgaataatctttgcagtaacaatttatgaaacctaatttttaatttattcatattaattttagactatacattagtcacattttttatctatgaaaaaactaagtcctacaatttctcttttggttttagttaacaaagacaatgctttatttctaattgttgcatttcaaaaatgttttggtctttttaaggctggcttgagtcttcgtaaagtaaacagacatgtagattttccacttatgctcgatttagcaccattctgctctgctacttgtaaggtacagtatattaagatatttaattgatttataaattaatatgcttgaaagtatcctatatattattagacaatgctttttctaaaaaaataacttctcttctgaaagggaattttaatagccagtgattaagtcagtaatatgtggaacacttaatacattgaatatgatttttgtcctttgggagacaaaggaaaattgaaaaggtaaggcatgaggcatgatggttatgaaggtctaagctgtttgtaagtgctactggaagctgatggttgctgagagaaggaggttttgtgtcctcgattgttccttgtgaactgtttaatcagtagtagttttaccatttgcggagttctgtatcttttgcaaatcagtgtagaagtgaattgtctttcgtgccacttcatgtgtactactgagagtggtgtacttgtcagcggagtgtgatacttcaaaactgctgctactttaataattaggtacagaaagcagactggcttatcattgcttattttacatgtaagaattgtgtagatgaagtagatgacttggtcttccttgaaggaagcagttatggggtaacatactgtcctgttcatgattactggctagaagtctagattttgtagtatgtaatagaatgcttattgaacttaatactttcagcacattgataatcaaaacaaaatcatcttaaatgcaatttttggttgaattacagtgtatctgctgtggaataccagcactatctgtcaattgttaatactcagtattcctagaatttaataatgtggtaaataataatgaaatttaacaatctttgtgttaaacttatgaaaacatatttttaaaaagtacctattacggagaatttccaataaacacaaaagcaaatagaacagtaccatgaacttccagcacccagccctaaaaccttacatccatggccagtcctgccctatccacacactaattcactttcttctcctttattattttgaagcaaacatcaggaatcatttcacccataatatttcactatgtatctctaacagataagaattgctccctctacactttttaacataaccacaatatcatttaataattctgtcatatcacctagtgttcatattttcaattgtctcataaatgtgatttttaaaatcaattattatccagataaggactggatctattgttcatttgtgcaatttttaattttcactttttggaatttcttttaaaatttaattttgtttaataattacataacatatttatataggtccaaagtcaaatgtacctaaataaggtaaattgaaagatatctggcttttctccatgacattctacctgtttgctccttccccttataggtaaccattttaaaaattatggcttattcttttataattttttttaaatataagcagacaggcatgtatattttcatctcccctcttaaataatggtagctgacactgtgtatccttttttctgccttactcttaacattatatcctacagcttattccatagcaccatttagagatagtctacactccatttttcaagcagcataatactctattgtgtggatgcatcatagtttattcaaccagtccccaatttacagacattttaattcgtgttttgatattacagataatcctgcaattaatagtgtggtacatgtcttttgacattttgctcatgtatttgtgggatcaaatcctagaaaaaggattaatgaatccaagagtaatacatacagaacttagcctgataacatgaaatatccctgcataggccaggctcagtggcttacgcctgtaatcccagcgctttgggaggccaaggcaggtggatcacctgaggtcaagagtttgagaccagcctgtccaacaaggtaaaaccctgtttctactaaaaatacaaaaattagctgggcgtggtgacagacccctgtaatcccagctacttgggaacgtgaggcaggagaatttcttgaacctgggtggcggaggttgcagtgagccgagatcacaccattgcactccagcctgggtracagagcgagactccatctcaagaaaaagagagagagaaaaaaagaaacatccctgcatagggattgtaccctttgcattcccatgtgcaatatgtgtgagtgctcttttccccacaaatcagccaacagagaaccttgttaaggtttttccattttgccagcctagtaagtatggaaagtatctcagttttactatgcatttttcttatgttaagcagatatacatttacttacttttccttaaaacagtatttaacaaatattactaatttgggtttttttctttgtttaaaagaatgcaagtgtgggagataaagttctctacggtctctatggcatagtggaacatagtggctcgatgagagaaggccactacactgcttatgtgaaagtgagaacaccctccaggaaattatcggaacataacactaaaaagaaaaatgtgcctggtatgccatcctaagtttattttattcttaaaaacaaacgaatatgtgcttccttttctgggagagctaagttattatttcatagatgcctctagtggatttgcttgcttgctttattttaacttaattgattgattgattgattgattgagacagagtctcagtcatccaagctggagtgcagtggcacgatcttggctcactgcaacctctgtctcctgggttcaagtgattcttatgcctcagcctcctgaatagctgagattacaggcacgtgctaccacacgtgactaattttttatatttttagtagagacggggtttcgccgtgttggccaggctggcctcaaactcctgacctcaagtgatttgcccgcctcggcctcccaaagtgctgggattacaggtgtgagccaccatgcccagcctcaactggattcaccttaagaattccctctaggagtgcctagaaaatctcaaatattatgaagactgtacccttctaggtcatatgagatgacatggtattttaaggtactgagtcattgtgtattatagtggagtagcattttatttaacaataccaaaagtttttgaagccatatcagattgtcagaagagttggagttgaaaatttgctggctttgtttatgggtcatccaactaactttgctttttttgtttgtttttgaaatgaggtctcactttgtcacccaggctggattgcagtggcaggatctcggctcactgcaacctctgccttccgggttcaagcgattctcctgcctcagcctcccaagtacctgggactccaggcrcctgccaccacacccggctaatgtctgttgttttttaaattagagacggggtttcaccatgttggctgggttggtctcaaactcctgacctcaagtgatccacccacctcagcctccccaagtgctgagattacaggcatgagccactgcgctgggccagacagcattattaattatacctataatattaatgctttgaaagaatttgttctaatgagtacacatggacacagggaggggaacatcacacactgggcctgtcgggggaggggggctaggggagggatagcattaggagaaatacgtaatgtagatgacaggttgatgggtgcagcaaaccaccatggcacatgtatacctatgtaacaaaccacattctacacagatattccagaacttaaaaatataatttaaaaaaaaaaaagttctttttggaaaatgcttaacccaagaaaaaacagacttctcaggtaaaatttggcattagatagagtttgtaatgaatatgttattgtttgtaatttagagtaagaacctaaagcatacttactttaaaattgtacttctttttgttttgctaggtttgaaagcggctgatagtgaatcagcaggccagtgggtccatgttagtgacacttacttacaggtggttccagaatcaagagcacttagtgcacaagcctaccttcttttctatgaaagagtattataactattaatggtaatgattatttaggtcatttgtttttgaatgccacagtgataactataatatataatgtgcctttstagtcttccctcttctgtaggaatagcatgttcctcaaatggtcctgaactttttcaccattttggtgaacccttttaaagtaaatttactcaatgctttaaaattcatagtcttaaaataaatgtgaattttgtttccaggtatttattctggggtacaaaaacttcccagaatttacagtaggaaaggaaacccctttatgatgtggcttattattacaagcattcagaaatgatgctggctaagtcaaatcattccttgagacagtgattcctaaatgtaatgccaccttcctgaactctcacatattctatatcatggttattttaaaaaatatatttttagccttttgtaaccttagtcttgttttgagcaaycatattccatgttttatgtgcttttatatttttataataaatattaaagtaaaactattaaaaattgtttatccacgtaccacttaacttaaaatcatctcagggccatctagtggtatatatgtgtactaccatttaggaaactgctataacacataatttcatgaagtaacacctaatacggtgtagttccctggtcatattttatacaattcaaccatataaaagggtgtcactgtaatttcagtagtgtgggtttacaaataatctgctggttagcttattaccttgaggttttgaaaaactagaattatattgaggcatttcataaacatatctcttgcaccctcttcatggtggagttaaggataacttgcaggtggttggccaaggcccaatatagatgattataacatttagaattggcaattagaagttgataatccatataggaccataggatagctttgaaatataaattaccaaattatatttgtaaatgatagagaattatattcttaacagaaaaatatatactttttctacttcttgtaaatactaaacacagttttggggttttgaaatcactttgtcttcagcaagcatcattaataagttcaggtgaatttagcttttaatggggcattaagctggcatttttgattttctttttaaataatagcaaaaatatcatttttcccctctagaatacaaattattgagctgtcaaaacttggcatgaagaatatactattacttaggcttaaatatcaaaagataatggctacttcagtgtcatattgttgaaatagaaacaaaactgcatggttcaagcatcctaatcattagtgccaatgaatgatagtgcaggcaagtgccaggtaaatgcctagtcccacttcattctcctcctgggaagaaaggataagaatagtggctgcagataaggtatggaaatatttaatcaagactgtcttaaacacataagcatatataatgttatcaaggttaccagtgctgccttttgatatatggatgaacataactgtaattaaagacggtaatagtatacaaaatgcagagcttaaaaatgtcattgcataaattctatttttaagatgttgaaatgttagtagtgtttttcttgatttttaacagtgaaataatcaagaaatatatctttaagttaatctgcaaagtcaggctgtgttctgtaaaaggtatttcacagcattttctgtttaactgtaatctgttatcatggagatctcagtaccagagcagtgaattttttgaaaaatattgactgtctttattcaagtcagccatcttggtaagagcagttttcatccccccactgcccaaatgtaaatatagatcacctaatttttcttacagaaagatactgttaagaggcatgcacttttcatcggatggtcacttgtttcttgtttcaaagacaaatatttggatagatacccatacttgctatgagtcagtcacagtgctgacactattttaacatcatttaaaatggaaagatctacatagatttttgacattattccagaagtaacatgcaagtaagatatttttattgtcattttcttcatgttaaaggagctacttatgaaacctatttttttatggcctagagtttatgagtgctttttccttgtcttctgaaaatggaataaattggatttttgatacttaagaatttcctaaagatagcttttgtaacagagaaagcatgttaaattacacatgggtctaccttaaaatttttgttattatttccaaagcacatttgcagggatagtaaatgtatatagtagcaagtctactataataacagtagtttctggatcacctcaggaaacagtataaataaataataatgtttacttatcatcaacataactaccatagtgtttgaatgaattaaagtttcattagctttatttagaaactggtttaccccagcttcccgtttttttccaaatataaaatgataaaatattgattatgtgccaatattgtcatttaatgttcttaaaacttgtgaagaccacctttttaggtagctgagaagagtgatagttggtatcaatttgttagccaggcatggtggctcatgctgttgggaggctgagtggggaagatgcttgagcccaggaggtcaaggtgcagtgaaccatgatcacaccactgcattcctgcagagtgacggagtgagaccctgtctcaaaaataaataaaaagaagacagttggtatcaattcaaagaatagttgatgcctgttctcttattttaaatgtaccaacagagctattttactgtatttaatagttcttagcttccatgtgtgatgattttaatcagtgattttatgcaatagctgaagaaaattttctgaagattaagctgtgaaatgtatcaaccctcatctaatttttgtagtacaaaatgacatcctgattccttttaaaaattcacgtttgtaatttatttttctgcatgtattgatcaaataagcctaaaccaaatatgtgcaataaaattgagcctttagatagtatctagtgcattgttaaaaaagattatttctagatatttatgatgtttttgtttacgtagaaatcatgaattcaaatctgtttaaaagatgaccatattttcaattttgagtaatacatattattcctactgttttttttcttttgccatgtttctagaaaacagctgtgtaacttattgagcgttattttggtgttactgtataaaacatgcataataaatattcttatttatctcatgttacaagattggtcctggaattttcacagtttacgttattgacagaatgttttatcaacaatgcatttgcttatgtcttagtccactcaggctgctataataaaataccatcaactatgtggtgtattaacaaaaatttatttctcacagttctgggagctgggaacttcaagatcaaggtgccagcagacttggggtctggtgagggcccacttctgttcataaagacagtgctttcttgctgtgtcctcacatgggaaaagtacaaggcatctctgtgggtccttttccatgcagcccattcatgagggttccatcctcatgacctaatcacttctcaaaggccctatctccaaataccatcacatttgggatttgtgaatgttgtaggggacgtaaaccttcagttcatagcagctttctcagctatattcaaaataccctacatattttagaaattctctatttcaaaacagtttatgggccactttacctcagatttcagtatctaccaaggacgatcatcttcctttcaggggtttcttaaaaggtgtattacttagacaggataattattaagacaagggtaaggtcttgcaccagcaattaagaaatactttgcctacccatttgtgtctaaacttcttccagatcatgaagctctttgagattatgatgaaagttagagactatcttttatttgtttagtcatttagtaagtattttttaggccaggcacagtggctcatgcctgtaatcccagcactttgggtggccaaagtgggcaaatcacctgagaccaggagttcgagaccagcctggccaacatgacaaaaacccatctctactaaaaatacaaaaattagctgggcatggtggcacaggcctgtaatccctgctacttgggaggctgaggcaggagaatcgcttgaacccgggaggcagaggttgcactgagccaagatagtaccactgcactccagcctgggtgacagagactgtctcaaaaaaaaaaaagtatttgttgaatacctgttgtgtggtaggtactagggatacagcagtcaacataagagccagaaatctaaaaggtgaggaaatacacattctaagaatgtaaggaaaatttatgtcaatggtaatgatatggagaaaaatcaagcaatatggactccctatgaagtcatgcagaaattaaggtacaggggatgaagatatcctagagataaaaggcatggtgatattagtactgatattcctgaaagagaaagctgagtgttgtaggaaggatggggttttaattctggggccctctcttctggcaatatagagacggagaagggaagtcttaacatctgtatgttcccagaaaaatgtatctccctaattcttgtatgtaattttgaaggttcatggacacttctgaagccatttcatacgtattttaaattgcacccaagaagaaatatctgagatgtttgcattcccatatgtattaggataggctgagttgtgctgcagtacaaccccaaatcccaactcttaagggaccggggccaaaagtcccatcaaggtaaagttttatcctccaagaccaggctctctggaagtgctatatcagatttggatgtttgctcctactgttctggagacccaggaaccaaaaggatatcttctgttttccacatacttaatgtagagtggtggaactgtatctgcaacaaacattctgaatggggaagaagaatgggagatacagttaggatccctaagtctaggtatggggtatattcatgattagggttcttttctatctcctaggaagaattcccttgtatattgttctccgtgactctagagtccaacctctgggaaagttttggtggttttttttttttttttttttttttaatcttcatggctacatctgaacagctactgagggatatatatgccaactttgggagttgcacagcttttttgagaccatttcttagatgactagggactgtaatttctcttaatttggaatagccacaagttgttgtagccaaggtttgtgtgtgtttttaatacaattcttaaaattttagtaggcttctcatctgtagatagatttgaaggggtgggttgcccctccacacctgtgggtgtttctcgtaaggtgggacgagagacttaggaaagaaaaagacacagagacaaagaaataaggggacccggggaaccagcattcagcatatggaggatcccgccagcctctgagttcccttagtatttattcatcattcgtgggtgtttctccgagagggggatgtgtcagggtcacaagacaattgtggggagagggtcagcagacaaacacgtgaacaaaggtctttgcatcatagacaaggtaaaggattaagtgctgtgcttttagatatgcatacacgtaaacatctcaatgctttacaaagcagtattgctgcccacatgtcccacctccagccctaaggcggtttttccctatctcagtagatagaacgtacaatcgggttttatactgagacattccattgcccagggacgggcaggagacagatgccttcctcttgtctcaactgcaagaggcatgccttcctcttatactaatcttcctcagcacagaccctttacgggtgtcgggctgggggacggtcaggtctttcccctcccacgaggccatatttcagactatcacatggggagaaaccttggacaatacctggctttcctaggcagaggtccctgcggccttccgcagtttttgtgtccctgggtacttgagattagggagtggtgatgactcctaaggagcgtgctgccttcaagcatctgtttaacaaagcacatcttgcaccgcccttaatccatttaactctgagttgacacagcacatgtttcagagagcacggggttgggggtaaggttatggattaacagaatctcaaggcagaagaatttttcttagtacagaacaaaatggagtctcccatgtctacttctttctacacagacacagtgacaatctgatctctcttgcttttccccacaagtttgaatcacaaaagattttaggtaagaacaggcagtcattgaacataagtttaccttactttctccaacctggcctaaatggacaatacctgcataaagcccaatgggatctattgttaaataactaaagtattattttataccctcgtatttcattatgccagat

SEQ ID NO: 97475 - DNA, 18750 bp, Homo sapiens
tgggattacaggcatgagccactgcgtctggcctttttctttctttcttttttttttttggtaatttgtattttattttagttaatttaaaagatagtttaaaaaaaagatagttaatagaatatcagaaatagtgaacattatcatttccataaatgcaagagcgtgtacatttttccacacactgagtactatctagattttctatgataaactctgaccacttcttcaggcaattcatgtacttacttattatcactaaggataaaggttctagaaccattaggaacaagggtcccatcttcacacaagttacttaactgctgggaggctctatttcatcttatgtaaactacagataatacctactcacctcaagggtgtaacaagggtttatgtaagctaaatttgtagaaagcagttagcacagtgccaggaagggtccaagaagaaatggtacttactatgatatatttgtaggtatatatgtatgcatgttaatgagttcttattagctgtgttcattaaaggttttctctatcctgtgatttgcttttagattttggaatacattttattgtacacattccatttgtattattaatataacaacatttattactattattattatcatcaattcaatcacatctattgtatccttgatgatgaccatgattcctttaataatcataaaactctattcccttcatcacggggtaaataacctatcacaatgctgtaagtctccatcagcaccccaggctgcccctgctcacttaccagatctgctacttcagccagatcaatcatcatgttaatgtcacacccacattcaataatggtgagtcggagctttttacctataagtgaaaagatgaaaattttactttaaaaagaccctgaaaaaactctaagcatcaactctaactttcattttttacctgtatccagtaaaacaccatatacgtttacaggagtgtacgagaagttcacatttaccggtaaaataaaataaattccatcctgtttttcttgctgtgttctaaatttaaataatatccaaagtctacccagatgaatacaagtgcttaaacagggaaaattctgactggacaggctccatgataaccatgatcctgctgttcagctgtaggccaatgtctttgcctctatcaaaacttcccatattcccactatcactaaaaacatcctcaaacattatccaacagaatattcataacgataatcatttctaaattaaggtaaaaagaaaacagtcaagaaaatatgggcagggcacagtggctcacgcctgtagtcccagcaccttgggaggccaaggcaggtggatcccttgagcccaggagttttgagaccagcctggccacatggggaaaccccatctctacaaaaacaaaaaagaaaggaaaaaaaaaagaaaaattagccaggcgtggtggcatccactactcaggaggctaaagtaggcggattgcttgagcctgggtggttgacgctacagtgagctgtaatcacgccagtgcattccagcctgtgccacagagtaagactgtctcaaaaaagaaaatatggatgctccaaagataaagaaaagcctcaatccaactatattattgcaataacaagagacttgagtgtacattggcattctaccactggaagtttgtttcatctttcctcaaacttggaaaggtcaccatctcccaaagcagacaaattctcacaggaaaaagagaaaacgcgcacttccactagcatgtggcttcataagggcaaggatgtgcatgcacctggcacataggaggtacgtgctgtctgttaaatgatatgttcacagtgaccaggcctgctacccccttccaaggaacatgcttggcaaagccatagagcactcaggataagatatgtatcacatccttatctctgggaacttacccttttctgaagttatagctaacttagtaaaagtataagagaggtaacatgatatgacaaaatttaacatgttccactcaagaaagcaacaaacacatgcatgtccctcagatgacaatagccacgccaactctgtgtctgtggcagcatctcctacctgacacgatcatcacagggcctctgatctcggtcaacttctgccgggtgaagttccgaatgaggcattgtatcaaagtgctctttccaactttggaggccccatcaccactaccactattggtgggggctctagtggagttcgatcaaccactggaatatgatgcttttttgtcttcaaatcctgagtcctattcattaaaaaaaagaaaaaagtaaactcactttcaaaatagagaaaaaggtatcaaccttataagtagaattttcttagtatacttatagatatgagtactttagtatattttatagagtacaacagacaatatataaatataatgaacttgtcaattattaacttaacttctcacccccatccaaataattgctgttggataaagatgtaacaagacgacttcaatagtatatagagttgaaaactgaacactccttaaatctgactgttttatgggtgatttgaatagttttttaaaaaccaaaaggtaaataccaaggcagtgcatcataatggataagagcagaggctctggagttaaatttggctctcctacttactggttatattattggaggtaacttgttttcttgacctcagttttcttgtccataaaatgagggcaagaatgattcctactctggtaaggctgctggaaggatttagttgaataacgtttaaagtacactgctaagaatatcacaaggactcactaaataaagctatgttagtaataaatattgtaatttttgtattttatattacaactttgtaaaacgtatccagagggaaaaagcacacttatcaccatagaaacagtttaaagtttaggaggaaacaaattctataaattcttgtatcttgggcaagaaacaccaaccagtgtgcagatgctggaggcaaggcagcttctatagcaaagcctctcatgttttggtaaaagccacacagcatgcatctccatgtcctttggagctggactagacttgtgaatccaaatgtcacctgtgagaggctcctactatttaaaaagaatcaatggaagaagcatcagactgtagctaaacatacctgtgaaaggatcgagccatccacacagcagactgaaatgcaaaagctttgggatttctcttccaggcatcttcttcgtctcctagctggagatcctgcagatgccgcttctttttctttgcagctttgggtccactatttttctttctttgtttcttctggtccttagtctccatagtggctatttaccaataacaagtaattctaatctacaaggaagaaggttggggtaaggaggtgggagaagcattttacaatccaggcaatacccagggcaaaaacattaaattttatttatttctttatgaagagatgatatatttgttcactgaacaagggtagaaactgcttaaccctccccaatttcatttatctctgttatgctataaattagatgagttacctctgctaagggtacattttatggttaagttactttttattcatcttaagtgtcaacatcagcagtatccatttctgcaaggatggaaacattctatatctgtacttttcagccatttagccattagccacatgtggttacttaaaatgtacttagagaaactgaaaaaatgaatttttaattaattttattccaactctaaatagtcacatgtggctaccatactggacagctcagacctagatatcaactggactaatgaagtggtttcctaacttaaactaaaacttaaattttaataaaaaatttaaaatgcttttatgaacttccaacatgatcacagtattacttttagtacctgttgactctgcaaaactcctaaattacaactcttctacatacatttgaaaaatagcaatatctagaggccgggcacggtggctcacgcctgtaatcccagcactttgggaggccgaggcgggtggatcacgaggtcaggagatcgagaccatcctggctaacacggtgaaaccccgtctctactaaaaatataaaaaaaaaattagctgggcgtagtggcgggcgcctgtagtcccagctactcgggaggctgaggcaggagactggcgtgaaccccggaggcggagcttgcagcgagccaagattgcgccactgcattccagcctgggcgacagagcgagactccgtctcaaaaaaaaaaaaaaaaaaaaaaaaaaaaaaaaaaaaaaaaagaaagaaaaatagcaatatctgtatgtgtgagacatgactagttctagatgatgcctggagaccccatggacttacagagacccttccagtgatttctgaggtacctgggaatctgtggccaataaattggtaatcactgaattagtgagttttttaaggatatccagctgcataaaatctgacagcttgattggaaaaaagcggggcagggtgccatttcattcaattaaggtcctgtattcattccgtttagtaaatgtttgtgtctgtctatgatgtgctagccactgtgccagtaaatggatatagctatgatctgacttgcagaggaaatccaaactagtatcttccgtgccatgcaataagggctacattgcaaggctgcacagggtgctactggggcacagaagtgagtcagaggcttcccacagacacacacacgagcggaaacagaaagtctttatatatcaccatatgtcaaggaacactggccgggagttaggagagctgggcactaggaacgctttgaaaccgaacagctgtgtgatttccgaggttatgttgcttctctactatattttagttccgaacttgtactaatgtttctctcccttttcttcttggtgggaaaagcacaatttggggtcaacagattcggctcaggtctaagtcgccggccgggaccacgtcgccaggaaacgacgtctccccgacaccttccctccccgtccgggctctctgcagcaattcatcccgtcactctcccaacgaccccgggcacacctccggcagatgcgaaatatgctgctcctcaggaggaaagatgacccggaggaccgcgggaggaccttcccactcgcgatcttcccagtgccccaaagccagggaccccactgccgcctaccccagcccgcggcaccgaacctgctcacaactgtgactcctcaggtcggattggacaccaccggaaacggaaattcaccgtcgcgccgactctccggagggaaacaaaaaggcagaaaaaagagaccggcgcctggacgactttcaggggagagctggaagaaagactgtcaacagctgagtgcgggcgccggcgccgtctacgcagtgcgttccaccgggtccgtatccctcccgattccgccccaccccgccctcggaactcgctgcctcaactcctgcggtgggactccggagcagcgtacaccgcccttgccttagtcctccccaaggccagggcagctgtgcggcctggcgcgggttacttggtgtggtgcaaaaagccagaaggagacacatttggtcctggccaccccggagtcacccaaaccaaaaggtaaaaggaacataaaaaagccttctggaaagtgtaaaaaaattcattgcacagtgatttttgtcttgtgaaatcatagttactgttattagcagttttttaaacgttttatattcattttttatggtgttctgacatatgagctgcttcaagtgtttttggacatagcttgggtgtaaaatgtaaaaagtggatattttcaatttgtagctttcttttttgaaacttactgaagtttgttctaaatatatccccttctttctcacctaccccaacacatttttaaaaaaaacaccaccaaatatccattacagcattgatgtgagtgtagatgaagtaaaaactttggcttccctgatgacatacaagtgtgcagtggttggtaagtgatcgcctttcttgctacctaatgagaactctggggaaatatgtttactcacatggttactgttaagatgctatagaaatataccttatcagaactgattttttttaagttgtcctctttaagacctgcatcatttttcaattagtctaaattaatatatagcctttttttatgtgagggattttttttataggagcttattgaattttaagtctagatctttgttttcaattcctcaacatattctataaataagaccaaattatagtagaaggatagtaaataagctattatcttttagaagttgtaaagagcactgattaactctatattagagaccccgcccctgccttggctgcgcgggcccccgccaaagggcccatggtcggcgcagccgagctggcgagggcagcgcgggtcccccggaacgccccccgaggcgagcgctaacgaggtccggcaccatgtgctaggtcactcccagtgcaaggccacacttgggccatccgagcaacccctcctcacgtcaggggtcaccctccccaccacccattgccccaccatggccggagaccggctcccgaggaagatgatggacgccaagaagctggccagcctgctgcggggcgggcctagggtgcctggtcatctacagccgctccttcctggagtacaacagctggcatgtgctcagctccgtcaacatctgctgctccaagctggtgaagtgccggctgcagaagggcaaggtgaccattgcagagttcatctggctggccacacgcagccaaatggaggccactgagccacaggatatggtggtctatgaccagagcacacgggacgccagtgtgctggccgcagaccgcttcctctccatcctgctgagcaagctggacagctgcttcgacagcgtggccatcctcacggggggcttcgccaccttctcctcctgcttccccagcctctgccagggcaagcctgctgccctgctacccatgagcctctcccagccctgcctgcccgtgcctagcgtgagcctgaccctcatcctgcctcacctctacctgggctcgcagaaagacgttctgaacaaggatctgacgacacagaatggaataagctacgtcctcaatgccagcaactcctgccccaagcctgacttcatctgcgagagccgcttcatgcrggtccccatcaacgacaactactgtgaaaagctgctgccctggctggacaagtctatggagttcrtctgtaaaggcaagstgtccagctgccaagtcatcgtccactrtctggtcggtatctcccactctgccaccatcgccatcgcctacatcatgaagaccatgggcatatcctccgacgacacctacaggttcatgaaggataggcgccagtccatctcgcccaacttcaacttcctgggccagctgctggagtaggagcgcagcctgaagctgctggccaccgtgcagggggatgcgggcaccccctcagggacgccggagcctccgcccagccctgcggctggggcccggctgccatggctgccaccacctacctcagaaagcgctgccaccgggagtgcagctgccagggagggcggcctgagcgcgggcggggagcccccactgccccccacgcccccagacacctgcgcgctgcagcagggcctgcgcggcctgtacctctcctctgaccgcctgcaggacaccaaccgcctcaagcgctccttctcgctgtacatcaaatcagcgaacacccccggccggcggcccaacggccccgggtcacccgaccccggcgaggtcccaaagctctgcaagctgcacggcccgtcggagccacgctgagcctaccttcgcccagccccgacagcccggatgccgcgcgcccacggccctgcgggcggcccaggcccccagccggctccccgctcccccgcgcacagcctcggcctctcggtccctgtcggcgcccaggctgcccggccctggccagccggccccggagtctgggcgccccgcttgactccccgggcacgccgtcgcccgacgggccctagtgcttcagcccccagggcgcgcaaggggcgggcgggtgctgttcgcgccctttggtcaggcgggcgcccccagacggggcggcggcagcgagctgcggcggccggaggcagcaagggctgagccccgggacgcgcggaccaactggcccgacgagccgccccggagacggagacgcagatcaagcgctgcagctgccagatggagttcgaggagggcatcctggaggggcgcactcgcggcgaggagctggccgccatgggcaagcaggcgagcttctcgggcagcgtggaggtcatcgagatgtcctgacccctccgctgcccttagctccgctgcccacagccagacccgttataaatatatattatatataatgcaaagaaaggtaaatggttttacttttatttttattgagaagtaaatatttctattttttatttatttaagctattcattctggcaatgatttggcaacagtgcaggtggtcctcgagctctatttttactgtctggtatttatactgaaacatacctttctaagcaatacgaggccaccttcagtcgcaaggtgggtgccaggcctggtgcccctcccagttcccccaccccaggaaacactgctgacacttgcaaagactgccgaacttttgtgcactttttacataagaaaaaggattaaaaaaggaaaaaaaaaaagcttatttgccacaaacagccgcggacccccccccccaccttcttcctcccttcaggctctgccccaaagccataggttgggggagcaggagctggtgtgccagagagatgcggccagccctccaccagctccaggcaccaaatcttggtggcagggagggcaccccgctgcccgttgccccagagctgttccttctcaagggaggacaggcattgggccccatggtgccaggacgttgagaggggctgaggaatagaacagagtgtgtaggggcttggggcagggggttctggagcgtcagatgaggtggagcccaggggaggatgggggtgttgttaatgtccccaactcctgccagagccccagtccagccactggtggctcagaaaggccattcccagagggctgcggccctcccttctcctttgaccctgcccccagaactacctgccaggcaggacggcaccagtgcaggagaggagcttggcctccgggggtgacgcaggagtggggcctggctagcctgtgctggctccactgggcggggagccctggaccgccaggtatgcggagggggtgggcttagggtcctgttccaggtccgtcccccacctagcaagtccccaggcaggacttggaaaccaggtgtgcaccagcaggctaaggggctccaagagcaggtgctgcttcgcacaggaagttcaggcgccagccaagtccctgtgcttctggggtaggcctgcttcacttagggagcgctgccctcaaggcagataaagccctctcctttgccccgacctgcatgggggcttctcaggagagaaactcccgtgtgcccctttcccagggcactctctctctagacagcatgccggcccccaaacacaggtggcttttgggcccaggtgggtcagcctgctgcccctggcccataccctctcaggccattgggacccctgcccttcagatgttctagggtctaggagtggaccagtcaccctgggaagaggccagggccttggcaggaggggtggcccaggcaggacccagtcctgagtcctggagcaaggccagggaggcgcccaccccaccccggccagctgccctctctgctgtttgttctatttgttcttcttttcacccatagccytgtgttcctgtcawccctcctttcagcaaaagtccttttcccattccctctgtccccaccaactgytgttccccaagaaaataagctatcattgtatttgcaatctatggattagaggttgaagtatttattattattggttaattattattaattatataaaatatatatattagaacttggctagccaattttattgaacaatttctgttcaataaaatgttgtttaaagtacagtttagaaaactatggtaggtttatttcttgaactttcagaaattcaagcttaaagcatcacacgtttttctaatattrtgtggcattttctgtcattttacttttttaacctttatatggaataacaaccatcagccttgtctttcagatgtgccatttgggggtgctaaagctggtgttaagatcaatcccaagaactatactrtaaatatgagagtgatacttgttttttgttgttgttgtttttgtttttctgagacagagtcttgctctgtcgcccaggctggagtgcaatggtgcaatctcggctcactgcaacttccgtctcccggattcaagcgattctccttgattcagtaactaggattacaggtgcatgccaccatgcccaactaatttttgtatttttagtaggggaggcggtatcagcatgttggccaggctggtcttgaactcctgacctcaggtgatctgcccgccttggcctcccagagtgctgggattacaggcatgagccaccgcacccggcctcaaagtgatatttgtgcacacagtgcatttatgaaggacttgaaattactgggcttctctgtatcccccatatcagtgagatcaatggtccccattgcttttcaaatggaatgaaaaaagtaaagaattaactcattgagtgttttgccatataaaggtcacctacttaatatctatatcctttatcattttgttttgtttggttttgtttttatgagtcttgtattatttttttgctttttgtattattattttcttacttattaaaaaggtaattaatattttcatattgttagacacttaaacccatatttaagaattactgtgatctaattaatcaggcgtagtggtgcgcacctgtaatcccagctacttgggaggctcaggcatgagaattgcttgaactcaggaggcagaggttgcagtaagccgagatttcactgctgtactccaccctcggcaacagagaaagactctgtctcaaaaagaaaaaaagtattactgtgatctgaagtttttaagtcaggatttcattctagacaaatatcttaactaagcctataaaaaccttactttttatcctgtcagttccaagcaaattcaaactggttgtcacaatgctttacataatactaaattatctgtatacaaacataaacgcgtatgatttttattctctttaaaattcaccatttacatggaatataattatatttcaattaatcttaattaagatttagtaggccaggcgtggtggctcacgcctgtaatcccagcactttgggaggccaaggcgggcagatcacgaggtcaggagatcgagaccatcctggctaacatggtgaaaccccgtctgtactaaaaaatacaaaaaaaaaaaagtacctgggtgtggtggcgggcacctgtagtcccagctgctcgggaggctgaggcaagagaatggcgtgaacccgggaggcggagcttgcagtgagccgagatcgcgccactgcactccagcctgggcgagagagcaagactccatctcaaaaaaaaaaaaaaaaaaaaagacttagtatatttttcagtggggaattaatagaatgggaatttgagtcctagttctactatcctgtttttataatctacttttttgatcccttatttcctcacctttaaaatggcaatgcctactttatgagttgttctaaggattacaagagaagacatatgagaatgtactataaatagaaaataagatgctagctataatctcaagcgatttttatatcttatttttattgttttcttattttacaggataatgaattggaaaagatcacaaggaggttcaccatggagctagcaaagaagggctttattgtgtggccacatagattttggtataaagtgggaacatctaaaaaaatcttttttttttttttttgagacagagtcttgctctgtcgccaagattggagtgtagtggtgcgatctcctccacctcccgggttcaagcaattctcttgtctaagcctcccgagtagctgagactataggcatgtgccaccatgcccagctaattttcgtatttttatagagatggggttttgccatgttgatcaggctggtcttgaactcttgacctcaggtgatccacccatctcagaatcccaaagtgctgggattacaggcgtgagccactatgcccggcctcctactatttgtaataggagatagggtcagataagggaataaaagcaggctgccccagccaggggcagcaaccagctcaggtccccttccacactgtggaggctttgttttttygcgctttgcaataaatcttgctgctgctcactctttgggtccgcactgcctttatgagctctaacactcatcgcgaaggtctgcagcttcattcttgaagtcagtgagacgaagaacccaccaattccggacacagaagtgtcttcatttaaaaaaattttttaagtgcactgaaaaagcatcacatattctagcctcgtaataatgctccctttttggagatcccaggaatcagtgtgggctctgcccagagctcagagatctagtaaaaagacagatagttcctatataaataaaattggtctcctcatataatcctatgatagattttttttttttttttttttggagacagagttttcgctcttgctgcccaggctgggtgatcttggctcactgcaacctgcacctcccgggttcaagtgattctcctgccttagtctcctgagtagctaggactacaggcacccaccactgcaccaggctaatttttgtatttttagtagagacggggtttcaccatgttgggcaggatggtcttgatctcctgacctcataatctgcctgcctcagcctctcaaagtgctgggatttgggattacaggcatgagccaccgtgcctggctatcctatgatagatttctaaaatgttatgtttgatttggcatccttttttttgtgtttttttttttttttttgagatggagacacactctgtcactcagcctggagtgcagtggcacaatctcggctcactgaaacctctgcctcccaggttcaagcaattctctcacctcagcctcccaaatagccagaattacagacatgtgccaccacacctggctaacttttgtatttttagtagaaaagggttttcaccatgttggccaggctggttttgaacttctgacctcaggtgatccacctgcttccaccttctaaagtgctgggattacaagtttgagccactgcgcctggtgtggtatgtggttttactgcatgtgactagtttacatgcaactagccatgcaagttcagtaacccaaggcggtctataccctgttcaacaagaaccatctactgatgacacttctggaagtctgggcaatatcaacttgctgtaagagttcccaaatgctctcaattatcatgtgataacaaagttttcaaaccagtaaattttgagtagccctttactaggaataatcttgaataagttagtattgccctccacaaccacaatttaaaaaatatccgtattggttttctcttcaattcaagcatcatgtaaatatgtaatgtagaaaatgaggatttcccatattcccatagaatcacaaagatgatcactggtaatatgtgtgctacatatatgataccaggtttattcttttttttttttttgtctttttttttttttctgtcacccaggctaacatccagtggcacgaacttggctcattgtatcctctgcctcccgggttcaaacaattctcccacctcagcctcccaagtacctggaattacaggcacctgccaccatgcccacccagctaaatttttttgtattttcagtagagacgaagtttcactaagttgaccaagttggtctcgaactcctgacctctggtgattcacccaccttggcctccaaaaatgctgggattaaaagcatgagccactatgcctggccatttttttgtactcttatacaattatatacttgctttataaaaatgaacttattctacatatatatgttattacattattaggacatgttccctaatgacatattacattttcatcacttttttaaaatatttttttcctgagacagcatctcactctgttgcccagacgggagtgcagtggcctaatgacaggtcactgcagcctcaagctcctcggttcaagggatcctcccatcttggcctcctgactaacccagctaagtttaaaaaaaatttttttttttggcctggcgcagcagctcacacctataatctcagcactttggaaggccaaggcaggcagatcacttggggtcaggagtttgagaccatcctggccaacatggtaaaactccgtctctactaaaaatacaaaaattagctgggcatgatggcaggtgcctgtaatcccagttacttgagaggctgaggcaggagaatcacttgagcccaagaggtggagggtgcagtgagtcaagatcatgccactgaaatccagcctgggtgacagagcaagaccctgactcaaaaataaataaataataactataacttttttttttcttttttggagaaacaagtctcattatgtttttgaactcctggactcaagcaatcctcccatctcagttcccaaagtgctgggattacaggtgtgaggcactatgcccagacattttcatcattctttctttttgagatggagttttgcacttgttgcccaggctagggtgttacgtcacgatcccggctcactgcaacatccgcctcccaggttcacgtgactctcctgcctcagcctcctgagtagctgggattacaggcatgagccaccacgctcggctaattttgtatttttagaagacatggggtttctccatgttggtcaggctggtctcaaactcccgacctcaggttatctgcccacctcggcctaccaaagtgctgggattacaggcgtgagccaccgtgcccaacccattttcatcattcctagtagccatggagcattccctttaatcaactgtacatgaaatttttttttctgggggcaaggggctcatattcacacagatgggagtccagttggtgagaaggtggcaggcggcacagccaccttatacagcatgccatactggtccactgtcagaccggtgatggccacagctccatcaccccgaggcggactctggctctgcccagccaccacaacccctggggaccattcagaggcatcactggagggtgtgtggttagtggagcagctggttgtggggaggtctcgtttctttggtggaaggcattcctgactcctctcatgaacaggtttcatattgctttgtggtgttcctggagcctggaaggagttggcttgctccctggggcatcaggaggggcttctcggtagtttccctgtacccctctaggtttctggctggggcgcccacatctgagcttccagcagtgcttctgagcagctgtagtaagcgtcctcccggctggctcgggagctcacagcgcttcccgggatccacttgctcgtcctggagctgccgcaactgtggccgtcccatccctggccctggagccgccccataccccttttgagagtgagactctcaaaaaacaaaaaaaagaaagaaactatgaactatggtccgggcatggtggcttatgcctgtaatcccagcactttggaaggccaaggcgggcagattgcttgagcccaggagtttgagaccagcctgggtaacatggtgaaaccccatctctacaaaaatacaaaacttagttagctaagagtggtggcacatgcctgtagtcccagctactagggaggctgagtggggaggatcacttgagcctgggaggcagagggtgaagtgagccaagatcatgctactgcactccagcctgggtgacagagaccttgtctcaaatagaaaaaaaaaaaggtggggggagggggaagaaagaaactgaatctaggatctaccacttatcaggggtgcaaccttttttttaagatggagtgttgccctgtgtcccaggctggagtgcagtggtgcaatcttggttcactgcaacctccgtcccctgggttcaagcgattctccttcctcagcctcctgagtagttgggattacaggcatgtgccacgacatccagctaatttttgtatttttagcagagacagggttggccaggctgctctcaaactcctgacttcaggtgatccgcctgtctcggcctcccaaagtgctaggattacaggcatgagccaccatgcccggccctagtgggtgcaaccttaagcaagacagaggatatttactttcctatatcgatatgagtcaagtgggatgaatcatgtgaaaatgcttagcagaggaccagtttaggtcaggtgctcaacatatcttagttgaatttggcaaattattcatctagactagtggttctcaatcagcaatggaatcacctggagggccttaaaccatagcttgctgggccccacctccagaatttctggctcttatctatgtaaagcgggtctgaaatttgcatttcaagcaagtttccaggtgttactgatactgctgatctgaggatcacacttaaccactgactataaactgataggtcaggtgtggtggcttcacacctgtaatctcagcaatttggaaggctaaggtgggaggaatttgagaccaccctgggcaacacagggagacctcacctctacaaaaaattagccagatgtgggggcacatacctgtagccctagctactcaactacccagctactcctactgaggtaggaggaccacttgagcccagcctgagcaacatagcaaaatcgtctctaaaacaaaacaggctgggcgcagtggctcacacctgtaatcccagcactttgggaggccaaggggggcggatcacaacgtcaggagatcaagaccatcctggccaatatagtgaaaccctgtctataccaaacatacaaagattagctggggtggtggcgcatgcctgtaatcccagctactcgggagtctgaggcataagaatcgcttgaaaccaggaggcggaagttgcagtgagccaagattgggccactgcactccggcctggagacagagcaagactgtcacaaaacaaaacagaggacaagaacaatctgcttgtttagtaaagcatgctcaatgcctaatatatagtttccagcacagcctaaagtgcaaatttttcagtgaataaaccactctgtgcctcagaataactgatatttactgtcaataatatgagaacaaacacttttgttcactgctctatttccagacccaagaacatggcttggcacacaatgtcagcgctcagtgggttcaccctgcctgctgccttgacaaagctgatttatcaagaccagggaattgcaatggagaaagagtaattcacgcagagccagctgtgtgggagaccagagttttattattacacaaattagtctccctgagcatttgaggatcagagttcttaaagataatttggcgagtaggagcttgggaagcggggagtgctgattggtcaggttgaagacggaatcacagggagtcaaagtgaggttttcttgctgttttctgttcctgggtggaatggcagaactgattgagccaggttactggtctaggtagtcagctgatccaatgagtgcagggtctgcaaaacatctcaagcactaatcttaggttttacaatagttatgttattcctaaaagcaatttggggaggttcagactcttggagcgagaggctgcatgtcccctaaactgtaatttgtaatcttgtagctaatttgttagtcctgtaaagacagactggtccccaggcaagaagggggtcttttcgggaaggggctattatcaattttgtttcaaaccataaactgaattcctccccaaagttagttccacctacacccaggaatgaataaggacagcttaaaggttagaagcaagatggagtcggttaagtctgatttcttccactatcataatttcctcagttgtaattttgcaaaggcagtttcaacagcagtgctcgaaaaattatgaaatcaacaaatagtactgaaaagttcaaatgaagtcatatatgaaaaagaaatcctagcactgttagctataattacttagccattaaatggggtactaataattactgcaggaactatcttttccaacagagcgcagagatcttttggctctgataaagctctgcacctaaacaaaggcgctgtataaaaatggttaataacaattgacctttactgagtgcttactatgatgccaagcggcctatgtggcctaatttcatcctctgggcattattatttccattttacaagctgtagagccagacctcagaccccc

SEQ ID NO: 97476 - DNA, 13017 bp, Homo sapiens
cagctattcaggaggctgagacaggagaatcacttgaccccaggaagttaaggctatagtgagccatgatcaagccactgcactctagcctgggtgacagagcaagaccctgtctcaaaaaaaattataataattttaaagcaaattcttgcaagataccaagaacccaaattttctacatttaatttttttttcaggctgggagtgatggctcacatctgtaattccagcacttttggaggccgaggcaggaggactgcttgcagccagaagatcaaaaccagcttggacaacatagtgagaccacatctctagaaaaaaattttttaaattaccaagcatggctaggcatggtggctcacgcctgtaatcccagaactttgggaggctgaggcaggcggatcacaaggtcaggagttcaagaccagcctggccaacatggtgaaacccagtctctaaaaatacaaaaattacttgggcatggtggcgcatgcctataatcacagctactccagaggctgaagcaggagagttgcttgaaccagacccaggaggcagaggttgcagtgagccaagatcatgccactgcaccccaacctgggctacagagcgagactctgtctcaaaaaaaattaattaatttaaaaaaataataaaaattactgagcactgtggtacacacctgtagtcctagctactggggaggctgtggcaggtggattgcttaagcccagaagtttgaggttaccgtgaactatgatcacactactgcactgcagcctaggcaacagaatgagaccctgcctctttaaataacatagataaaaaatttttttcaatgatctaaaacatcaagcctttgaaaatgttttttctattgtttccagtacatacaccttactatatgaaagaacgtagggtacagaatccatctaaaatattccaggaaataccattccaaatgagttaggagtatactcattcaggctatgatacacacacacaagcacacacacatgcacactttttttttttttttttttgagacatgctctcattctgtcacccaggctggtggcatgatctcagctcactacagcgtccacctctcagacgcaggcgatcctcccacctcagcctcccaggtagctgagtccacaggcgtaagccaccacacctggctaatttttatgttttttttttgtagagacagggtttcgccattttgcccaggctggtctcaaactcctgagctcaaggactccgcctggctcggcctcccaaagtgtgtggactacaggcgtgaaccaccatgcccagcctatgatatatattaaatataattaggatgtttattaaataatgtttaccagtcctcatttccactgctaaaaatgttacaccctaatgttaattaatactttatagtgtaaagaccaagcaaataattgaagaaaaagtatagaactccatataacataatcttttccaaatgttatgttttattacatagacacacataaatgttctgttttatactttaacacgccatacctagcaacatatctcacacacagaagagaatcgttagtacccatttgacaggaatctttaatgttttcactttttcagggtttaaggagtaacagcatcctaacacccagaaatgccacagtgacctaccatgaggcaaatatcaccagcctacttaaaaaaccaactattgatataataattaacttctgatatactcaataacaagtaactatatttttcaaaatattagtatttattgaaacaacaaaatattacctaattctgacttagctttcctatacagagaagactgcacttagaaattttttgtctgcttacaaaaacttacctacataaaccagtttagccacttttccagtaagatttcaaagtaatattcatttcctttttcctgtagcccagaaacagctaagtgattaagagtcattttagacttcctgtagttcccatgcaactttttagcactgccaatataccagcacctgtacttactgccggctttcctggtgtgggaggcaaagatggttctagtagggcccagatttttctaccccagaaattcactttaggtgtagatttctaatttcttcttaaaaataaataattactaaatacattatctactcccaaggaccctaactacttaagatttaggtagaagcaaacatttaattgaatctataaaaagagttaagtaaaaagaaaatacaatttaggccgggctcagtggctcatgcctgtaatcccagcactttgggagaccaaggctggaggaatgcttgagcccaggcatttgagaccaacctgagcaacacagcaagaccccgtctctaataaaataaatttttttttaaaatacaggttaaggccgggagcagtggctcacgtctgtaatcccagcactatgggaggccaaggcaagtagatcacctgatatcaggagtttgtgaccagcctggcaaacacggtgaaaccctgtctctactaaaaattaaaaaattagccaggtgtggtggtgtgtgcctgtaatcccagctactcgggacggtgaggcaggagaatcgcttgaacctgggaggcagaggttgcagtgagctgagaccgcgccactgtactgagagacaagagcaaagactctgtctcaaaaaataaaaaacaaaaatttaaatacaattttaactttaaattttttttttttttttttgagacggagtctcgctctgtcacccaggctggagtgtgcagtggtgtgatcgcagctcactgcaagctccgcctcctaggttcacaccattctcctgcctcagcctcccgagtagctgggactacaggcacctgccaccacacccggctaatttttgtatttttagtagagacgaggtttcactgtgttagccaggaaggtctcgatctcctgaccttgtgatccacccgcctcggcctcccaaagtgctaggattacaggaaaaaaattttatttaaaaatatttggggaccactcacggtggttcatacctgcaatcccagcagtttgggaggctgaggcgggtggatcacttgaggccaggagttcaagaccagcctggccaacatggcgaaactccatctctactaaaattacaaaaattagctgggcatggtggccacacctgtaatcccagctaccagagaggctgaggcatgagaattgcttgaacccaggaggcagaggttgcagtgagctgagatcgcatcactgcattccagcctgggcgacagaatgaactctgtctcaaaaacaaaaacaaaaaaatacaaaaattagtcaggtgcagtggcccacgcctgtactcagctactcagacagctgaggcaggagaattgcttgaacccaggaggtggagattacagtgagccgagatcaagccactggacttcagccttggcaacagaacgagactctgtctcaaaacaaaacaaaacaaaatctgtagagttggggtctcatcatattgcccaggctgttctcaaactcctgggttcaagcaatcctcctgctttggtctaccaaagtgctgggattacagatgcgagccaccatgcctggcctacacttttaaagaaaaagtgatttcgagaaaatattacagtctaaaatcaaaacaaggaaactttgctaatacccagagttacccacattcaatctaacacacagtagccagcagacacaatttttaaattctgtttaaaaattacagtcagtttgtggtaaatatcaattaataatttcattcttggccaggcgcggtggctcacgcctgtaatcccagcactttgggaggctgaggtgggcggatcacaagaagagtagatcaagaccatcctggctaacacagtgaaaccccatctctaccaaaaatacaaaaaattagctgggcatggtggcgggcacctgtagtcccagctacttgggaggctgaggcaggagaatggcgtggacccgggagacggagcctgcagtgagatcgtgctactgcactccagcctgggccagggagcgagacgccgtctcaaaaaaaaaaaaaaaaaaaagaatttcattcttggccgggcgcagtggctcacacctgtaatctcagcactttgggaggccgaggcaggtggatcacgaggtctggagttcaaaaccagcctggccaagatggtgaaaccctgtcactactaaaaaaaaaaaaataagtaaataaataaaaaatacaagaatttcattcctgggctgggtgcggtggctcacgcctgtaatcctagcactctaggatgccgaggcaggtggatcacctgaggtcaggagttcaagaccagcctggctaacacggtgaaaccctgtctctactaaaaatacaaaaattagccagccgtggtgacgcacgcctgtaatcccagctacttgggaggctgaggcaggagaaccgcttgaacccaggaggtggaggttgcagtgagctgagatcatgccactgcattccagcctaggcgacagagccagactccgtctcaaaaaaaaaaaaaaaaaaaattcattcttggcagggtgtggtggctcaagcctataatcccagcacttcgggaggctgaggtggggagatcacttgaggccaggagttcaagatcaccctggccaacatggcaaaaccctgtctctaccaaaactacaaaaattagtttggcatggggccatgcctgtaatcccagctactggggaagttgaggcatgagaattgcttgaagccagaaggcagaggttgcagtgaactgagactgcaccactgcactccagcctaggcaacagagtgagactctgtctcaaaaaagaaaacaaaaactagctgggtgcagtagcccacacctgtagtctcagctactcaggaggctgaggcaagagaattgcttgagcctgggaggtgaaggttacagttagccaagattgcgccattgtactccagcctgggcaacagagcaagactctgtccatccagcactccctcaaaaaaagaaagaaaaaaaaatttttattaacttaggtgcaattttctagcaaccagacatttttctcttaaatacttttactagtagatacacaaagcagtatggtgtactagtagttaaaagtctcgacttagaactagatttgtaccatgtactagacatacgatctgggttatttacttaacctctctgtacattaatttcatcatctgtaaaatgaagtcccacttcatagaggggttttgaggattaaatagacaaaatacttaccgatgataggcttctcgacgatactttttcagggcatgcttatccatgttagcaggcatatctgctgcattctgtaaccgatcactccaggaggctgacattttattttaactgtattttgtattctagaaaagaaaatcattaatttagtaacttaatattggcatctgtatactgacatctgatttttttaaaaatcagaaaaactccagcttgcaaactgcctaatataattacctattaaaacacactgaatacagtaaatatgctgaaaattatactgacacttctcaataatctaaagttggaaaaataatttcatatggtaatttcaatccggaaagataacatatacttccaaataattaagcatggctgccagtaattactctaatcctagattctagaaaaggcactaaaaccacagcacagcagtttgtgaagatatataattttaagttgatgtatgtttttaaaatgtgtgtagtaggcaaattttaaattctaatcaacagattctggtgtggagtagaacagtagcaggcacagctagcgggttggaatgggggtacagctcgtttccccattcccgtaagacgccagccccacccctctgcctgcccagccaaccccgctgtactaccccaaggtgtgagtctgggttggatactggctaccccccagcagacccccatcataggcagccagagctccaaggctcctcggaagacgtgaccaccaaggttgcgkcaggtgcttcccctgcaaaggccaacggacaasacgatggccacgtgaaaagcaatgaagacttatctcccaagggtgaaggagtgttgcctctgtgaacagaacacatgaggcagccggggccactggcratgccattgagccagcrtcccctatccagggtgctgaggccaagggggcagtctcccctaataagttctctctcaagaagtctttcaaattcagcagsctgctcttccacaaaaattggaaggaggacgggggcagttcttctgcctctcagccagaggaaatgcaggagcaaggtgcctgtagcaacaagggcactgcccaggaaaggaaggctgctgctacccctgagagccaggagccccaagccaagggggcagagggtaatgctgcctcagaagaagccccaggctacagagacatccactcccttggggcagagagtggccctataccaggcagtgctgagcagaatgaggagctaggtgggggcagcaaaaaccgtgctgtccttgtgaggtcattgcctggacctggtgccctgactgccttcctgtgcccagaaaggaaggggctattgcctcctgccagccacattcccttttcccctctccctcctgtggattctcccatcagcgatctggttttcctcttaaggccagctgaagataggccctgatagctccccaggttaggtcactgatgtaaaatgctcctcgccttggccctacctccctccctgtccccacccctgcagaaggcaactgttggttttcttcctcgattcttttccaagtaggttttgtttaccctactccccaaatccctgagccagaagtgtggtgcttatactcccaaacattgcatacccagcctcccgccgttgagttttagtctcttgtgctgtgtctgctggcacttgggctgaaaaggccactgcctcatctaggtttttggtttgtttttgaaacagggtcgcagtggcgtgatctctgctcactgcatcccaggctcaagccatcttcccaactcagcttccctagtagctgggaccacaggcagagaccggggcgagggggtctctacaaaaagtgttggccaggctggtctcgaactcctgggttcaagcaatctgctcacctcaatctcccaaagtgctgggattacagttgggagccacccgccggcctccatctaggttttcataaatatcttactcatgtggaaacctccagcttgtacatcaaatgtgtctctttttttgacttggtaagaaagcattaggctttggggttggggtaggtctgtaatgtgaaacaacttgtcttttcttctcccattgttataaaacttttaatggccaaacctcagatttgtactttttttttttaagctgctaaaaccattctcttccacctggttttactgtaacatttgaaaaggaaaaaatgtcatccctttaaaagataaataaatacattttgataacatactaagctcagtcaatggtggcacaaatacaagcaataaatatttgatttctagttatttaatgcttttacatttttctgtaataacttattttcagctggcaataaagactatgaacaaaaagaaggaataaactaaaacattccatctaattaggataagcatctaaaatgaggtgggcagcttaagtgtttttaactacttttacattaggctattcttaggtttcacttctctttttgaagttttcatcagtaagtagtttcaaataaggatgaaaaatatcctcttagagttaagtagtagattaatattttataaaaatagcattatttgtgaaaacatctgtagcctgttatttcccatcttgaaaatgctaacatcgtttatgacatgaagtcaatatatacctcccttcctctctcccttcttctgagacagggtctcactgttgcccaggctggagtgcagtgacatgatcatagctcactgtaaccctgaactcctggactcaagtgatccttccacctcaggctccagaacagctagaaatacaggtactcactacaaaacccagctaattattattttttttaatttgtgtacagacagggtctcattatgttgtccaggctaagtcttttttatataaatcacctctgtggcttttaaaaaaataatttattcaggggaaattcacataaaattggccactttaaagtgaacaagttggtggcatttagtgcaaccaccaactccttttagtgtcaaaatacttccatgactctaaagtaaaacccctcatccattaagcagtttcttcccactatgccctctacccagcccctggcaacaaccaatctggactctgtctctggatttaactatcctggatatttcatataaatggaatcatacaacatgtgaccttttgtgtctgccttctttcagttggcatagtattttcaaagctcatccatgtagtatcacatatcacatttcattctttctaatgactgaataataatccactgtgcaggcgcaactggctctccttttgtggaaaagtgaacttaatccacacgtctcatcatatacaaaatttaagatggatcatagacctaaacgtaatatctaaaactataaaacttgtacacagaccaggcgcagtggctcatgcctataatcccatcactttgggaggccaaagtgggtggatcacttgagctcaagagtttgaaagcctgggcaacatggcaaaaacccatctctacaaaatatacaaaaattagttgggcatggtggtccgtatctgtagtcccagctacttgggaggctgaggcaggagtatcacttgagcccagcagaggttgcagtgaggcggaggttgaagcagagcttgcagtgagctgattatgccactgcgctccagcctcagtgacagaggaagacctgtggctcatgcctgtaatcccagcactttgggaggctaaggagggtggatcacgaggtcaagagatggagaccatcttggccatcatggtgaaaccccgtctctactaaatacaaaaaattagctgggcatggtggcacgcatctgtaatcccagctactcaggtggctgacgcaggagaatcgctttcacctgggaggtggaggttgcaatgagctgagccgagatcacaccactacactccagcctgggcaacaagatcaagactgtctcaaaaaaaaaaaaaaaagacaagcaagcaacccttggggttgctctgtaaacagagtggtcattcctctgtttcctctacgttttctctgtattcctctacgttttcttttttctttttttcttttttttttttgagatagagtcttgctctgtcacccaggctggagtgcagtgatgcgatcttggctcactgcaacctccacctcccaggttcaagcgattctcctgcctcagcctcctgagtaactgggattacaggcacgcaccaccttgcccggctaatttttgtatttttagtacagacggagtttcaccatgttggtcaggctggtgccaaactcctgacctcatgatctgcccaccttggccttccaaagtgctgggattacaggtgtgagccactgtgcccagcctcctctacttccttaataaacttgctttcactttactttatggactcgccctaaattctttattacatcagatccaagaaccctctcttggggtctggatcaggacccctttccagtaacaatactgtaggtaggaaaaccatggaaggcctctttgaggaggtaatatttgttcagaaacctgagtaaagtaaaggagtgatatacaaaataaaacaaacagcaactgcatatacacaaacaacaactgcacccaagtagctgggattacaggtgcacgccaccatgcccggctaattttttgtatttagtaacacagtggtttgcaactatactcccagctacttgggaggctgagacaggaggatcgctttgagcccaggagtttgaggctgcagtgagctataatcacaccactgcacttcagcctgggtgacagagtgagacccaatctctaaacaaaaaaataaaacaaacaataaaccaacctactacagggttggcatataacatcatattaatctgttttgcatattatggtttatatgcatatgcaaaagatttagaatattttattctcttagaaggttagattatctctgcaaccttgtttgtatacttaatttaagtccctcttcatggctaacagaggacttaaaaaactaaaacaaaattgcatttatatattatccttccattagagtattgagaggaaaaagacaagctatggtttgggacaaaatatttgcaaacacacatctgacaaaaggacttgtatccagaatataggaagagctctcaaaatgcaataataagctaaataatccaattaaaatacaggcaaaacatatgcatagacatttcatcaaagaatatatacaaatggcaaataagcatatgaagtgatgtttaacatcatttgtcactagggaaatacaaattaaaaacacaataagataccaaaatatgcctatttgaatatttaaaattaaaaagacagtatcaaatgttgttgagaatgtagagcaacctgaattctactacactgctggaaagaaaataaaaaaggcacaagcactctggaaaagtttgccatttctttaaaacttaaacatatatctatcatatgtcccagactttctaattgtaagtaattgtccaagagaaattaaagcacatatccatataaagacttgaacacaggcttgggcacagtggctcacacctctaatcccaacactttgggaggccaagatgggtggattgcttgaacccaggagttcaagagcagcctgggcaacatggcaaaatgcagtctttacgaaaattgaaaaattagttgggcatggtagcacatgcctgtagtcccagctacttgggaggatcacacgagcccaagaggttgaggctacagtgagccaagattgtctcgtgccactgcactccagcctgggcgacagagatcctgtctcaaaagaaaaaaaaaaacttatacacaaatgttcttagcagctttgtaatggccagaaactacaaacaacccaaatgttatccacaagtaaatggataaaaaaaattatggtacatctgtacaatgtaatactactatgcaatataaaggaataaagtatttacatgcaaaacattaaaaaattcgtaataactacactgagtgaaagaagacaaaaagagtacatagtgtatgattccgtatatataaaatcctagaaaatgcacactaatctgacagaacacagaccagtggttccctggggtaaggaggtcaagtacggagaggaggaggtattacaaaggagcccaggaaaacttttggggagaaggggtgatacgttcaatatcttcattatggtgatggtttcatgggtacatatatatatgttaaaatttattatatactctgtgcaacttattgtataccaattatgccacaataagactttttcagccagtggcagtggctcacacttgtaatcccagaactttgggaggccgaggcgaatggatcacttgacgtcaggagatcacatcactgtactccagcctgggcagcagagcgaaactctgtctcaaaaaaaaaaaaaataataattcacaggcaaaacatgcacagtccccttcaccactaccatcaccctcccccaaagaaaggaaaacagctgctccaacagctctaggcaactgctgaaaacaggaagcaaagagcaactgaaactgtagggtaagcctggttagcaatctgcactgaatattctttccttcaaaatggtgtgccaataaaatgctgatagccacatatagtaagaccactatctttaaactacaatgaaaggaaattttgtccctcccataattacctcattacttaacataatgttaagaaaagttcaagaattatgatgtagtacagtaatattcttcacgcccaaactgataaaagtataaaaatagcagtaaaggcctggcgtggtggctcacgcctgtaatcctggcactttgggaggccaaggtgggtggatcatttgaggtcaggagttcgagaccagcctggccaacatgatgaaaccttgtctctactaaaaacggaaaaaaatcagccaggcgtggtggcgtatccctgtagtcccagctactcgagaagctgaggcaggagaattgcttctcccacccgggaggcggaggttgaagtgagctgagactgcgccactgcactccagcctgggcaacagagcgagactctatctcaaaaaaaaaaaaaaagaaaaaatagcagtcagcacttcttttcatgacaattctgcattaagacaaaatgccacgctgctagagttatacattggcaaacgctctttaaaaagtcattttacatgtctgtttcaagtcaggtcagtaattcatttggaataaagtgaggagcactttaacaatatgtagagcaggtctatcaggcagtgtttaacacatggcaatttgaatcaaatattcatttttcaatggaataagtatgtcaacatagataatagggtaataatagcagtatgaataatcagtagtttctacttcactcaaattttaattttgtatttaaaatacaaaacctgggtggctcacacctgtaatcccagcactttgggaagccgaggcgggtggatcatctgaggtcaggagttcaagaccagcctggccaacatggtgaaaccctgtctactaaaaatataaaaagtagccaggcgtggtggcaggcacccataatcccag

SEQ ID NO: 97477 - DNA, 13271 bp, Homo sapiens
aattattaccataactgagagacaaacaaatgaagggaaacaataaatgaataatggttgaacatacagatgaacaggtcacaatgaatatatgaaaaaataaatgaaagatgaaagaaggaagaatgggctgatgaagagataaagatgagtagacatatagacacatggatggatggatggatggatggatggatggatggatggatggatgaggcagaaaaatacaggcaattaaatctgctccactatatactctagatctggaatgggaaacagaatagcactccacaatagtgtcttctgagaggtctatctcttgggtctggcagaacagttctctgggtgaccgtacactgacccagttctcctccctttctcacttggaatgcaaaatcttgagataaggaagaggtgacagaaacagacaaggaacaggctctcttctagtcccaccccagaaacaatatccttcaatgttttagcccaggaattcacattgccctggggtataaaacccaaggcaggctgctttctggagtccttggctgcagtgcaagtgcagcataggcagatgaagccatctgccctgggcagctttcctgagccttgggggctgcctcacaattaatcctgggattctgtttcccttgctgcctacctgagagtaataaatccatttcatataacttgttggatgtgttctcccactggactcagacaaattggcaaccagtacacagtaagcctgcttctcaggactccctcattcctttcttttcctgttactctgtgagcagaccaaaccctctcctcaaaaatccctctcaattcccaggatagggaggccacggtagagaatgggcatgttctaggccaagttctcctccagctattctaactcagctctggggcataggaaaatgggtcaataagggagagggacagtgctggctgggccaggaaggtgaagtcctagagtccagagatgagagataggggagctgaacctgcttccaaagaatgttccctttagcttcactttccaagggaggaatggatctcagatggtggatatataggcactgtgataggcccagggaggtctggagaatctgggagaggaccttctcatccttaccctgctcttgtgattgtccctcagggaatctagtgggtggctatgtcccatctttcccactcctcctactcccaggtatcttagtattacagagaagagctggcagtgaggaacctagggaggagacacattcctacctctgaccctaatcttgaaccaaaccctgactcccagccttgagactgatggctcaaatgcctccaaaggagcaacatcacaaaccttgcaaatcttcccctaatggtaatagtgcaaactctcctccccttgtccaaactgcttattgctgaaattctcggagctgaagccaaaaagtgaaaaacaggtgcagtctactgcggagagttgtgaaagagaaaagagtttcctccacaaaaagggagagagaggcgatggggagctatccagtgggaaagtattctgctaccaactcatggactgcaattcacttctgacactagccacgtagagttagcaccagattccacaggtttaagggaaaggtccccaacaagactgtccccagtttagataccagccacaagtagggtctccaagccacccacatttctggccaactggctacaagtctgagaagttcccaaaacccgtcagttttgataatttgctagagtgactcacagaactcaggaaagtgctgtgtttaattagtttattaagggtataaatcagaaacagccaaatgaaaagacacacaggatgaagtctaggagggtctcaaatgcagagcttctctcagtggtttctccttgtggagacataaggtgcatcagcctcctgggacatcaatgtgttcatcaaccagaaagttttatgagctttggtgtccagagttttttttgagatttccttacatcagcataattgaattattggccacatacctgaattcaatctccagcgcccccttcctccccagaggtcagcctggcccaaagtctcaactctctaatcacatggttggtctttactgtgaccaacctctaacctgagccatctcatctcttagcataaacccaggtgtgttccaaggggctcatgagtaataaagacactcctattacttgggaaattccaaaggtttagtctccctctcaggagccagggacaaaaggcagtcaaattctttattacacaccattagggaaggaagtttctgaacgtagaaaatgaaagttttagggggccataaataggagacagccacagcctcctacagatccacacacactcatggaccctcagtcttccaaggactccctcgccctcatgatcatgatccctctcctgcttgctctccccatccaacctcacacacagtctcacagactccacacaagcagaaggactcctgcacacccatgcacacctgctgctcccagggactctcctcatttgtccatctctgctcatcctccatggcctcttgtgtgtgtggcaacactcctcttctcagcatattggttttcttgccatgagtgagtaaaatggggcaggggttaaacggtacggaggggcatggcagggatcaatgtgcaggtctcaggggtctgtaaaggaagctgagttcatgttgtgaatccaaaagtatctgagatgggtctcaatcaacttagaaagtttattttgccaaggttgagcacacactcatgacatgatacagcctcaggaggttctgacaacacgtgctaaaggtggtcggtgcacagcttggttttatacattttggggagacatgagacatcaatcaatacgtgtaaggtgtacactggttcagtctggaaaggcgggacaactcgaagtgggggcttccaggtcataggtagataagagacaaaaggctgcattttttggggtctttgatcagcctttcactgaatacacaatttacatggagtggggagtaaaggaatagtcacactgatgccttagtctggctcagtggatctgcatttttgcataaaaatagggcagaagaagcaatcagatacacatttgtctcaggtgagcagagggatgactttgagttctgtctattgtcctgcacctgtgaagataagctatcagtttacattgccagggtgaaattcagcacaactgttttaaggtaaagatcttgaggcccataaggaatttccctgtggacaaattgtgagggaggtatgtagctttttctttgtagctatctcttttaggaataaaacaagaggcaggtttgcctgacacaattcccagcttgactttccccttggttgaatgatttgggggttctgagatttattctcctttcacaatatcaacatccaggtcctgagactgatatgcacctgagactgtacatatgccaaatgggtgtgcccttgtgatgactttacgtcctgtgtgacatgggtatacctgtgcattgtgtgtattcctttgcagtctatgtgtgtgcctgtgtggtgtgggtatgcctatgccctttgtgtgcacctgtgtgatgtagatgtgcctgtaccccagctgttcctgtatgtatcagtgcctggatgggtcctggagcctctggctgctcttctctttataggctctgtctctctagcctggacttcccagaggaagaagagaacagtgcatgtgggtggagtagagagcaacactaaagctctggacacagatatcccaagttccagtcagggctatggccttcccatgttaagccctaaagctaatactcactccctagctctgggagataccaacaactctggggactctgcctcttagcaaatcaacacctaattcctgggaacatttttggtgccttctgctacctcctcttcagggatggctgcagggcactttgtcctatgagtcggggtggagaatgtccagtctcctcccctcccaatcacttcctccatcatccaggtctccattcaccatgttacttccttcacttctccttgcccaatccctcccacaaggaagcccctaaaacaggttcccagatctggtccccagcatctgcccctcacaccagggcctttcaggaagatgagttctatggctccattctctctgactccagattcaccacactgaaaggcagcctctagaccagccctggatggattgcacaaactggagactgcggaagacctctgccaaggaaagcctggccctccccagtcctgtctgccccctctgagccctgtctaagattacagcccatggcccttcctctccttcctttcccagagcaagagccacagcagttagcccatgacagtgccagagacagccctggcctggggaaccaaggaccagaagggaagaccaggcctctagttcctcggcaccagacctgacccagccaggcctggagtgtcaacatgagtgtgaatgtgagtgaaagggtgaacgtggtgaaagcatagcttctgaactcccagactgcagtgcttccaataaaaccacctagcacccatggatctctctgtctgctctctctatgtggctcagacaagggaagacaagaatgagagggagaaagagggtgggatgagggagagaagaggggtatccattcctcacatttcaaccagaggaaactttcaccccacttatttctggtcactccctcctatacagtcagcccagccccaaaactgtctttccccttactcaaaccgactacagctcagtactgggccttgactgggatgtcagagctctggggcagctatttccaacctcccacactgggttgattgccctttcttgacaccttctacttcttccagccagcctgctccatttatagtaagaatctcactattctcttttgatcctcccagctctacccctacctctcagagggcagacaaggtgcctgtcttgtttgttggttgttttgttttgttttgtttgagacggagtctcactctgtcacccaggctggagtgcagtggtgcgatctcagctcacagcaacctccgcctcccagtttcaagcaattctctgcctcagcctcccgagtagctgggattacaggcgcctgccaccacgcccggctaacttttgtatttttagtagagacggggtttcaccatcttggccaggctggtcttgaactcctgaactcgtgatccacccacctcggcctcccaaagtgctgggattaaaggcgtgagccaccgtgcccggccacctgtcttctttactactacatccccatgcccagcacagtgcctgacacacaggtggtcattcagcaaatatttgttgattgaatgaatgtagcaaaaaaaaaaaaaaaaaatcacaagaagataggtctcagaccagagaggaagggcaatgaccctccggccattcagtgacttagccgaggccactcaactaggtatttccgtagcctggccttttctagactggactctatctgaggacctattcctcctcggcccagggtcatacaaggggaggaaggcaggcaagagaggcactcggcagggcagaagcccagggaggggtagaggagacgtggggattaagaaaacagtactggacttagtcccaactctcttttcttgctgcctgctgcggaagcctcggccccccaaggtgtagctccaaaacctgacctgacacctataaaagagggtcctttgcccgcatcttaatcaaccgaccccgcccctggcctcaccccgtaagatgacgtttcgactccgcctcctctgggagacatgaacaccccaccccttccgggggacaggcaaacctagtgcgcaacggcatccctgtgacgtaatagtaacggtccgtttccggggtggagccagggagggcgggagtttaggctgcgctgacccctctcagccccccctccaggtgaccccagcccctgaaaatcctcacccagggccccaaatctcccagccccatgaccgccaaacctctcgccctggccccctaaatgccccaggccccggagatgaccggcctcctcaccccttaacttccagtgcctcccaaatctccaagcccaccctgtcccgtggtggcaactgaggcttctcgggggcatcagcctcagattacctgagaactgggcmgcctcgtcctgagaatgacggagaaggggacctggggctagggaatccctgattcaatcatgccgctccccaggagacgttcggagcccaggacatgtcgggaatgaggagatacgaggtggcgctggaggcggaggaggagtgagtggaggcgggttctgcggaggaggaaccaggcggctccggggtgggggagggtggagttctgcgggggcgaggggtgggcagggcgagcctcccaggggcgtgggcgcgaagggagccgcttttagaggcggggcggagccttcctcgacggcgaggcaccgcggggcggagtctgtagggtcagctcctccccgccccgccccgccccgcccggctctgccctctctctgcaggatctactggggctgtttctactttttcccctggcttcgcatgtggcggagggagcggaggtgaggaggctgcgataccgcggacccgccccgggcatggacgggactcagtctctgaggacccatcggggggaatccggtagctcccgccccgcctcatgccagtgtcgggtcgccccacagctcggcgcaccccggggagcagaagctggagcctctgcgaggcctgatgagctgtctgtccagcggcctgggtcctactccccagcgctcgggtcgtggcttcccccgccgcagccccaccgccgctgcccagccagccagtgcattaaagatttaaaccgaagcccaccgtactgacctcctgactctgccgccgctgtcgccattcgagccgagcgcccctccccacacgggctctgttccgtactgacagggcgtccctccctggaagggtgcccttccacgtcaaagcccctcatcagtgtcaggcctcctgttactatcaatggctgtctcccccaatcccaacccccaaaaacccatactgtgagtcgcctatatgaagagaactaaataatcctgcctgttactcccttcctcggagcgaggactttgccagctgtctgaagaatcttctctgctgggagtatatctaaaacattttaagcagaggtgtaggatgcaggctgtaaatgataagagggggagattcctagaagctgcctgccacagaggagcgacttgggttggcgacctttcctacagttcataccccaacttttggctcctccagtctgatcccaagtttagagatccttggcatcagcctacctagaagttcttgctccctccctaggagagtccaagggccactgctctctgccgcccccttctgtcacccaatcagcctgggacccactaactcctcaagtggtgagaatcagggactgctatgtgggcctgccttcagttagggactggacccagcaccagaaagggcaccacaagattaagttaaagaaagagatggcccagtttctggctggggccaaagctacagcagattgtggctggggagaagacttggtcttaaaggggagagatgggtgcacacccaaaagcatttgttttctgccttccgaagacttctggaccgacaagcccagggaagaccagaaagtatgtagcgcacagccaagtgatgaagaaggtctatgacaagcccgaggaacctgggagatttccttgggatttcctcagtggctacacccaacaagccttgggacacaagagaaaggcctaagccctatcccaagagaaagcctactccatagagagtggctgaccctacagcagacgactgcaacaagataagggctggattactgtgttatgacttggtttatgtttcaaatatagagcaggacttgcagattgagatccctggaccaggagtgggaaattcttaaaggagccaggggcactgaacttggcagcatacccccaccctaggcagctcccagcttcctggaaaggactggataaagatgaataggagctttgcattgcggggagggggtaaagaacggagtgacagctgggtatgggattaggagagaagcggctatagctggagggtgggatgcagggggtatagcagttggacatgagggtgtgactgaacccgggtagggagaggggatgttcctccaggcccaggaaggaggctggaatttgagtaaaacaaagatgtaattgagtgcttgagtccaatgtcttcaacaagtcagggactggatctggagaccctaggcccctgctggcaagaggttggcattcctggaacaggactagacaaaaacaggaaggtaagattcactgggccttttacctgttttgacaacagtaacctagcaccaaagagcttttatcttccctccttatctaccccacctttcctccctgtctcatcatcctggggaaagctgccccacctcagcatctccaaaacacccttaatattaccataaagggccttcccccagcttctctgaatggggctggcctcagccaagaaccctcctcagccagaagggcctgctctagggacccattcccatccatttcttctgataagacaggcaggccaagccaggaagtggggaggagaaggtgaaggcaagttggtgcttgcctgccctctgctcccaccccacccacaactcccctgtcagaatctgtgtgtgctagtgtgaatttgcttgtgattggatgactgtgaaaacacaattgggtgggagagggactttgagtataaccggggctatataattttgtctacggttgtctgatcatgagtatgactttgtgaggttgaccaagtgattgaggagtgactttgaatgtgtggctatgcgtatttgagtgtgaatgtctatcattagatgctgctgtggatgcttgactgcccttactcactgttccatcagtccctacatcacacactaatccttcccccagcttcactgcccagagcttaggagcacatgggaaatggctatcctagatgaggaaggagtctgtggcaacaggccgagaattagggcccaggagtgtcacaggttacacagtacatctccaactgcctctgactcacctagtgccccaggtaaaaggcacccagataaaaggtaggggaggaggagagagagagaaggaagagtctaggctgagcaacatgaaggggcccccaaccttctgcagcctcctgctgctgtcattgctcctgagcccagaccctacagcaggtgagtacttgggggtatagaaagctgggggtctgggtgaatgggatgaagttgaaaagacccaggaaatccaacctaacctccagctgtctggcagagaggttcttggtcaggatccctctgaacacatggccctgttgcccctagcattcctactgccacccagcactgcctgctgtactcagctctaccgaaagccactctcagacaagctactgaggaaggtcatccaggtggaactgcaggaggctgacggggactgtcacctccaggctttcgtgtgagctcccacccctgatacccctgactctgacctcagtcccaacccctaatgctgatcccaaccccagccctaactgctaattctgttgccaactcaggttttcatctggtccttgctcctaacccctaattagggtcattggggatgaccctaatctcatccccaagctatggtcatagctttggacctttctctacccaggcttcacctggctcaacgcagcatctgcatccacccccagaaccccagcctgtcacagtggtttgagcaccaagagagaaagctccatgggactctgcccaagctgaattttgggatgctaaggaaaatgggctgaagcccccaatagccaaataataaagcagcattggataataatttctgagtataatctccaagaacttccttattctctttattcacacctgcacaacccctgcaaggggaaaggccaagagccaaggacccacacacactccccaggcacctacatacatgcatgcagagaatacatgttccctgcctcacagacacatggtcacacatggacacagatgtacacattacacacgttccttgagcagaactccaactctggggtgaaatcagaggtacaagcacctttcagctgcaaatttgaaatacagggtctcacagaaatgggctccaaacagaacttccagctgagatccaaccatagggatctactgtcctgcctggtttctatccacaccagcaagacagaattataggtggaatctgccgaagccctcctgggtcctctacaggtttggagctcctagaagaagcaggaggcaaatcaggagagacagtaagaccggatcttggcccagacaccctgagaatgagggaggtgactcagttctaagcttaacactctgaagatgagtagaggagcccagctctgagggagcctcttcaacacactgaagatacgggagtggacctagctctgggcccaggcacattaagaatgaaggaggggacctagcactgatccaagacaccttgaaaaaaaaggatgaatatccagctctgagtctaataccctggaagagtattagtactaatactaataccctgaagggaagtccacctggggtccttcctcagtaccctgagaggagggaaagagacccacttctgagcccagggactcaagaatgaaaggcccagccctcagcctagacatcattaaaatgaggagacccaacttggattcccagcatgttttaaaatgactagggcagccagctcttaatctggacactcaaaataggggcaaacatctccaagtccaaatcttctggatgtcctactcacctggacgcctgtccactggaatcactgaggccaagaacccaggctttggggatccatccttcccaccccgtctcagcctcagcctggggcatagaaaggcagctgtctctccaacaatgtgggttatctcagtctccgccaaagggtttattagtaaagggtcaggagaggaatcagttaaaatcaagtggggcatgggggatggaggtatggggaggtagttccagaatcagacaggttcagcgggcagtcatgaagggtggagatgaatgtggtctatgggcatcagagcatgtgtgaggatcagaggctgagggaccaatggcagtcacttaccagagccccagtgccagggccccagccaccagtcccaggaaagaaaggattcccaaagacgccagcacagctacctgctccacagagtccctgtgatctgagggggagggccacatgtcactgagagcaagcctgaccaagctcggtgtccccttttctctggggttttcagtcctttacaagtcttgcccatctgcccaagctcaccaagtagccgagggtgtggttggagggagggccttggaggagcagggctgtccacctgaggctccacctctggctgcgtgtgtagctggccccatgctggtatctcctttggtatggtccctaaaggaaggcaagacccaataagtgtccatacgctggtggggacgggggtcacgtcctgtgctcaaggccaaggcctaggttggaagtcaaggtacctaggaggaggagcctgatagggcatggccagctcctagggagcatggcaagctccaagcttgtagaagtggagcctgtaactgcaggggtggaggccaaggggcaggacttaagctaagacagggctgtaggcaaacaagtctgaagtctgggacagcaattgccgtgcctgtgtgggcagggcatgtgccacctgcctgtcttttggaactggttcagctgatagatgctttgggatggggcctctgcccttttctttggctttgtctctcaccagtgctcggagttccccaggcctccgggctccaggtgctccaggtgccagcatctagaaagtcccgggcactgactcgtacagcatggggcagcccagccacagcatctgtgatcacctcctccagtccagctggctccacctgggggtaaacatgactcactgttacccagcttgtaagtgcagggccttcccagccaccatctacaaagagcaccccttgctcccagtctcatcctaaagcctagtggagctgtctaggtctcatgttgggtgtctggtggagctgagtctacacctagtgtttgtaagacggcagtagtgattacttagagaggctgtggcatcaggcagcctgggttcaaatctttggtgaaccacatattgaatgaccctttgggcctctctgtgactcagtttcttcatttgtaaaatagaggtgaatctacctaaacaaaacaatgtatgcaaaaagtgtagccaggtaccccacaggcaggcagcactaagtaaatattagttattatctgatgctgctgctccctagtcctgataccagccaatctttaacatctcctgagacacaaattcactgctatcctcagctgggtatatgagtgtttgtaggagaatgtgcctctaggtgaaaggcactccttttcctaagagttatttttaggccgggcgccgtggctcacacctgtaatcccagcactttgggaggccgaggtgggcagatcgtgaggtcatgagttcgagaccagcctgggcaatatggtgaaaccccatctctactaaaaatacaaaaattagccaggcatggcggcgggcacctgtagtcccagctactcgggaggctgagacagaagaattgcttgaacccaggaggtggaggttgcagttagccgagattgcaccactgcactccagcctaggtgacagagcgagactccctctcaaaaaaaaaaagttatttttttaaaagccattgctatcttcccacagatgtgctttacctcatagttatagccccacaggacagacattcagtctctcagtcaccactgcaacccagcacccagtacaaagcctggcccacagggaagtgttgggtcttcagtgacctgccagcactggaaagctatacagaa

SEQ ID NO: 97478 - DNA, 12879 bp, Homo sapiens
  misc_feature (1)...(12879): n = A,T,C or G
tgttccttgtacttctcatttctctctcgctggacacccacacatatgccaaggaacctgtggctgagggggagatgctgttctgaggttgaggctttgtgatttggtggagaggtaaagtgaagaatggtctgaggttgagggaatacagagagaaggaaagatgttatcatttcactggaacagaattgggtggaaagttacaaccttaaagatcacaaggtagaggaggatgagctctgccttccttaaatacaacctgcccatctcccttctacccgtcctcatcccgccttgatccaaaagctgggcaagcaaagtaaaaccaatttccaaaagagaaaagtcagcagcatgccatttactggattagcagccaactgcatcaactaattaatacttaaatccaccccatcatctcccactcattttgcaagactgtggaggaaacaaagaagtaaaatatattactaaactatgattagttattctgtaacatatgagaatttatcaatcccaaataggattctccttaaatagttatcttagagggttatacacttattttaatgaacctgtcccattgctcaaaatattaaaaacaaacaaacaccattcctcctagaattaccttcagagagagtttggaaacgccttgatttaaaaaaaaaaaaaacaaaaaaaaagccttcctttattgtcacgcctcctttgtatatggacatttgccatatttatcacccacctcattcattaatttagcaagtatttgtctattgagtcctattatggtatagcacagggatacaagggtgaacaaaaccagactcagaaccttcatatatcttgctgaggagagagacaatcacagaaccaccaaataaatacaaacttcttgtccaaagtccagaggaaagcacatggtattactgagtctgtagtggttatttgacatggtgaggttacgctgagagctgaagcatgaataggtgttaataagggttaagcaagagggttaagagcatatgctaaggcctgtggcagaaaagaacatacaagccaaaagtacccaaagccagagtgtctagagaggaacagaacagaaagtgagacatgggtaatggctgggtgcggtggctcacgcctgtaatcccagtactttgggaggctgaggctggtggatcacttgaggtcaggagtttgagaccagcctggccaacatggcgaaaacctatctctactaaaaataaaaaataaaaataaaaattagccaggcatggtgacacccacctgtagtcccagctactcagaaggctgaggcaggagaatcacttgagcccaggaggcagaggttgcaatgagctgagattgcaccactgcattccagcctgggcgacggagcaagactctgtctggaaggaaggaaggaaggaaggggtaagttcagaacacacagggacttacagggcacattacaatgttatatttatctaggctgggcgcagtggctcacacctgtaatccaagcactttgggaggccaaggcaggtgggatcacttgagcccaggggttcaagaccagcctggacaacatggggagaccccatctctacaaaaatacaagaattagctgagcatggtagctcatacctgtgtagtcccagctactcggagcctgaggtgggtaggtggcttgagtctgggagatcaaggctgtagtgagccaagattatgccactacactccagcctgatgctcagagcaagctcctgtctcaaaaaatatatttatcatacagggaaaaaaaaacagtaggaaaccctctatatccgttatctattgatacacaacaaatcaccaccaaagttaatggcctgagataactttttatttatttttattttattttatttgagatggagtctcgctctgtcactcaggctggagtacagttgcatgatctcagctcattgcaacctccctctcccgggttcaagcgattctcctgcctcaccctcctgagtagctgggactacaggcgagtgccaccatgctcaactaattttttgtatttttagtagagacagggtttcaccatcttggccaggctggtcttgaactcctggtgatccacctgcctcggcctcccaaagtgctgggattacaggcgtgagccaccacacccagccacctatttatttatttatttatttatttatttatttatttagagatggagtctcgctctgtcgccagactggagtgcagtggcgatcttggctcactgcaacctccgactccctagttcaagcgattctcctgcctcagcctccccagtagctgggattacagatacgtgccaccacgcccagctaatttttgtttttttagtagagacgggatttcaccttgttgtccaggagggtcttgatctcctgatcttgtgatctgcctgcctcagcctcccaaagtgctgggattacaggcgtgagccaccgcgcccagccactttttatttatttttaagaggcgggggtctcgctctgtcacccaggctggagtgcactgacatgatcacggctcagtgcagcttcgaagtcctgaggctcaagtgatcctcccacctcagcctactgagtagctgggacgatgtgcaccactgagcctggcttttttctttttttttgtaatgatggggtctcaccacgattcccaggctgatctcaaattcccgagctcaagttatccttccatcttggcctcccatagtgctaggattacaggtgtgagccaccacactcagtagaaataacttttaaaaactgttctttttcacgattctatgggcttgctgggagttcctttgctgttttcacctaggctcactcacgtggctgcactcaaatggcaggtgagccaagcaggaaaatgcaaaatggcctcaccagcatgtctggttgttggctggcgctcctccgtgtggcctcatcctcacatggtggtctcagggagtgttccaaggggacaaaagcagaagctacaaggcctctgaaggactaggttccagaactcacacatcacttctgccacatctattggtcaaaactagttacaagaccagcccagattcaagggatagagaaagagaccccaattcttgatgtgagatgcagcaaagtcacattgcaaaggaatttggggccaccattaatctaccaccacattaaaagcttttttttttttttttgagatagagtctcaccctgtcgcccaggctgcagtacactggcacgatctcagctcactgcaatctctgtctcctgggttcaagcaattctcccacctcagcctcctgagtagctgggactacaggtgcacgccgccacgcccagctaattttttgtattttagtagagacagggtttccctgtgttgcccaggctggtcgtgaactcctaagcttaggcaatctgcccgtctctgcctcccaaagtgctgggattacaggcgtaagccaccacactcggcccatcatgtatttattaacaatagatacctaccagttccccctctttttttttttttttttgagaccgagtnnnnnnnnnnnnnnnnnnnnnnnnnnnnnnnnnnnnnnnnnnnnnnnnnnnnnnnnnnnnnnnnnnnnnnnnnnnnnnnnnnnnnnnnnnnnnnnnnnnnnnnnnnnnnnnnnnnnnnnnnnnnnnnnnnncaattctcgtgcctcagcctcccaaatagctgggactacaggtgtgagccaccacccccggctaatttttgtatttttagtagagatggggtttcaccatttggccaggctggtcttgaactcctgacctcaagtgatccacccacctcggcctcccaaaatgctgggattacaggcaagagccaccatgcctggccctaccagtccttttttaagaccaaaaagttttgaattgtgacagcatcactgtaataagtagacagcttctcccatgatcacagacaataccattcaaaagttctgaaatgtttgcttaaaaatgatggtatacctcctcaaaagagattaccctctaggttttaacaatttaggtttaaaaaccagctttgcattgcctgtgatagctggtaaatgccatgggtgtggagaagctcatcatgcacatattggtcaagatggatgggtgttgaaaatgttgggtactggccgggcgcggtggctcacgcctgtaatcccagcactttgagaggccgaggcgggcggatcaccaggtcaggagatcgagaccatcctggctaacacattgaaaccccgtctctactaaaaatacaaaaaattagctgggcgtggtggtgggcgcctgtagtcccagctactcgggaggctgaggcaggagaatggcatgaacccgggaggcggagcttgcagtgagccgagatggtgccactgcactccagcctgggcaacccagcaagactccgtctcaaaaaaaaaaaaaaaagaaaaaaaagaaaatgttgggtactcagaagttaatgtgaattcagtataggctgggggcacaggataacaatagtagctaatatagtacttacctggtgttttactgtgtactggacaccatttgaagcaccttacacatataagttcattcagtcctcattattattatccacatttttaaaactaggaaaccaaggcccagagaaattaagtaacttgctcaaagtgtcacaactagtaagaggtggaagctaggatctgaactcaagccagctggctctagactgtgttatcaccctccataacagaacctgggctgcaggtccaggagaggagggtgaggaggcagctgtgtgtgggtgtggcaccatgaggggaatgtgggttgtgagtaccatgtcctgtttaccagtgggagaagtcagacccctgagtcagaacttatgctggggagctttgctggggccatcacgatgtgtgggtgtccaggcctccggaaggaaaggattcccagcattcctaaagccatggtcctggaatctaggtccctccttaggctgagataccagctgagagttaagcagtttggggagaatgaagtttaggaagccagccttacaaacaacacagagaggtcatctataatgagaattgagggcaaaatcgattcaaaggcccagggaccactaaaggttgggcagaacgggccgtgtttggaaactgggtgggattgtgaaactaactgcgagcaactgaataggcggagggggctttagagacttgtgccagtgactgagggctcaggcgcagagagagacccggggctttgtacatggtagaattaaggagcgctggcgttgcgttgggggaagaaggaaagccccaccccgctcccccgggagtagggaggaatgggtgctttggcccccagggctccggtcctggcatggcctgggccgcctccccgactccatcattgctgtcattcccggcctcaagcctccaccgcccccacacgtgccgccacagggagcggcccgatcaaggcgtgacgctccgaagggtggggcctcacttattcccctatttaaaggggaaagaggccgcggcgccggccccaggacccgacccggccccaggagagtgtgctcgttctgttcacggagctggccgcgttagcgacgtcctcgagtccgcggcgggcacgatgcagctcttggtgagggtaccctctcttccggagcggggcgagctggactgcaacatctgctaccgtcctttcaacctcgggtgccgcgcgccccgccgcctgcccggaacggcgcgcgcccgctgcggccacacgatctgcaccgcctgcctccgcgagctggcggcgcgcggggacggcggcggggcggccgcgcgcgtggtgcgcctgcgccgcgtggtcacgtgccccttctgccgcgcgccctcgcagctccctcgcggcggcctcacggagatggctcttgactcggacttgtggtcgcgattggaggaaaaagcgcgggccaagtgcgaacgagatgaggctgggaacccggccaaggaaagcagcgacgctgacggagaggcggaggaagaaggggagagcgagaagggggcggggcctaggagtgctgggtggcgcgcgctccggcggctctgggacagggtcctggggcctgcgcggcgctggcggcgtccgctgcctagcaacggtgaggggctgcccggggaggatgcaggggagagagcgccgaggaataccgaggttcgttggcatgctcctgctgccactaacccttcttctttcccccagtgctctactgtgcggagatcaaggacattggccacctgacccgttgcacgttgtaaccgaggaactcggaagctacagccgaaggaaggtgggagctgcagcctcgcgggggctgatgtcaagactactstctctcagatcccaggattggcatgtgatgagagagatgagccgaaggcaggagggaacgccctgggaggtgttgatgctgagttggggaggctcctagacgaactcgcccccatctactgactgtgccagtcttacattttcaggatggagtggccaagggatgatataaacaaagcctacgttaccgtgggaagaagacagactgttttcttagctgggacgttggcttttgtccagggtggctctggtgtgtgggagcaacaggtcccattttagcaattctttgtcaatggtttgaattttttttttttttaagatggaacgggagagaagaggctaattttcgcgtcatgttaatctcacttctctggcatgtaagggtgctggtatgcctgctgtctccccactcccagttctgtgttccagaaattgagatggctccctgcctgtgactatgattaggagccttgcttcatttcagaatctcccttcaacctgctagggcaggtatcagaaattccaaagggcatttatgtgaggcacctaattagagcctatcaaagtaggaagggagagccatttgaaaggcatcatatttcaaacttttgctattatctgtgttatctttacagtcacgggaacacactagcgctactgaaaagatacttatacaattttaagtgtctttaaaatttgtgtcccataatgggacatcacctgttgtatatatgccatgtattctattttagaatcctgtatattatgaccataaagtcatagtcaaggaccagcagtgttggtgtactgtcaacggaagtgcacagtctcactctaggatcccactccagacttcctgaatcagactctggcagggttttttgtttttttgtttttgttttgagccagagtctcactgtgtcgcccaggctggagtgcagtggcgtgatctcggctcactgcagcctccgcctcccaggttcaagcgattctcctgcctcatcctccggagtagctgggattacaggcgcctgccaccacacctggctcatttttgtatttttagtagagatggggtttcgccatgtttgtcaggctggtctcaaaactcctgacctcaggtgatggcgcccaccttggcctcccaaagtgctgggattataggagtgagccaccgcgccgggccagactctggcattttaacaatcccaggtgatgtgtgtgcatgtgaaaatttaagtaccattggtctagatcctacactctttaggatatcaccatctgtaggtagaatatttaaagcataataggtatgactgatagattattttatccaaagttcttttttttttttttgagatggagtcttgctctgttgcccagactggagtgcagtggcgtgatctcggctcactgcaagctctgcctcctgggttcacgccattctcctgcctcagcctcccaagtagctggggctacaggcacccaccaccacgcctggctaatttttttgtatttttagtagagatggggtttcaccgtgttagccaggatggtctcgatctcctgacctcatgatccgcctgcctcggcctcccaaagtgctaggattacaggcgtgagccaccacgcccggccccaaagttctaaagtaacattctattgctaaagaaatcctaacctactatgtaacatttttctcttagttaaaaatgtgaacttattattaacctcaattttttagaggcctccaatctttttaaaatataaatatttttgattgacaaatcataattatacacttatgggggtataaacctcaatttttgtaaccctattttggcattttcctgtccttacatctcagcttaaatgctccctcttttgggaggcctttttctgccttcaacatagtagagccttttcctccacccctctgtaacataatgccctgttttatttttactgcttttattttcatgctttgtgggtgtccccactggagtgtaagccctatgggagcaagggctgacctgtgactgttttatctccagggccaacagcagtgttactgtatagtatgtactcaataaatatttgttggctttatctcttattttttaatataatagccttgtgaactaagtgtctggcctctctcaatctttcagaggctctgtttagtgaacaataaacatcaaggaagtgcctagcagttcaaatatttggtaagctagacagatctgaccctcaacgccttaaaaaaaaaaaaaaaaaagtgtgcctttgcttcatactggagctgaacctgtggagctgtagtgacctctactgactcttaggggaannnnnnnnnnnnnnnnnnnnnnnnnnnnnnnnnnnnnnnnnnnnnnnnnnnnnnnnnnnnnnnnnnnnnnnnnnnnnnnnnnnnnnnnnnnnnnnnnnnnnnnnnnnnnnnnnnnnnnnnnnnnnnnnnnnnnnnnnnnnnnnnnnnnnnnnnnnnnnnnnnnnnnnnnnnnnnnnnnnnnnnnnnnnnnnnnnnnnnnnnnnnnnnnnnnnnnnnnnnnnnnnnnnnnnnnnnnnnnnnnnnnnnnnnnnnnnnnnnnnnnnnnnnnnnnnnnnnnnnnnnnnnnnnnnnnnnnnnnnnnnnnnnngaaagtataatttatatgtacaaccaataaacctgatacagaagaggggatcaggacagaccaggagtgggtgtgaagagagactgggaaaggggcagcaagaaagtgaaggggcagcaaagaggaagtggggggttcgccatgcaaactgccactctccccggcccctcctgggaggggggatgtgcccacatttccctagcctgccctccactattttgctctggtcccaacgacaaggtagctcccaagaccctgactaggtcccctgcctgacttatacaaatttagtctgtatccaggccttgaggagggagggtagtagaagtcttccaggaacctgagccccagagctgggcttccaccacatctggcccattgtattctctcccacccttctaggttacctgggtccctagaacaggttggggagctcctctttggcttgagggagtatcacccaaccattactctttttgtaggggtggtccttggtccctagggaggggggaacattcccaacacaagatgccggtacacaggaggtaactgagccagtgaacggcacctttattctgaggctgaacagcagttgacttcctccctcataactgctccaccctccacgtggggagaggtaggggacggtaacatgcagccacccctcctcgtcccttcctccctcccagggctcattttcatccctctctaaagtccccctcctctcttcaaagctctcttccccacaaaagttcctaaaggccaggcaaggctgattctccacttccacatgagacagagctgattctgcagggaaacggctggggaggctccacctctttcctccccacaaccatttactgggaagttgtgtatacttggcagtgtgggaggaaggtacttggaagaccctgccagccatctcccacccagacttcttctcaccagcacagtcttcaaggcttggtgggaaaggtgtgtgggagtggagaaagacaaagggcccttcttgaagagaggagctgcagagaggggcaaaggggttcctagcccagtgatggcccaaggggtggggaaggtggagggctggcagcaggccccagcgcttgagctgggggtcggcctcggggacggggcctgggtgaagggcaggcctgggatccagtcagtcgtctatacagatcacctccccggctcggggctccttccgatccagcccgtctgacaccaatgcccccaccatttccttctccttcttcacaagcactggagggccgttggtggcggctgtttgggaaaggggtaaggaaagatcaatctccagatcactctcaaacgtcacttcatgacaatggtgaattctcacttctaggtcacctcctgccacttcccgttgtcccacgtgagggagggaagacccgggcaaacccctttccctgagattccactttgtgctacatgattgaacacatgttcccactctctaacccctcgggtttcatattcactttcccttgaaggaacccggagggaggtggctcgggtagaagacaccaagccacagatctactaaaactctggtttttaataaaggggactgaagaggggttaagaaagggatgggtggggggacagcctagaacaactctatcccataaaacaccggataccaccaaggaaatgagatggactagagcagttaaagggcagctgagcagaaataaagtttggcaaaggaggagtgtgagtagcagggggtaggaaaacaccagctgacctgtgatgaaggaccctgcaggcatctggctgtaattggcgcctgcggcggccagggcccctacgggtgcggcgctgaaggccgccccgtaccccggaggtgtagcgtagggacccggcgggtaggcctggaacagagaggaagcagaagttggagttagttcatagtctgtgagaggaaagaagctgtaggggagacattatgagccacactccacaactgctaagggtaggatacacaggcagggagactcactcaagggtgatgactgtgttctagcaagttgtttttccatattgtataggattctgatggaagtgtttgtatgtgtgcaggaggaacacaaacagggaaaactggagctagggggaaagagggttaccggtgtggggtgaggctccgtgcccttgctggccagccggctgaggatgctgcgctcggacatctgaaggcgggctgcgatggggggtattcgggacagcgtggctggcaggcgggtcacgtccgccttcatgtcgctcagcaactcctccagctggttcagaactggggcccgggccacagagaaagaagggcaagagaaagacagggaaatacagagatggagccaggaaaagagaggcatcagatggacagatacaggcagaaaaagagcgagagaggagaacacagatgtcaaagaaccagagatcaagaaagtaaaagaagtagatggaaaacagaagcaactcaggggaaaagaaaaagtgtcaggaaaagagacagagagaccagattaccacagaagacagatggagagaaagaagaaagaaaaagggagcatggaggaaaggaagatggggggacattggaagacatgggggcggggagttgtcagaacatctcatactggaagagcaaggtttggggttggggatgatggggaggaaatagtcaggaggcatgggaggtggtaagtgtcaaagctttaaggaatcacggttttaatatgtaaggggagagggaggttagaaggtcagtattacagattcaaggaattagaacagggatcaaaggggccaggagtcagtgactacaccaggcaggattagatggttagagggctttgggatataatctctatcaatggcaaggtgagagggggtaggaggaaaggtcgaaggtcaaagggaagtttcatggggtaaggccagagggttggatgggtggtagtttctgccttatggggtgaaacacatgtgagggaatgtgatttgtttgatcacagccagggatctgtatggtgcattcacagtccaaggcccctaactggatgatgttaagcagtatggcaggcatgcagttccactgccagtgaagaggccccactgtgtggaggggacacagaggctggggcaggtccctctattgggcacggatggaatgctatcagacatggatgagggttggcttgcacaagtcctagaggctaaaatccaagggggtgccaggtcggtaggagtggggttagaggtcagagggggatggttcagcaggtagaggggtcagggggtgggaagattttgaggggtgcggggtgaagacttacgcagcgttgtgggccctcccccgcgcggggccgccgcggcccttacccttgtgcaggacggcgttggccggcttgttccccgccagcgactccttggagaggtgctggtggctctcggccaggcactcggcctcggcgaagcgggcgtggagggccatggcggggtgcgccggctcctgcgacaggttcaggtaggccgcccgccgcagctgctcctcaatcaccagcgcctgctccaggagctgagggcacagagttgggaggtgaaggtagggctctgccagcagtgggtgaggggctgggggggcggacatagcaagagacccaccctgccctcactgctggcccagggcactcccagctccaaaccgactgcgaacctagcagcaaccc

SEQ ID NO: 97479 - DNA, 12939 bp, Homo sapiens
gattgatcccagggatgaaagaatggttcaccatacgcaaattggcacatgtaatacatcacattaaaagaaccaagaaaaaagactgcgatcatatcaacagatactgaaaaagcatttgacaaaattcaacatttgtttgtgataaaaaactgggtttagaaggaacatacctcaaaataataaaggcgatatatgacaaacccacagttaacatcatattgaattgggaaaatttcagaaccttccctttaaggtttggaactaaacaaggatgcccattttcaccacttttattcaagcatagtactggaagtcctagccagagcaatcaggcaagagaaagaaataaaaggcatccaaattgggaaggaggaagttatattagtcttgtttgcagacaacatgatctgatagttagaaaaacctaagaactccaccaaaaaaaaaaatgtttagaactaataaacgaattcagtaaagttgcaggatacaaaatcaacatgcaaaagtcagtactatttatatatgccaacagtgaacaatctaaaaaaaaattaaaaagcaaacccatgtataatagctatgaagaatataaaatacctaggactcaatttatctaaagaagtgaaagatctgtaagatgaaaactatgaaacactaatgaaaaaaattgaagacgacacagaaaatggaaagatacttcatgcttattagttggaaggattaatattgttaaaatgacaatacttcccaaaggaatttgcagattaaatgtaatctctatcaaaataccagtgatattcttcaaagaaatagaaaaaaaatcctaaaatttatatggaatcacaaaagacccctaataaccaaagcaatcctgaacaaaaagaacaaaggtggaggcctcacacgacgtgacttcaagatatactataaagctaccgtaaccaaaccagcatgttactagcatagaaacagacacatagaccaatggaacaggatagagaacccagatataaatccacacatttacagtgaactccttttcaacaaaggtgccaaagacatatgatgaggaaaggatagtctcgtcaataaatcgtgctgggaaaactggatatccatatgcagaagaatgaaactagacccccatctctcaccacatacaaaaattcaatccaaatggattaaagacttaaatctaagactcaaaactataaaaccactagaagaaaacattgcggaaacactccaggacattggtctgggcaaagaatgatcttgtgtaagacctggaaagaacaggcaaccaaagcaaaaacagagaaataagattacatcaaactaaaaagtttctacacaacaaaggaaacaatcaacagagtgaagagacgacccacagaaaatgtttacaaactatctatctgacaagggattaataaccagaatatataaggagctcaaacaactcagtggcaaaaaaaaagcaaaaaacccaaatgatctcatttaaaaatgggcaaaagatctgaatatatatttctcaaaagaatacatacaaatggcaaacaggtttgtaaaaaaatgctcaacatcactaataatcacagaaatgtgaatcaaaaccacagtgagatgccatctcatcccatttaaaatggcttttattttaaaaaagacagggaataatagtttttggtgagaatgtagagaaagcagaaccctcattcattgttgatgaatatacattatttttggtggagttcttaggtttttcaaactatcagatcatgttgtctgcaaacaagactaatataatttcctcctttccaatttggatgccttttatttctttctcttgcctgattgctctgactaggacttccagtactacgattgaacaaaagtggtgaaagtgggcatcagtacagccactataggcaacacaatggcggtttctcaaaaaaataaacatagaactaccataaaatccaacctttccactactgtgtatatatccaaaagaaagcaaatcaatacattgaagaaatatctgcactcccatgtttattgcagccctattcacaatagccaaaatatggaatcaatctaagtgtccacctcaatggatgaatggattaaaaaaagtggtactatatgcagtggaatattattcagccataaaaagaatgaaatcttgttatttgcagcaacatggatggaactggaggtcattatgttaagtgaaataagccaggcacaaagacaaatatcgcatgttctcactcatatgtgggagcttaaaaagtggatctcatggaaatagtagattggtggttatgagaggctgggaagggtataggggactgcaggatgaagcgaggttgattaatggatacagatgtatagtttgatagaagaaataagactgagcattagagatcagtaaggtgactatagttttcagtaatctattgcatatttcaaaatagtcataagagaaataatttgaatgtttctggtataaagaaaagacaaatatttcaggtgatgaatagcccatttacactgatttgatatttacaaattataattgcattcaattatcatatgtactccaaaaacatattcatctattatgcataaatttgaaaataataaacactcatataaggagacacacagaagagatctgacacacagatcatgggaggtgacgtgacctgagatgcagagatcaaagtgttggtgccacagaccctgaagccaggagcccccagaagctgggagaggccagacagggtttctcccctggcagctgggagaggccagagagggtttctccctttcctcatctggcaggggaggaaaaaggaatgtcctggctgggtgtgggattgtaggaagtgagggagggggcgggctgatgcggaaggagaacattccagagggcacagtgagtcccaaagccccaagcggggtggcaggagccagcctatctgaggagcacctggggccatggaattagagtggcgagaacaggggaggtcggaaaaattggaccagagaggaaacagaggtcaggtgggacaaattcttccctcagagggtgcgggctgtgcaggaacaagggtggcccatggacagcagctcctccagtagggagtgtgggagatagatagccactgaggagggcgaagggcccaaacagggagccaggagcgggctcaacagcctctgcttgggtgccctcagccaggcaggggccagcctggccccagaggcacaggctcacctaattggcagtgtgggcctttccatcatcagggggataattggaccctggagtccctatgctcatcagaaaaagccacagtggtttctccccagtgcctcaggcagcccacttctcaagagcatgttcaaggctcgtctggtcactgtggccagactgggagttgctggacacaggcagaagccactcttcactcctgcaggcagctgcagccgtttgcagtgaggcttccagacgccccaggtaggatccagcactttccatgttgccgatgggctcctttcgctgtgattttagggtacgttgtattccttgcatggggagagagctcttcttttatgtgtgtgattgacaatccccactccacatgccccccacatacagtctggagcagggactcccctctgcagtctcacggccagcaccaagcaggatggctcatggatgctccataaatggcccttgcatttttgagtactgtgctgggtacatattcacaggcattgggttatgccctgatgtctaacatcatacccagaatcagccagcagcctcaggtggctgaatggggcagacagcatttgctcactcatcattgacgaggactggttctgggtggctctgccaggcaccagggaaggcatcagagtaaatggctgcaggctgatggtaggtgcagccgggaggagctactgcagtacccgtctcacggaccaccccaaaatacatctgttctgtggtacggaaagcttcactttcctctctcagattggagacctaggtttgaatttgtgactgggcaaaaacagtctttgtaacatattggagaaccttgtttacgatgagaggatgccagcctccctcggcagcgtccgcttggactttcagtctgtccacagaaaccagggaggtacagccaagttaaaaaggcagccatgcccgcagcgatggggtaccctggaacagaaacgggcattcgagggaaaaaaagatgaaagccaaagtctggagtttagtccacagtaataccaatatcaatcccttactgtgacaaatataccctcttcatgtaggaagttagccttggaggaagctgaatggaagatctcccagagctctctgcactctctttgtaacttttctgtaaatctaaaattattccaaaataaaaagtttatttaaaagaaaatgcagccattgtctaacaagttcaggggatggatagagtgtgctgtaaagggccctgaatttgtaaagtaacacagtttcaatttaatgaatcaatccggtattaactagccaactcactaatgatcagttaccactatccaaataatcaagagaaatctataggtgcctctactgttctgggttaaaagcacaagaaccaaagctcactacccccaccgccagctctccccagcaaacccagtcaacaggtgggggctgctggccttccaaggagctcctgtggaccccaactttcctccttgtggactttaaagccccctgtggccactcagctgggaagaggacacagtcaccaccctggatggtgtctagagaggctacattcagactcacatcttgagacccctttaatggcaggggttcttattgcttttgttttggggagacagtaggcggtgactggagtgagtagtaaatgcttgtgaaattgatcctaaactctgaactgcacgctggcattttaaggcagggaatggccatgccgccccagtggatgatcttgggttcccacagaatgctcaccctagacggcaggagtacaggtgcgtttccaagtgtaaacctgtccctgggcaattcccttctagaagtttgtttttcagcctgcaactcttccatgaactcgacttgtctagccaaccccctacacgtcaccatgaggctctccagtaagtgccgcgcaccacgcctccccagcacagactccagattattcggcacccacctggccctctcctagtcttctcatcaatttttagcatcctgggccagaaacctggggtcaccctccccagctgtgagctggtggaagtctgccattcaacccacctagactgccaatgaaaagaaccaccagatgccctgtggggcaaggggctgtggctaccctctctctcccccacctgtggaccaggtccccgagagccaggcagccctttcctgggagccctccctgcattcctccggctggttagcccagtttggggttctgccctggtaggctgatagcccctcacctcatgccgaggctgctgccccgacttgcaggaaccctcagatgaaggaccctaaggagggccagctctgtgtccatgcccacttggatcttgagagctgccccaggcacgtgtggactggtagtgcccctggactcagagctttgggttttgcccaccctggagctgcccggctctgttcctcagcatatactctcttcctcattcctacttcatggttatatgtaaatgcaagcacacagaagttttctactttaaaactcagaagatcagcagatcactgctctctcctggtgctctggggagccacgtggcctctctttgcaccaaaactccccatccaagtccagctccactctctctctgcctcagctgccctgcagccctttcctcttgctctttgatgttttgtaggcctgcagctcccaagcacagaggcatgagtgggragaatgtcaccaaggtcagcaccttcatcctggtgggcctccccacggccccagggctgcagtacctgctcttcctcctcttcctgctcacctacctctttgtcctggtggagaacctggccatcatcctcaycgtctggagcagcacctccctccacaggcccatgtactactttctgagctccatgtctttcctggagatctggtacgtgtctgacatcacccccaagatgctggagggcttcctcctccagcagaaacgcatctctttcgtcgggtgcatgacgcagctctacttcttcagctccctggtgtgcaccgagtgtgtgcttctggcctccatggcctacgacygctacgtggccatctgccaccygctgcgctaccacgtccttgtgaccccggggctgtgcctccagctggtgggcttctcctttgtgagtggcttcaccatctccatgatcaaggtstgttttatctccagcgtcacgttctgtggctccaacgtcttgaaccacttcttcygtgacatttcccccatcctcaagctggcctgcacggacttctccactgcagagctggtggatttcatyctggccttcatcatcctggtgtttccgctcctggccaccatactgycatattggcacatcacccyggctgtcctgygcatcccctcggccaccggctgctggagagccttctctacctgcgcctctcacctcaccgtggtcaccgtcttctatacagccttgcttttcatgtatgtccggccccaagccattgattcccwgagctccaacaagctcatctctgccgtgtacrctgttgtcacgccaataattaaccctttgatttactgcctgaggaacaaggaatttaaggacgccttgaaaaaggccttgggcttgggtcaaacttcacactaagacaactaaatgtcctagagtaaaatctgtagtgatgaaacaacattgtatgtggcactttgtgctctttaaattaatttttaagttaaatttaacaaacctacagaactaagtgaaatttaacaaacctacacaactgtgcacaagtaacaagccttcgtctgcatatgttttcacaaaaggactgtgctcatggaaccagctcccagatcaagaactagaagctgccttcacgccctctcccagtcattaacccttctccacaaaaagcactgtcctgacttccaaaaccagatgctagcattggtgtttctgaggggcttacacataaagtatgtgccctgttatgttcagcttctttcattcaccgtgttgcttgagtgaatccttgatgtttttgcatgtaacaataattcatgcattctcattgctatccaatattcataataaataatacatttatactgtataatacacaatgcataatacattcatactgggataatacatatactgggataatgcatatactgtattgtgtattatatatacataatacattatgctgggtgaaaccctgtcccacctgtcccagcaggtgtgagccactgtgctcatccataatttatgcatctaaacacagataaggtaagtcaaaatataatgtcataatcttatgggaccaccatcttatgtgccgttcagttcatcattcaccaaatgtcattgtgtggtgcactactgcgtcagttgagaatatttgtgctggcttatttctggatcctctgttctgttaaattgatctacgtatctatcaatatcacaccctccatccatacaacacagtcttgatttatatgattatgtagtaaatcttaacactggaagagtgactcctcccactttattcttctgcttcaaaattattgtggctattgtacagcctttatatttttatataaattttatagtaagcctgtcaatgtctacaagagaacctcgctgagattttgctagaaattccattaaacctaaaaatcaatttgggaagaactgacttcattactctgttgagtctttcaatccatgaacatagtaaacccctccaattattgaggtcttcattctttaaatcagtgttttgtactttttaatatgcagattctgtgtgtgttttgctggatttagacctaaatattatattttctttgaagcaactgtaaatggtattccatcttttatttcagtttccttctgtttgttgttagtacataggatgcagctgattttcatatgttgacattgcagcctgcaaacttgctgcgctcactcattagttccaggaggtttttgtagattcctttgggttttctatgtgaacagtcatgtcaactaaaaatagacagttttatttcttcctttctgatctgtatgaatttcattttttattttttgccatactgcatggcctattactagaacttccagtgctctgttgaataagagtgggcagagcagatatccttgccttgtttcctccttagaaggcaagcattcagtctttcatgattaagtacaatgatgcagagttttcacgcatgtgctttatcaagctgaagcagctcccctttagtccttatttgctgagagcagtttttgtttttatcataaatgagtatttaattttgtcaagtgatgcagaaaactgcatcaggcaatctggtcatagatttcgtctttcacctgctggtaaggtgtattacattggttgattttcaaataccagattagccttgcatcttctgaataaaccaccttgggttgtggtgtatgattcatttcatatagtgttggattcaatttgctaacatttcgttaaggatttttgtgtctaagttcacgagagatattggtctattggggtctgaagttattttcatgctgtctaatatagtgtggacgtcaaagcgacctcctagagaacattcctagctctcagaacgttctagctggggagggaaaacggaaaaaggggggcgagaagcggagggacggggaagtatatagtaatacttcccttgaaccagtaaaactgtaatgcccaacctggtttttactaactgttttcagactctcccttttcctttaatcacctagccctgtttccacctgaattgactctcccttagctaagagagccagacagactccatcttggctctttcactggcagcccctttctcaaggacttaacttgtgcaggctgactcccaccacatccaagaatgcaattaactggtaagatactgtggcaagctacatccgcagttcccaggaatttgtccgattgataacgcccaaagccccgggtctatcatcttgtaatagtcttaaagcccctgcaccttgaactgtttactttcctgtaaccatttacccttttaactttttgactactttacttctgtaaaattgttttaactagaccccccccccttcctaaaccaaggtataaaagttaatcaagccccttcctcggggctgagagaattttgagcgttagccgtctctcggtcgccagctaataaaggactcttaattcgtctcaaaggtggtgtttttctaactcgctcaggtacaacaaaacatccacgcaaacaggttgtgagaagttacgtctgcgtgctgtgatacctagaggaaccactacgaaaactatacataatgatatttcccaagacattatcagtaaatcaagatggaattctaaaaaaatgtactgtatccattggaaggcacaaaaaaaaaaaaaaaaatgcaaaggaaacaaggcaaaaaacagcagacatgaaccctaaagcttgttaaatggatttcaggtgccctccaggatctaaaaaccagaccctcctgcgttggggaccgggaatccgtatttttgacaaaaagcaattcttcaattatagaaacatccatagaaccggccgtagtttacacagctgcattcccactgttttacaatcgcatgatcatttctgaaaagttgaaaacaaagttaaagaatatttaaggggttaagaacaaaaagcctggggaacacaaaagattataaaaacccttcccaacagcaggcatacttggaaggaaacctcacatgcaaggctccttcgtggagcccagagcccaggtcctgacgggagcacattttaagagatggacttgccggcgcggtggctcacgcctgtaatcctagcactttgggaggccgaggcgggtggatcacgaggtcaggagatcgagaccatcctggctaacatggtgaaaccccgtctctactaaaaatacaaaaaattagccgggtgtggcggcgggcgcctgtagtcccagctactcgggaggctgaggcaggagaatggcgtgaaccagggaggcggagcttgcagtgagcgcgatggcgccaccgcactccagcctgggcgacagagcgggactctgcctcaaaaaaaaaaaaaaaaaaaaaaaaaaaaaaaaaaaaaaaaagagatggacttggagcgtgtgcttttgttttctatgctattcaatgtgttcacagcaggtcccctggatgagaccacttagccttcagctccggaggcgacccaggccggccttgccaggtccctctccctgacaggcgccccgcgacaggggtcccaccccgtccctccgctcctcgccccctctttttccactttccctccccagcgagaacgttctgagagctaggaatgttctctaggaggtcgctttgacgtccacaccgcgcctgggggattctgcggggagcacaggaccctgggacgagacgcagaagtcgctccacgccctgggcggcctcagctcccgcgacaccgcagcaactcagaacccaggcaggggccgggcagccagcatgctgcccccacgttcacctccaactcccacctctcggccctcgccccaacccgcaggaccctggcagcgcactggctgtctccgcggaagcccccgagggcctcggcgcggccccgccccctggaaggttcccgacaggcgccgcgggcaccccggccgtgacgtcacggcagcgcgccggccgcgagagagggccccgtcgcgaccgcgtccccttgggtccttgatcctgagctgaccgggtagccatggccttgcggctcctgaagctggcagcgacgtccgcgtccgcccgggtcgtggcggcgggcgcccagcgcgtggtgagcgggcggcggggtggcagggtggcggggtggcagggtggcggggtggcggggtggggagcagttccacatctcccccggcctctggcggcggctcccaggtcgctctccgggtgggtttgggggacccctcctgcctccggaattgtttggtctttggtcgtggacagacctcagggggccacgagcttctccaggccattttatctcagctttaagcaaaacgctggagcgcggaggtgatcagggccccgaggctgccctgatgcgggaggcccgtgtgcaggtggcaggccgggggcacacgcgcttgtcattagataattcacgtagcagccctgtcaagagccgtttaaaggtcgggccctgctgggtgcttgggtgatgccatgttgagcagacacggagttcagtgcttgtgtccgcttccttttgcctttactctgactgactactctcatttcttagcattttgcccccaccttcttcagtgaaatcgtttcatacatttgtaacacagttggattgctttgtcacattctgccttacatcttgggatccttctacctaatgcgttttttaaaatgtgcatacattgagcgcattctttgtgctataaggttctatggattttttctttgtgctataaggttctataggttttgacacgtgtgtaatagcatgtctccaccattataggttcgtacagagtagcttcactgccttaaaaaattcccctctgctttacctattaaacccttctttttctccaacccctgacaaccacagatctcattaacatttccatagttgccttttctggaatgtcatataattagaatcatacaatatattgccttttcagacgccttgaatacttggaaatatctatgtaagattcacttatgtcttcgtggcttggtaactcatttctttttaatcactgagtaatatctcattgcatggatgtacttcaattcattcagcaattgaagggcatcttggttgcttcaagtttttggcaattatgaataaagctgctgtaatcgtgtacatgcagatttctttttggaaatacatttttatatcatttgggtaatacctggaagagtgattactcatgtagtaagactagttttctaagaagctgccaagccatcttccagagtgactgtgccatttgactcccaccagaagtgaaggctctccttgttgctctgcgtgctcgccagcatgcggggctgtcggttactttggattgctatccattctgatagctgcgtagtggtatcttgtttcaactttggaatatctcatgatatacagtgttcatcttttcatatacttatttgctatctgcgttaatttcatttgcgagaggtgtttacatcttttgcccatttttaaattgggttgtctgctttgccttgttttgtaacttgtttcttccttactcttcagttatcaaatcaagatcgaaaaatatcttgatatttcatattctcctgttttatttaaatttcactataaagtattttaatatttttgtgtttttctgagtacttagtattccataatatggatatgccttaattttgtttaactattcctccgttgttggacatttaagggtttctatttgcatttttggtgttacatcatacttcattgagcatccttataggtcaatcttatgtatatactctttgaatggattcctaatgctgtagacccagc

SEQ ID NO: 97480 - DNA, 12210 bp, Homo sapiens
cacctgcttcccacaccagtccttactggggcatacttctaaggcgacgctcaagaatggcagcagggcagcttcaagaaccccaacccggactctggctttggagaatccgaaccccaaatgccacacccatgcgtcgggaaggcctgctgtttccccaagtccccgtctctgcgccgtgccgcggagtaggcagaatcctgggagccccggaatagccggctccatccgcccaggaccccaaggcttgcagggtgaggtgggaaccggagcgcacaccgcgccgggccagcggtagggactcccagctgctctctttggcggcgcgcccaggtgtcgggaagacaccgagcgctcctatacgcccggggagcagctcgacactgcgataactgccggcctgcccagctcctgaggagcgccccgccctccgggacccgggctccgctgcgttgccagcccgtccgccctccagagctcccccgttctcagggcccacagttgaatgcggcacagggcgtctcggctaggaggagatccggaggcggcgtggactgggcgaccgcaaagcgcagggaccgctgccgcctcgacccgagtcaccctcgcgatcgcgcttgtcgtactcaccgtccggtggggcccggcccagggcggccgcagccagcccggccagcgggcgccgcagcatccggggccacctcttccgcccactgaacctacgtgacagcgccgcaccggcccacctccgcccgcgcgcgagactgacgtcatgaggcgactgccccgcccatgtctcactcgttcttccccgccccttagggaagtacttacctcagtgcctcgctagccccgcctccacctgcgctggcctgtcgcgaccgcaggggcgttcagcacagcgccctcccagcccgtcttctcccgctgcgtcacagcgccacgccggcccgcctccacacagcgcgaactaacatcacgacccgccggccccgcccacggcgtacttgtcccgcttgtcactcagagaagtacctcagtgcagcgcgggcccggctttcatctgctacgtcacagcgctgcctcagcccgcctcctcccgcttatgtcacagcgccgtttccgtcctccatctacactgcagggacctaactaacgaacgactccgctagcccgttccaaaccggccactctccaaaaaccattaattggggaatgtggccgggcgcgtggttcacgtctgtgatcccagctctttgggagtccgagccgggaggaccgcttgaggccaggaattggagaccagcctggggatcatagggaaaccccttctgtaccaaaaaatttaaaaacttttttgtgcctgtagtccttgctactcgggaggctgacgtgggacggtcgcttgagcctgggcagtcgaggctgcagtgagcggtgttcgtgtcactgcactccagtctgtgtgacagagcgagaccctatttctttctttttttattttttgagacggagtttcgctcttgtcacccaggctggagttcagtgacgccatctctgctcactgcaacctgggcctcctaggttcaagcgattctcctgcctcagcctcccgagtagctgggattacaggcgcccgccaccacgcccagctaatttttgtatttttagtagagacagggtttcaccatgttggccaggctggtcttgaactcctaacctcaggtaatccaccaaccttggcctcccaaagtgctgggattacaggcgtgagccactgcacctggccacgggactctatttctaaaaattattttaaatttttaaaaaagatttattgaaggctgggtgcagtggctcacacctgtaatgccagcactttgggagtccgaggcaggcagatcacctgaggccaggagtttgggactagcctggccaaaatggtgaaactctgtctctactaaaaatacaaaatcagctgggtgtggtcgtgggcccctgtaattccagctactggggtggctgaggcaggaggatcacttgaacctgggaggtggaggttgcagtgagccgagatcaagccacggcactccagcctagacgacagaatgagactccgtctcaaaaaaaaaaaaaaaaagtattgaatgtgaactgcaggagagcaagaaaaaaagtaaaactttaaaaaatacaacttcagaaaaatgtgttggggctgggcaccatggctcatgcctgcagtcccagcacttttggaggccaaggcggatggatcacttgccccggagttggagaccagcctgggcaacatggcaaagccttgtctctattttttttaaatactaataataaaacagtttgttggacaagggattgtaacctggaatacatgtgctatgtcataccataggtgctgcattgggggaggtgggcaaggagaagctttttaggcaaaaaaaggggaagttcactgtcagaggcaaaattatgtcatatgtattcataggtctcgctggcttttattcgtgattcatgaattgaggcagccttcattctacaaaatagaataaaagcccctgcctgaattagccaggtgtggtggcgggcacctgtagtcccagctacgcaggaggctgaggcaggagaatggcgtggacccgggaggtggagcttgcagtgagctgagatgcgccactgcactccagcttgggcgacagagcgcgaccatctcaaaaaaaaaaaaaaaaaaaaaaaaagcccctgcctgggcgatagcagaaccatgggttttgtaaggtgaggagaacgaggaaacaagatagaaaaataacagattgataaccttagcttacttcaggttactcttttgtaagggttagagagaagaagggacttccttattatgccaactgaggaaaaactaatctgttttgggatttagtttcttatgtagtatttaacataagtgatttaattttggtttggcctggtctattgggacctagtgcaagagctcagtccaaaacaatggcctcccatgattttttaaaaacaatttttacccattttgatcaggctctcacctagcttgaccaaaacttaaaagtgcctctctcagttactatcagtttgggtttctggtctcaacatgtcattgataggttacagtgtcttcatgatcatgcttttcttttctttctttctttttttttttgagacggagtctcgccctgtcgcccagtgcaatagcacaatctcagctcactgcgacctccacctcctgggttcaaacaattctcctgcctcagcctcctgagtagctgggattacaggtgcccaccaccatgcccagctaatttttgtatttttagtagagatggagtttcaccatattggccaggctggtctcaaacttctgaccacatgatccgcccgccttggcctcccaaagtgctgggattgcaggcgtgagccaccatgcctggccatgatcatgcatttctttgagtttgtgtcattccagctgaagagggaccatttgatgttcaatggatggtcacatgcaaacatttaaaacatttgaaaggatacaacacaccagggagactactattgtgactgtcaggaggataataccaagggtttggagtatgttccttagccagagtccctgtgaacccaaccaacgaaaactgaatagatcaaacaataagccagatggggagtctacccattttaaccaagtagcctgtttgttaattttttgcagctgagtctacaatacctgatgtatttacccatgtgcaacaagatgtgtcagaaaccacacagaccccttcctgttcagctagtaggtaatctatgtaaaattaaggcagggagtgagaagaagtgggtctggtttgctttgatgccaaacagttgcatcagggatgttgccaaacttacccactaagtaaactaaaggatctgttgggtcataaagatgagagtctggcctgacagacccgatatatttatcaggtaacccacagaagctactggtgtgaaattctaactacagcattagcctgccaagtgaaagagataggcatgagcaaggaaaaattgagaggggcaagaggctagtcttctttggatatctggggaaaagcttcacaatgtaaaatggtcaacttctggtcctgatttgtaatatgactgtctctgattatgacaacagatggtttggtgaactctgtatggtccacacgttggcatgagacttgtcccttgatgcttacatcaagttgtccagcttagtagctttgttcttaaggtggagagttgtcaacatatgttggaggaaacaagaagaattcagggtccagtccattctgcaggtagataataaaaactctagaacaacaaacaaggctacaatctaagaacaagtgtactataatgttctttcttctgaaacatacattttctctttacagttgcccctcatttctaccagagataatcagagtaagactaatttgtttgcaaaatgtttagcctcatcaaacttgccctgcttatttaggtaagttcagtgagaatagcatcaaccacataggctcttttaagtttgcttgggtggaactttagatcaggaatctcaaaatgaacttttaaaaatctttcgatgctaggaagccagtgtagatagaatgcgtctgtaagtactgcaggcaaagtctgtatctacagtctcaatttcgatatcccagtcataatataaccaatatttccaattgtgtcctgttataaagagggcagattctcctcctccttcttcctcttctttcttcctcttcttctgtcagggcctcactctgttgcccaggctggagcacagtggtgcaataatagctccctacagcctcaaccttctagcctcaagtgatcttccctccatctcagcctcccaaagtgctgggattaatccctcacttttgggaggctgagatgcccagccaagagcagattctattgagcatatacaaataattattttgtcataaaaataagaatcctcatgagtagtttctaaattctggaaggatcaggtagggagaaaaaagcaatgtctccatttttgttcacaaaggtatgttaccaaattgccttaagctatagatagcctaaaagaaaaggtttccctaaatctgaaaaacgaaagaaccagcaatatttttgaattctaaaaagacatagaaacccataattcatcagtccatttagtcttgtgtgattaatttttgtcctgcttgatgttgggttagcaatttggtgagtctagcttttcccttagagttctagaaattcttacccagcccagtggtatgatcttaaaatgatcagaaatctgtacttgtcagagtcttttccatctgtggtgtcctgatatagagatgttgtccacagttcctagctcatagttcccagaaccattgttacaaagcatgttgggtgctttgggtctcaggagacagaatatttctgaccttctctttcacttgcccaaggcaggactctaatctgattgtggatcaaaagaccctcattccagaaagggtccttcgccatactctggaggaaggacgtggacaggtcctgctaggtttagatcagactttatttttatccaatcgtgtttgacacagttgtccatgcttctatcatggacaaccaataaagtatagaaggcccacaggacaggatttggggggcatccagagagctgaacatgtggaggctgagagaaaggtgaagaagaactcatccacaggctgggagggtgttgcaccccaactccatgaggacagaagctcctgcgcttaggacccttccagacttcgccctatgcgtctcttcatctggctgttgatttgtatccttaaaaatacccttcttaataaaccagcaaacataagtattatcttcacccaactgccgccgcactgccatcatggacaccagccacatgcagcctatcaagctggtcagggtcaccaagcttctgggcagaatgggctctaaaggacagtggtcgcaggtgtgcatggaatttatggaggatgcgagccgctccatcatccacaatgtaaaaggccccgtgtgcgagggcgatgtgctcaycctgttgcagtcagagccagaggtcgggaggttgcgctgagcttggctgctggctgggtcttggatgttgggttcgaccacttgaccagtgggaatggtgtgctgcgttctcctttattttattcttggcctgccacgcaggaattgagatgtgtctttaaataaagcatttgtgtttcaagttaaaaaaaaattggctgggcacggtggctcaagcctgtaatcccagaactttgggaggccaaggcaggcagatcacctcaggtcaggcgttcaagaccagcctggccaacatggcaaaacctcgtctctactaaaaatacaaaagctagctgggcatggtggcgggcgcctgtgatcccagctactcaggaggctgaagcaggagaaatgcttgaacccgggaggcggaggttgcagtgagctgagatcatgccactgtactccagcccgggcaatggagcaagactgtctcaaaacaaaaacaaaaacaaaaaacaaaacaaaacaagaaaacacgtttccctgagttccgtgagccactctagcaaattaataaaacccaaagagagggttgtggcacccccaacttgaagccagttggtcagacgttcccaagacctggacttgcaactggtgtctgggagtgtcaggggcagtcttggggactgagccccgagcctgtggaatctgacactgtctccaggtagatagtgttagaattgagttggaggacacctcgctggtgtccactgcctggtgtgtggggaaaaaccctacacctttcgtcacagaagtcttctgtgttgattgtcatggcagtgtgagaacaaaggaaaaaacccaatttgagagaatttttcccaaagcaccaaggtttccatgcatctccttgaagacacaaccactttaggattatagttgcttgcaaaacacttttagaaaagcatgagtataaactaattaactgtgaacaaccacactttaaatggccatgggtaaagatctggtgagagtgcctaataataatgtctcagttgacaaggaaatttaattatttctgtggcatacaatgatttaacaaaataaccaaaatcatggctaacataccagagttttacgaattttatacaatttatgaaacacatattaataacatgtccacacaaaaataattcaaagatggcttagcatcagttatttgacaatgcttcccatatagttttgttttgttttgagacagagtctggctctgacacccagtgccacccaatctgtactctgggtgacagagtacagtggtgcgatcttggctcactgcaacctccacctcccgtgctcaagcgatcctcccacctcagtagctgggaccacaggtgcgtgccacaatgcctggctaattttttgttttttggtagagatggggtttcaccatgttgcctaggctggtcttgaactcctgagctcaagagatccatccactgtggcctctcaaagtgctggaattacaggtgcaagccactgtgcctgacccccatataatttaacatgccaaatgaaaataattggtttgatatatctcttttggatgttccagaggccttctggaatatcccaaaattagcttgactcaaaacttaatttagaattggattttgggaaatttgtcaaaatataaaaaggtttaaaacacttgattaaaataggatctcaggtcactgtggaataacaatcattgatttaaccagagtaataattaaaatacttcaaaaggcaaatatacattacagagttgtcaacaaaaacttaggtattttaacattgtgaagactcacttaaataatcaaagacccaggctgggcatggtggtgcacacctgtaatctcagcagtttgggaggctgaggcaggtggattgcttgagttcacgagtttgagaccagcctgggcaacatggtgaaaccttgtcttgacaaaaaatacaaaaattagccgggcctggtggtgtgcacctgtagtcccagctacttgagaggctgaggtgggaggatggcatgagcccaggtggcagaggttgcagtgagccaagatggtgccactgcactccagcctgggcaatagagccagacgttgtctcaaaaataaataactaaataaaaataaaaaataaagacctaataaaagccaaagcacaaaaaattatcttgatgaaacacaaaatctttttttcctacaccaattgaaaggaaaaagaatccttcacattctcagaccaatactccaagaaaactttgtcatcttaacaaagagcaaatactacttttgcaccagtgtactattaatgctaaagctaattttaataaaaccattcaaataaatccattcagtttcagtcaggtttgataacacaaaatttccacaaaccatttataacccctttgttaaacaaaaatgtgttattcatatctttgcttatcaaacacatctttttttccttgcagacagagttgttttctttctagtagtttaatcccatatgttattacaacttttaactgttagaatcttaatttctagaacactagcaagcattgtggtgaacttatatcagcattcaccatttcataatttctggaaacaatatttcatgttactagacctaaatgcacttagcttttctataccatataaaaacacgatgccaaagtgtttaaacttatgcttagtaactaatgtttcagtatgctaacttacttaagacatatttatacccatgtgaagaaagtgtctggataaagtccatctgccaaaccctgagtggcccattaggcaggtcagaatggccaagggctgttcacactggctttccagcattgatttcaaagcaggtctggcaggtcaggtaagccctttttagcaagtccattgacgtggccccaccagtactattcataaaggtgatcctcttttccatagccccatggctcaattcatgcataatacttaacagaaatttcatggagaaaagtacaggtaaaagtaaaaggacaggccttttacttggtccacaccagagttcctctctatcactgaaccatcagcctgtatttttcccgttgtggtttttttggcctctggtgctggataatgttcatctttagtcatggttctaagatcatcctttgaaaatctttccagctggaaaattacaccttatgtcttcataagaggaagagagaccacccccctcaccatatgatgtcccgagccacctcccttaggactctgcagggagtccccaccagcaagaaggccctcaccagatatgcccccttgactttggacttcctagcctccagaactgtgagaaatccgtaggactcttaagggcagcattcttagcaacattctcagcaaggtagtatcctctagcctccacggagtctagtttcaaatggcctggaacctttatcatggccacagcagcaggtatttgtattgcatataataaatcataaggttcattattgaaagtgaggaaacctgtttccacaacattccaaaatcatgagcaactccaaatacttacctgctatctgtgtaatggttagcagatttccccttagcgagaaagcaggctccagtgagggcaaatagctccacctgctgggctcaagtggctgaaggtcaagaggctgctttcccaacctcaaagcaagtgggcgtagcatgacctgcaggatattcaccgcgatcatcctgcaggtatgagctatctgtgaaccgggatagtttcacatagtccaggggagttttctgtaaatcctttcgggaaatcaaaagatgatccactggccgggcgcgttggctcacgcctgtaattccagcacttcgggaggctgaggcgggcgaatcacgaggtcaggagatcgagaccatcctggctaacacggtgaaacccagtctctactaaaaatacaaaaaagttagccgggcgtggtggtgggcgcctgtgatcccagctgcttggaaggctgaggcaggagaatggcgtgaacctgggaggcggagctttcagtgagccgagatcgggccactgcactccagcctgggcgacagagcgagactccgtctcaaaaaaaaaaaaaaaaaaaaaaaagatgatccactaaaatcagacagtggcatctcatcccagagtagagaggaaggagagtggtgggattaagtttattacagcaagagaaagtaatatggggagtggttaacagaagggtctcataaaaggtgaggtggctagaagaaaatgtggcacaaaaatggtccaaggagatcccctgacgacttctttggtggatttgacccacagggtggtggcagggatagccctcagacaaggagatctgcaagctcccaggtcccactgttcactgtagtatcatatgggaatatgctgattttcatgcttttaaaaaattttcaatttaaattttcttcagagacagggtctcactctgtcactcaggctggagtgcagtggcgtgatcatagctcactgcagccttcaactcctgggttcaagtcatcctcccaccacagcctcccaagtacatgggactacaggtgtgctactatgcctggctaatatttaatttttttgtggggggggggggtctcgttatgttgctaagcctagtcccagactcctgtcttaagtgatcctcccacctcagccccccagccatggccagctgcgtgcttctcagttaaaactgccagggtgcttccttctttttcatgtacagaaaggaaaaattgggggttgtgtcgcttctcggccttttggctaagatcaagtgaagaagaggagttgccttagtctcctgttgatgtgactgaatacctgagactgggcaatttataaagaaaaagaatttatttctcacagttctggaggctaggaagtccaaagtcaagggggcatatctggtgagggccttcttgctggtggggactccctgcagagtcctaagggaggtggctcgggacatcatatggtgaggggggtggtctctcttcctcttatgaagacagcagtctcactcccaggatagctcagtaatccattaacccatcaatccccaaatccatggatagattaacccattcacaagagcagaacccttatgatctaatcacctcctaaaggcgatacttctcaatactgctgtattgaggattaagtttcaacatgagttttgaaggggacaaacattcaaaccatagcagttgctaattagggtgtcccaaggctggggaatttaataaaattccctgtttagcttgtcaaaagccacatcttctgtgtcttcccaaacaatggggtctggtttactggttttagcagaggcactgagccagaagagaagacctggggatccagcaaacccaagaaatccacaaagctggtgctcagttctagatttatacggaattatagggattatagggaattataaaatgtcttgtatgcagcctgggtctgagtgtggtccacttcctgaaattaggtggcctaaatacttttcctgggtttttaccagttgtaatttttccttagaaacttaatggactttaccagctaggagttttaacaagggtacactgtcttcctcacatgctgcctgtgagggagaacagtggaggtcatccacatattgcagtagagtggacccatgaggaaagtgacatccttcaggttggcctttagaatttggaaagtaagggccaggtgtggtggctcacgcctgtaatcccagcactttgggaggccaaggcgggctaatcacaaggtcaggagatcgagaccatcctggctaacatggtgaaacccagtctgtattaaaaatacaaaaaattagccgggcatagtggcgggcgcctgtagtcccagctactcgggaggctgaggcaggagaatggcatgaacccgggtggcggagcttgcagtgagccgagattgcgccactgcactccagcc

SEQ ID NO: 97481 - DNA, 13230 bp, Homo sapiens
aggagcaatggtgggaaacaccaacgtgcagtgtcagggaaatgggagctccctgaggtggcgtgtggacctgcctcagcaggtgccttttgtttacactagcagtgtcttcccagattggtgatgacaacagtagggacaagtggagcatgcctaacacaacaaccatttctggctatgaactcactgtcatggagtcaatacccatttctatccaaatctcgttacagccatcgtgacaaaattatatatctgtaatatatacctatgtaaaatgcatgttacagatcttgggtcctggctacataagcctagcgagtcatatcctttggggctgcatattcagcaactgataggagaggagttggaccagtttttttttttctctgaaacagggtcttgctctgccgcccaggctgcagtgcagtggtgcaatcacagctcactgcagccttgacctcccaggctcaagcagtctcccccgacctcagctgggatcacaggtgcgtgacaccatgcccagctaattaaattttttttttggccaggctggtctggaactcctggcttcaagtgatcctcccactttagcctcccaaagtgctgggatttaggcgtgagccattgagcccaactcagtgttaagaacactttttgccctaacattttgagtctaggagaactatataactcaaaagacagtaggtccaagtgtcacagcccctgataaaatttcagaagagctagtgtggtagagttctttataatacaactttataataaccaaagtgtccatagttctgggctaaattttaaggaaaacctcacatatatggtatagtatgttcttaaagccacatctactctgttgtaatcacacatgaaggtttagaaaatgaatttctatgatgtttatattatagaattaccattttcagaagagaaaaactgcagttcataggaaattaagtcttgacatttatttttatttttagcgtgggtgtcttgctatattgccctggcttgcctcaaactcctgggctcaagcaatcctcctgccttagccttttaagtcttgataacattttattgtttgggaggaggggtgaaaccagattcctcaggcacaagccctttttaggcttttctgttccttcatattattctcagacataaggataaacaggtgaagtgttttttttgagacagagtctcgctctgttgcccaggctagagtgcaatggcgtgatctcagctcactgcaacctccgcctcccaggttcaagcgattctcctgcctcagcctcccgagtagctgggattacaggtgctggccaccatgcccagcttttttttatttctttctgagatggagttttgctcttgttgcccaggctggagtgcaatggcacaatctcggtcggctcactcccgggttcaagcgattctcctgcctcagcctcctgagtagctggaattacaggcatgcgccaccacagccggataattttgtatttttaggagagagggggtttctccatgttggtcaggctggtctcgaactcctaacctcaggtgatctgcctgccttggcctcccaaagtgctgggattacaggcgtgagccaccacacctggcctaatttttgtattttttagtagagacagtttcaccatgttggtcaggctagtctccactcctgacctcaggtgatccacccgcctcggcctcccaaattgctgggattacaggcgtgagccactgcacctggctgcagatgagttttaaaacggtttacttcctttctggaaactctgcccagtaatttgatatattttgtctgaagatactctaggagtttttcagacttcagtgaattttatttggggaagggtcatgaaatcaaatgcagaaaatcaactcactgaggtaaccagcataaaaaaaaatgaagtagaaaacatgagtgcatagtttcaagtaaatgttagcgtgcgtgtgctgtgttgctatagaaaatgtaagctgtcaaaagtttgaaaaaatacaattctaaggtgagtttctgcagataaactttaaacatgactaaagtagagcacatactccaactgaaccacatggaggaaagcagtggtttgaaactaaagatacatcaggtcacaacatctcaaatatttaagggtcatcaccaacacctgacaaacgactgttgccactgcaagttgtatagcacgtataacctaccatgcatgaaacttgacaacttacttgaacttctacccactaagcagtaaccaacattatgtatgaaacaaaatgtacatttctcagtctctccattgtctagaaaaactgttaaaactgctgactacttttgttactgaatgtaatcgtgttagaaaaatagtcttgatgaagacttctccatgcagtcaatctttattatagcagtattcgcatattcacatcaagtacatagaactttttttgccttttatataatacagtttttaaataactttacacagaaataaatttcttcaatctgaatttcagctatctttttttattctccatgctttctatccaaactgaacaatattttctgttatacaaatttacatgagaaaaactccaaagtacaaatgaagggacctgagcaggaaagagaaccaaagtatcaggaagtgggtatgggggagaattaaaaaaaataataaaagattcaagcaaacattgagaataggggaaaagagggagacatcatccatttgactgaaaataaatgtcttttttatgaattgaaaaataagctttaaaaatagttactccattgtaatttttgcaaagcaggtatagagaggtctgtggacaattaaaaagtccccatcttttcactgggcacgccccagactccacgagaaccttttcaatgcttgagtggaactgaagtgtactaaacccgaacctttggcagtaacagaaaagaggaatgtgtgtgtgagtcgccataaggtttggagtggtgaaacaggaaccgtgaattcactgcagttcaaacaggaagcatctccctttcctctcccttacaggagtcatgtcctcaaaccaaggaatacatgaaaaggggggatttcctttttcttggtctaaaccaaagagcaatgacaactactgaataaaattcagagacacatgttgatgaatgatcaaattcaatcccctgatcagttgtatgatcctatcttaggaaaggcagcaattgccatgttgaggaaaggatcagatgtacaaccaacaaatgagattaccacaaatacatatcactgtgatacagtcctcaaaaatcaggcgatatcatgaaggccaaactgagtctatatatgtggcatggccaaaggaaacacggaggacccatggatgcattttaaaatgaaggcaggagaaggggacagcacagagacatacacccctgtatgtaaactaacataacatgaagataaataagacataaaggctagccacttacgttggtcattaacatgaataaaaaggcattatatgttgatatagctggttttaatcagctatggaacatacacaaatgtattaggaaggaatgattcttaaaaaaaccgttcacagcttagaataaaaagcatacttattgcactcttacatttgatttcaggtaattacagtttatttcccaccctcacattaatttttccctatcctagatttactgccacctcaccccattttggtctctgttctctacatctgtgcctactctgtgagctttgttgtttatgctagtttgcagtgacttccaactcatactccaccaaaacacacgtgggttcaaaaacttaacacaaaaatgcaacgcagtaattttcaaaacaaaaccaggactaagcaacttcatcaaaacccccaatcccacccgtcaacagacccttcctttgcggcatctcttcacaaattttctgccaactctcccgcatatgtgctgtacatgagaaccagcggtcacggtgctggagaatgaactcggctggccgggagaagcagatggtttgtacaaacattttttgatactaccatgaataaacatattttagttgttttcagagcacttctatctacagaattctttaaaaaaaaatgcacctctaaaaaatggatacactggcttacattggctgtgtcctcatacacactcgtcaagtcactataattattcaaaatagctaaataaatgtcaacattttaataaagctgatttagtaattaataaaacttaacagttgaagttgtggatgttaaataaaagtactttagtcactcattgagttgccgactaattgccccatgcattttttttttttaaagcactgttaccttaatttaagattttaggagttgggtttctgtccttttccacattaaaaatacctgataggaactgttaattaccctttccacaattaacaaaaattagaattgaatttcaatttaaatgtctttgcccaaacaaaagtgaaaataggttatttgaaaacaacaaaacagagcttactgtctagtgtactaataaaacaaacatcttaccagtatttttaattttaccagagctagcaacatggaccacagatatactggtgactccgctctcctctggccaagctacaaatcatcacctgaggcagagatgctactaccctcttctggggctcaactaccgatgggcatcagtaatccatcccagtataacatttcaaggatgtgctggagacaatacatggactttctctttcaatggtgaggaatgaaacaagatacaagaaccacagcatggaatatgttttcttttacatccaatggccaggtcataaaggatgccttgagacctccaccctggcccccacagcgctttgggacaggatgactaacgcagtccagcttcatgtgcaatcaagtcccgggaagaaatttacatttcaaactctgaaaaatcagtgtctaggttggcagcagtactctggaaactgataaaaccaaattcggtcctatatttcaatttccccttctaagttaatacatgattgctgcccatcatacagtacttcaaccctaaactacagcaatttctgtcaacatttctgttgtataaaagttccatgctttgaagagcctatgggagtagaaaaagtttctctagaaatgtcactgaactatatttgcaacctagttgctctatgtgataaatatatctgactatactagggattatgtgctttaaaaaaataattttgttcactgaaaatttacctgtgtgttttctcattgttaaatgtgattttggctataaactctttagtgcatttacctatgcagtctaaattgcactctaaaaattattaacacagctgagttaaaccagagtggctgctctcttcacaaatcactgatttctgctaaaatgttagcttttttattgcatcatgaaggcacagtaagatcatttggcaaattgtcaaggtatttttctagagcctcacctacaccatttcaactcatgacctgtaagctatttgctgttcatactcacagtaaaccttccatctctggctatggtgtttatagcctaatggttggaatctgctcgtctcaaggtgctggtattcctagcactaacaatgccaacttggacaaagaagagaatcttgcaaaaagagtaatcattctaccctcttagctgggtggtctttctatgaatgcctgtgcatgtgacaaagctgcagcaaactcattatgaggatgtactgtcatgccaagcctactgaaaattaaaattacatcactgttagtgaagtgataccacagctatttaatttcatgcaattgactcaaggttaagattctgaaacgtacccctaaaccggttctggcaccactttcaacaacattcagatattccgagcaacacatttttttacagtattactgcttaaatgtataatgccctttaggacaaaatgagagtgctcaaatacaagtacacaaaaaagttaaaatcttaaatcatcgtcatgttctagagctcctgacttttcatattttaaaataaataactattcattacctcattctgaagaggtagttttttgtagaggtcacctgaaccctgcaatgtggtttcgaactaaagctagagatgaggtttgcaagcagctggcgggtggatgtacagtggggacaggtgagatctgaggaggatgtgcagcagctcgcactccgcctggtsaatacaaggtaacatcctgtgatgaaagtgctgtcaccgcaccaaaccagaagctaggaaatatttacaaagtttcaggttgacagtgctgcagtcttgaattatttctttatatactgctctttcttctccaacaccaacataaatatagcatatatcatttgtatgggattttatcttctaaaatgccccagtatgccctactagatctcaaatacaatcaggggtgagatattcgggaaccagaatttgacagctagacagaatcttcttttaaggtgcacattaacaacaaatgatcacactgaattttctattcacaaatcccttttataaactatttttttggtcaatattatttcagtggcaaaagtctaggtccttgactctaacgatgaaaaaagtccatcaggaatactacacagttacaaacaatcctctgtagttgctctcaaatttttcagaaggcttcacctctccctaccaaaaataaaacacactacagaaggcactgcagccactttacagacaagactgttrcacccttacaagatgatcagtgacgcagccacatactgtctatacaattactcataaagtgcttttcacaaataaggacttcttcctcgtttttttaggagctcagtaagtctaactgttgtctaagcatcaaaaaataaagcagataaaacacaaataaaacctattttcatgtcatttgtaaactagagaaaaaacctatttcatagaaaaaggaagaaaagagaggtttaaatattttattttttaaggtatctataaaaatctcaatatgctaagcctggctcctgggcacagcttcatttgagatcaagtctgctcccccgttcaaatgagataccagcctattctaaaatgcaagggaagaaaaagtgtatcaccctgaatattgtttaagaaactgaaatgctaagcttcctccctaatggtaccgcccctgcccctgccccacggaggcagtcccggacccaggctgcacatgttctacctcctcagcaggacatgaaacacatcctcttgttcaagcccaggtctctctacctgcggaaacttgaagccaatcttggtaaagggaacacagccacatttaaaagcatctagagatatatttaaaaagaaaaaacagccaatgcttttcaagagaggcagtattattgcacagaagatgttcttcaaatcagcgtgaattatttccacctttgcaatttctgaattttgtaagacactgccctgctgatgtaaaacttaaaaacaaatttgcttttcaaactgattaataacttaaggatcttttccattttactaggacaaccttttacaagacaatgaaaatttcaataggctttcttctgaatacatgtatgttagcaaaaatctaatggtagtgagcttttagtggctgcaatatagacagcagggcctggagttacaatctgaaatttttaaataacaatttctaattccttgatttattctgggtcttgtttaatttctttcaagtccttggctatagcttggttggtctgatttgatttgtgttcctaaattctgagtctagattcctgataagggaggttttccattaatttgccattaatacatccgctttctttgctatgactgtgattgatattaccctttaataaaggccaaaggaagctataactaggttatattttccatttgtgcaaagataagatttaggttcttaatgaatgccagttctttctataaaaacaactgatgacagctttcccacaccctccctcagtcctaatatccctaaaattgctctattctctgtctgggaattcagctgccaaattgcccaaccttttgaagaccaggcttgggaaaaaaggaagaaggagaatgaatggagacgccaccatttttattttaggttgcatattctagataaaagactagaaagaagatgtgggatatagtgttaggaatcagttggaagaaacaatgagattattagcaaagatgttagtgtggatccagcaagtaccattaattgaaaaattataaatatttgtcattatgctaagactcctcatatttaggtagagaaaaggataatgatctttcttaaaagttgtttatataacaaaaatacaattttcaggatatataattctggtgggaagtattgtttttttccaattcaattaaatctgaaaattattttctttttaataaaaatagaaaagaagaaactcagaaattaaaacctgtaccttatatttaaattatctaaatttctcacattcaaaactgttattaagcagttttgtgggggtttagttagatactgccacggcattttgtgccctggacaaagtagccgcataagtagttggtgactggaagagcataggaggaagatataaactgtatttcctgagaatttgctacattgtggaggaaaaaaaaaaaacccaaacacttatcttcattgctggacccaatgagaaagaaggcaatgtgtgccagcactatctagcctgcttggttagacagacccctcagtgagcaaggaaacaaaaggccagagaccccggaggtcaggaagaagatgcagcatgcccttttcctccataccaagacacatctactcaccactcagcctccatttaaataaaatagtttccttttgataaaatctgtcaaggcctgaacacgcaccacatagaaagggcaagctgcatttttgttccatccctcagaaactaactggtggtcactaggggaaagagctccaaaacaaaattccagaacaggaaagagaacgatgcttggtgattgaaactgccccatcagatgatcagccacaaattgatctggtggttagaagggcaaagttgactggcagactttccatagcaaatctcccaagctgtagcagcagtttctttccatcatgcctgaccatcaaaaggtcagaattcagggtctctcctctttcttcctgggactgggcagacttgtatgctcgtggtatttttgttgaagaaacactggcagcagagaattctggttcctaaaacattctttcctcttttgttggatgggaaattccattctgttccacatcagcttatgcattggaaattttgtatctttaaaaaaagatttgaggaacagaactgtgttttgatgttaacaaattgtacgaacacaagacttaagaaataagagcagatgctgccatgatggtggctacttgaaggctgcaaattctcctgtagagggaggacaagagctaattttaaaaaagtcatctcaaataacctagagacacagaaaagcctcatttgagcttcactgaaaagtaactagttatatatttcaagtctagcaacagcattgctaatttaaaagcaaaaacggctgaaacccatggaagaacacaacatatatagtatacagaatatggttcagctctatcaattaaatagcaagtctgcagaattttccagttgggttttatgtatcatggttctgatcaagctgaaaacagttccaatgaacaaaatttctcagaaactgaatgtaaagtagtaatgtcaatttgtagaatacttccacctctgaattatcaactcattttcacctatcatattattataatgccactattaggaagagagaggcagtagttatcctcattttgctaaagatacaattaagaggtcaactgatttgttcacaccacacgtttgacagagaaagaaaatccagactgcctattttctagttaatttcaccttcaatctaacaaaaaattaaatataggcacatcactgaacataattatcagcataaagaattctttaaaccacaaagtacctttgtgatatcatgctcctttagcttaatgaatttgggggcttcatgccattatttttttctttttttttttttttgagatggaattttgcttttgttgcccaggctggagtgcaatggtgcaatctcggttcactgcaacctctacctcctgggttcaagtgattctcctgcctcagcctcccaagtagctgggattacaggcatccgccaccaggcctggctaatttttgtatttttagtagagatggggtttcaccatgttggccagactggtctcaaactcctgacctcaggtaatctgcctgcctcggcctcccaaagtgctgggattacaggtgtgagccactgcacccggccgccattatttttcatctaccattttgtccatagtttctacttgtaactaaaggccaattcctgttatacacaccatagttaatttctggggattagttaataactgacaattaacaaaatttagtcagccataccactatttttcttttttttttgagacggagtcttgctctgttacccaggctggagtgcagtggtgcgatctcggctcactgcaagccctgcctcctgggctcatgccattctcctgcctcatcctccccagcagctgggactacaggcacatgaagccacgcccggctaatttttttgtatttttagtagagacagggtttcactgtgttagttaggatggtctctatctcctgacctcatgatccgcccgccttggcctcccaaagtgctgggattacacgcatgagccaccatgcccggccagccatatcactatttttcaatagcagcttctgatgaggatccaagcaatcacttatatgaatatactgtttaatccaggaataacctatctaatttctgattgctatcagattccaactggttgctagataacactggcacatcccaacaacagattgctaatgactggatgattgaatcctcagctttgtaagctgatagtattagtgactgactgagtgcctgatgcctcacggaacagtttgtacacatctgcatccaattctcatgataaccctatgaggcagatgctatcatctatattatatagatgaggaagccagggtttagagtggtcaagtaacttgcctgagatcatatacagaaaattgcagagaaggaatgcaaacccaggtgctgactccaagacccagcagtccctaaacaactttcaacaattaacactttgttttcccaatctgaatacaactactaatgaactgcagatagtctattatctctttctatgcatgaattccttttaacaagcaattaactaaggtattgtgagtccaaagatcaagaaagggtaaaagaattattgcctcatatttaaagttaagaggattggggaatctagcactgatttaaaaaaaaaaaaaggctaaattaaattactaagaccttagagtaaaacatttggagtataatcataggaggctattatggtaacacactccagaaatatacaaacattcttactattgttgcttacagtttgagtacttataattttaaggttgctatttttagtgttttaatgtttctttaaaatgacttgcaacattcttatgagtaatcatgtatctagccaaatcaaatctcattaaaggaagtcaatgtaaaaataagatttatagaaaagaaatctttatgaaaatgcctagaattaatctattaaataaaaaaatcagaaaatgctaatatctaagccaaatgttaatatactacattaaaaaatacttaaaaaaatcttcagctaaggttgggcacagtggttcacgcctataatcccagcacttcaggaggccgaggcaggaggactgcttgagcccaggagtttgagaccaggtagggcaacatagtgagacgctgtctctccaaaaaaaaaaaaaaaaaaaaatcagttggatgtggtggcacatgcatgtagtcctagctacctagaggaggctgaagtgggaggatcacttgagaccagcaggttgaggctgcagtgagccaggattgtaccactgcactccagcctgagtaacgaaaccctgtctcgaaaacaaaacaaaatacacacacacacgcacacaacttcagatgtttcctgttcattataatgattagaaatttcattttgttgaagtgtcatactccacaaacttaaatattagtcttaaaaataaaaaccaggccggcgaggtggctcatgcctgtaatcccagcactttgggaggcggaggagggtggatcatctgaggccaggagttcaagaccagcctggccaacatggcgaaactctctctctactaaaaatacaaaaattagggccaggtgcagtggctcaagcctgtaatcccagcactttgggaggctgaggtgagcagatcacctgagctcagcagttcgagaccagcctggccaacatggtgaaactgtttctactgggaaaaaaaaaaaattacgtgtggtgccacatacctgtaattccagctactcaggaggctgaggcaggagaatcacttgaacccgggaggcagaggctgcagttagctgagctcacaccactgcactccagcctgggcaacagaatgagactctgtctcaaaaacaaaaaaattaccagggtgtggtggtactgcaccactgcattccagactgaatgacagagcaagactctgtctccaaaaaaatttaaaaccaaacaaccgcacaaagaacaaatttttaccaacaaactccaaatcaaatacaaagcaaacactatcactctatcaaaagtctagtgcttctaacagaatgcagtcctttttatagtcatacttggtgttgaggggaaaaaaataaaagaatccatagttcaggaatcaataaaataagactcttaaaatgtccctaaaacatggagaatttaaggaaaacatgggagtaacaggtgatgaatctgctttcacaaaaagtatcttttc

SEQ ID NO: 97482 - DNA, 12891 bp, Homo sapiens
ctagcctttagccctgtccccactcacgtggcttctcagcgggctgcatggaatgtctggtagctcaccacacttctggcttccatttgtcttcactcaacgtcagggtgggggagtggtgctggccaatcacaggagagagcgtgagttcccagtatttattcctggctgcccttggctaaaggtcacagctcctgtcaccctgtcaggcagccctttccatgcccctgttcaggcctggggaggtaaaggctcaggctgttagtagccgcagagagccacactcaccttgtcaggagactcttctcaaactgtccttatgtgagtgcactgccatttcttgcagggaccctgactgacacaggggctactactgacactttacagggatggttctcccccgtgcagggccgctgtgcccactgcaggacatgcagcatccttcgccccactccactcactaaaggccagcgcaccccaggccccatagtattgctggttatggatttattgactttatgttccaaattcagctttttcagttggctgttttttgaaaggggataagctttgtcagtagagggcaccaaacaggcattataggaggaaaggcgcctccttcgtggttcttgttggttgtgcttctgcctctggacgccgcagtgcatgtggcttccccagcacccagctcctgaagcaccaggcggtcagcagctgcccttggcaccctccagccctcagaagttgcgtaggagacacagcgcctccactgaggcacctctctgggaataacgttccccagcaccccaaatggatttccagtcaattcagaagcattttaccagtgaagccctcattattccagttcactgttaaagccagtaattctctatattaaactttccctgttcaagttactctgtggtttttctctcctgactgcatcctgatggatatagagttgatacctggagtgtcccaggagatgactcttaagataggattccaggattggtttggttgtgcctttgggcttgggcgccgcgctgagctcttgctgatgggaaacaggatgccagaggcccatggcatgcaatggcatcataatcccacaagtgcctgtggttgacggagatgagggaccaactgaagcacgtgccttgggaccccctgtggctgctgtgctcaacagctgtgctagttgtgccaattctgaagaccagggtattggatggattctccagagtgcccttgagtgcccacagacagtgacaagcttgggtccgctaactcagctcaagtcacagtctgagaactagacagctttcatgacagcccccagattttttgtttgtttgtttttgagacagtcttgctatgtcacccaggctggagtgcagtagtgcgatctctcggctcactgcaacctccacctcccgggttcaagcgattttcctgccttagcttaccgagtagctgggattacaggcgtgtaccaccacgccaggcgaatttttgtgtttttagtagatacagggttttgccatgttggccatgctggtctcaaactcctggcctcaggtgatccacccacctcagcctcccaaagtgctgggattacaggtgtgagccaccatgcccggcccaaaagtttttacttctttggaatggggtcatctaattggacccagagtaaacaggcgatcttgaacccccaagtcactccaagcgagtgacttatcagcatctgaggaacctaccagccttcctgtgcttagaaaccttgtgatgtggccaggcacggtggctcacgcctgtaatcccagcactttgggaggccaaggcaggcggatcatgaggtcaggagttcaaaaccagcctggccaacatagtaaaaccccatctctactaaaaatgcaaaaaattagccaggcgtggtggcgagcacctgtaatcctagttactcggaaggctgaaccctcccgagtaggaggatctcttgaacccaggaggcggagaggttgcagtgagccgagattgcaccactgcacaccagccttggcgacagtgcaagactccatctcaaaaaaaaaaacagaggccgggtgcagtgcctcatgcctgtaatcccagcactttgggaggccgaggcgggtggatcacaaggtcaggagatgaagaccatcctgcctaagtactctactttagtagaaatagtgaaaccctgtctctactaaaaatacaaaaacattagccgggcatggtggcgggcgtctgtagtcccagctacttgagaggctgaggcaggagaatggcgtgaacctgggaggtgaggcttgcagtgagcggagatcatgccactgcactccaacctgggtgacagagtgagactccgtctcaaaaaaaaaaaaaagaaaccttgtgatgacctcaccaggggcagacaccttgaaagtggtcgtcctttttttttttttttttttttgattagcggtaagatctcactatgttgcccaggctggtcttgaactcctggaaagtgatccttccctcttggcctcccagagtattgggattacaggggtgagccactgtcccaccacagttttttttttcttatggccagctcttatacagaaataacagatacaccccattcttcttaagactcaccacagcgccccttgctgcctctagacccataaatacctagggtgaaatcagcttgctccaggtgaacaggtgccagctaggacctaggcgggagcagcttttacactataagaatgacaaggcttcgcaaatatacagagtcagaaacttggggaatgtgtgcagaaggggattttaaggatgttacaccaatgagggtggatgtaacactagctcaggccaaatttactggcatgagtgcgctttctagagcttctggatttcatgggttaccttgtgcagctggacgtagttctaatagcttgcttgggtgcctaaccggaacttggatccaacagtggcctaaagttaatgaggcagagagaccagaactgccctagcataagatgggtgaggggagtcccaaggcttggggagacagaagtgttggattggaatgatcgtgttccaccagcatgtccaccctccaaccatgttccccaagaaggcaccccttagtggccaatcccatgagagttaatcattctgtatattgaactttccctattcccattcctgtgtggtttctctctcctgattggacccggactgaggcacatggcaaaggcaaaaagaaaggcaccttgtgaagcttcctaatgcttccaggaggagcagcaccccctgcccccagaagctagatgagctcagggggcctggagtccctctcccccagccccagagtggagtgggcttgcagactccctcaggaggtgctcgggcccctgcccccagcccctagctgtcatttcccactccaactattattccattaatattcaccacttcctccccactctcttcctccagctgttcccacaggctccattattcaaactttgggggaggaaatcagggctggacagatcatcaactgctgctgctgacagactgtgttcctgccatgatggggacaggcctgccccaaaccagggtggagtgaaggggtcagcccaggcttagtgggagccccttagtcttaccccatgtcttgggaggtcttcagagagctgatgcagtcccaacagcaggggcccctggagggcagggatgcaaacacaggcagacaccccctcctgccccaaggggctggatgtgagtgttcctggagtcacagtgccgctgggggaggggaggggcccggggtgaggctggctccaggccggaggttgggggtaaggtaggaacagattcccacgctgctgggcaggcagcccgggtgccgagagggatggaggaggtacaggggatcagcttagctcccggggttccccgtgggccccaccccgtcaccctctattgcccttgaagctccagtcttttcctctcctgttcttccccttggctccctctccgcctctgcctgggtctggctcggaagcctgagtccctcccctctgccctccacctgcctctctcaacctctctttccccatgagcaccccacagggcttccgcaaccccttatctttctcgccatctccatttccctccccctctccctcctggccaccttcccacttgcccgtcttctctctctctccccctcagctctctccatcgcctgtctcaccccagttctcctctctctgctccctggccgtctcttccctctccacaatgtctctgtctctccttctcaccagccccgttccccccacctcaccctgactgggcagcaacaacaaacatccctctggcaggcccgccgatcccttcccactcagcacattcactgccgcctcctggccatgggtgcagccgggcgccagcctctcagcctccccatctctgcctcagtgggaccctgcctcgccctggtcactctaacactccccagcccaggcccagccttcagccccaccctccctggcaccccctggccctggttctcccctcccaggcctcacaaagcccccgtcttgtttctgtggctgccccctgcacccttcccagctgtctcaccagaaaccagccctaacacgccagagccccatctctcaggtcggcctcctgccctcctccctccctccctccctccctctctcctgcctcagccccgccccggcccctggggccctccctgctcccgctccactcccctccccgcccctctggactggctgggcagggctgggccccgccggtcgacaacacaggggctggggcaggcagatcagagggagctgagggaggcctgacctgaggccggcacccggagctggcgggagccagacccagaggtaaaaaagcatgggatccctggttccccagtccctggggttggggtgttgcgggaggcaggctgggtttctaaccccagggagctaggaatcccgctcctgatttcctggtgagggcaataaatggagggagagggaggagatagacggcaaggtcccttgtcctggatggagacagggaagaggtagacccttgggcttttaggaaggtggaagcatttggacggagtgggaagaacagggtgctggtacgggattggaatgggggactcctaggtctaggaataaggaccaacgaggtccctgggtcaggggagctgtttaggatctgggaccgagagaatctgttatgggggttggcggggactatgggagattgtgaagctgtctgcctggggcctggctgggccctctctggaggcccatccccacaccccaatggcctccgtggctcccctgtggctcccttgtagctcccgcggccgccccttccctgggccgggtcatgcgctgccccaagtgccttctctgcctgtcagcactgctcacactcctgggcctcaaagtgtacatcgaatggacatccgagtcccggctcagcaaggcctaccccagccctcggggcaccccgccaagccccacgccagccaaccctgagcccaccctacctgccaacctctccacccgcctgggccagactatcccgctgccctttgcttactggaaccagcagcagtggcggctggggtccctgcccagtggggacagcactgaaacggggggctgccaggcttggggggccgccgccgccaccgagatccctgacttcgcctcctaccccaaggacctccgccgcttcttgctgtcagcagcctgccggagcttcccacagtggctgcctggaggtggtggcggccaagtctccagctgctcagatactgatgtcccctacctgctgttggccgtcaagtcagaaccagggcgctttgcagaacgacaggccgtgagagagacgtggggcagtccagctccagggatccggctgctcttcctgctagggtctccggtrggtgaggyggggcctgacctagactcactagtggcmtgggagagccgtcgctacagygacctgctgctctgggacttcctcgacgtcccattcaaccagacgctcaaagacctgctgctgctggcctggctgggccgccactgccccaccgtgagttttgtcttgcgagctcaggacgatgcctttgtacacacccctgccctgctggctcacctgcgggccctgccacctgcctcggcccgaagcctctacctgggtgaggtctttacccaggccatgcctctccggaagccaggaggacccttctatgtgcccgagtccttcttcgaaggtggctacccagcctatgcaagcgggggtggctacgtcattgccgggcgcctggcaccctggctgctgcgggcggcagcccgtgtggcacccttcccctttgaggacgtctacactggcctttgcatccgagccctgggcctggtgccccaggcccacccaggcttcctcacagcctggccagcagaccgcactgcggaccactgtgctttccgcaacctgctgctggtacggcccctgggcccccaggccagcattcggctctggaaacaactgcaagacccaaggctccagtgctgactctcattggggagggcggaggtgctgacctggccccggccctggcctgggcctctggggccggcccctggctcagcccctccttccaggtcttgatgggagggaggagggcccagaagctggacaacttaagccactccttggcctcccccagccaggggcctgggcaggaaagatggggtggtggactgtttttgcctactttttgtttttgaaaaacatgcactccccactctgaggcctggggttgtttttgcatctgtggggccctggagtggtggggagcagggcttggccacaccctgaccttcatcctggacgctcccctgcacccctgctgggcagggctagctccactgggctccccatcactctgctggacagcaggcttctcccattctgtgagagagcaggagaccatctctggaggacccccccacccccatcctgtctgctgaagttaaccttccagcttgcgcaagcttccgggggaagtaggtatctcaagagccttgaccttatttatctaaggtggagaagctgggggtggcctcaaatcacccccaaactccaggaaacaaagaccagaggtggtagagagccaggcgcagagatgcagtttattcgtgacctctgctggccactcgcacctgcgcaagttccacaggctgacctgccatgtccaccccatgcccagaggggcttctagtcctgaatgtgccctcacccagcccctgggagaaggcactgtaacaacaggtgaagagggggctgacggagcctcagcaactgctgcagatgctgtcccctgacaatgtaacagccgggaggagcaggggtgaagagtggcagccgccctggccgctgagtattttagagggagctgactggggaagacagtggtgtgctgtcaggtccccctgctccccttagagtggggctacctctcggggtagctgaggatgggtgggggtgggctgagcaggtctcacttatcgaagtgatccagtgggtagtgctccccgtaggtctgcaggtggcgggccagagactcctgctgcttgcggagctgggcgggcatctcctgatacacgtctgagaagagcaggttggggttgggtttgggcttccgctcggcctgctcaaaggcctccatcacctgtggggacatggggcagtgggcaggctagccggcctcccatgcaggaccctgcttcctcctgcggggccttggcaaggaattaaccactccaagcctttgtgttcccacctcgacaatggaaatgattatcctagcagaagtgtaatgaaaaccctcaaatcccagcagggatcaggtgctatccaagtgtgtggaatcatttaaggctttcagcagccctaagaggtagacagctaagcaatgaggaaactgaggcacagagaagggcagggacaggacacacggtgctgccctatgccgggtgctgccctcaccactgggctgcacgggccctgggtcctaatgaccgggtcagggagggtggcacactgactctgggcagggcatgtacactccaccacggtttgccacctaatcctcaaacgagcttttttttttttttaagagatagtcttgctctgttgcccaggctggagtgcagtggcgccatctccaatcactgcaagttccacctcccgggttcaagcgattcttctgcctcaccttcctgagtagctgggactacaggcacgcaccaccacgcctggctaattttttttttttgagatggagtcttgctctcgttgcccaggctggagtgcaatggtacgatctcagctcactgcaacctctacctcccaggttcaagcaattctcctgcctcggcctcccaagtagctgggattacaggcacccggcaccatgcccggctaatttttgtatttttattagagacgaggtttcaccatgttggccaggctggtctcaaactcccgacctcaggtgatctgtccgccttggcctcccaaagtgctgggattacaggcgtgagccactgcgcccagccctaatttttgtatttttagtagagacagggcttgaccatgtttggccaggctgttctcaagctcctgacctcaagtgatctgccacctcggcctcccaaagtgctgggattacaggtgtgagccaccatgcccagtctcaaaccagtttctgaaatgggcaccaccagcatcccctttcaaagacaaggaagtggagggcaacgtgccaaggacacagagccaggacacacatggccccagcagcctggctccacaggccacatctgagacatcactggggttatccctgagcctcccagttcggtgttccacaaatccttcccaagctctgcaggccgcagcagcccccagcacaccctcccgggcggggcaccctcaccttcctgcgggactgcttcctccaggccttctcctgctcctcatcccaccagccttggctcagcagatagtgccgcagccgggagatggggtggtcctgtttatcccagtaattgacctcatccaccgagcggtacgctgaactgtcgtcactggtgctgtggtgcccgatcctgcacaggggcaaggggccccaggtcagtgtgggctccctggagtgggggtcaggagggaggatgggggatgaactagggaaggaggagtggaaacggaataaaggcaagggggagatgcaacatcaggtgataagaccatgttttggagacagtgatcgatatgaggaagatgctatggtggctgtcagtgctgtgggggtgctgacggggggagcggcaggcacctgtaggtcatggcctcgatgagaaagggctggttctctgccacagcccgccgtcgggcctcctttgtggcgttgtatacggcaaacacatcattaccatccacgcggattgacatgatgccatacccggggcctcgtgctgctgtggggacacagagaaggcaggtcaggccagggctgagataaggaacatgcacgaggccaaggggacgagcagggagaggacagagagcaaggctgagtgctcaggacctcaactcctgtggctgaccaagtgccagacgccacaggacacaggacgagaaccaggaaggagggtaggggtggcaggaaggtggcgggattggggagggaaggagatgatcccagcggggtggggagcagccagcagagcccataccaatgccatcgccgcgatactgctcagaggtgggcgtggagatggcgtagccattgttccggcagaagaagatgatggggcactcaagtgtggcagcgaagttgaagccggcatgggcgtccccctcactggctgccccctcgccgaagtaacagatgacgaccctgttggcattggcccgcttggctgcgtacgccgcccccaccgctgcaggggatgagagggtggtgagcaggggcggagactcacatgcactcacactcattcacactcacatgacccacggctcaagcgtggctcaggccagcagtcaccaggcttcaaggggaaaggaaacacctcagctcctgatgccccccagcatctgcccacccaggtctcctcttgctcagctgaaagcaactccacccttccaactgctcaggctgaagagtccagtatcatctccaagccaaacttcccgccattctccacatctactccaccttcagaacctaacccctcttacctcctcctctgcaccaccctggtcaagcccaagttactgagcagcctccttactagcccttcacacactgcccaatcccttatccacagggcagcccgcggattccatgaagaggtgagccaggccaaggaagagcagactcctccccacccacggctcctgtcccactttgagtaaaagtcgacatccctgcaacaggcaaaggccttgaggccccacccaaccctgcaccatctgcacccccacccaccacctcctggactttacctccaaccaccccacacctgctcaccctacacccgctcactccacacctgctcactccacacctgcccctctgggctcctcccagctcctcaaacacgccaggctcacacctgcctcaagacaccacacagctccccccctcacatcctctggtccatacttcagtgtcactccagtgacggaccccagccacccctacagtgcaccacacccggctggcttggctgctccctacaggacccccaccctcatatactccaggagttccctctccatctctgttactgtccgtctcccccaccacaatggcagcaccaggagggctgaggtttgcgttgcttttgttccctgcacttggagtggcaccggcacacggcaggaacttcgtgtatttgaagtgacttagcagggacccagagggaaggttagggccacgccccagccttgtggaaaccctattacctttagctcaaatgccccctaaatgccccctcctctgagaaagcttccctgcccacctcccacctaagaggctcaaactgcttcttgttcctcaacaaaagaacactatgagctaaggggtgtggagcctcctgctgtgctgggcacagtgctgaggcctggagagacacaaactcatgcatctcagctgccctagggcaaaaaagccagggcccagaccaaccctagatcaggctacaggccccggagggcaggaaggggctccgattccttgttctccacactatgagggtgcaggcctggcacccagtgggtttgcttcccaaaaaagctcttataagggaagggacttcagggcacctacggtaagctttggggaagcttacttgactctgaggactgaggcagacaaaggtcagggccaagaacccaggctctggaggtacacagtcaatgacttgagtccctgctcctctccctctgtgccacatgaccgttagcgagtgacttccctctttgacttcaatttcctttttttttttttgagacaggatctcactttggctagagtgcaatggcacgatctcagctcactgcaaactctgcctcccaggttcaagcaatcctcctgcttcagcctcctgagtagctaggattacaggtgtgcaccaccatgccaagctaatttttgtatgtttagtagggacagggctttgccatgttggccaggctcctgcacttttttttttcccattcacttgctgtctctcacacacacacaaaacacgggcatcctgctcttgaaaacaggaacaagagcaaataataacctctgtccccatggccacaatgagggtccttattagatgatgaacgtgaagcattggcacagtggaacctggtgcacacgttggctatgtttgtgagcagacaaatgcagtgggcatgtggttgggaaatccagagtgtggtcacacaggcttcaggcccctgaatggggtggggacagcaacagagccctcttctgaagggtcccagacaagaggtgcattcaaagtctggaacacaggccaggtgcagtggctcacatctgtaatcccagcactttgagaggccaaggtgggcagatcacttgaactcaggttcaagaccagcctggccaaaatggtgaaaccttatctctacaaaaaatacaaaaatttagccaagcacaatggcatatgcccataatcccagctactcaggaggctaaggcaggagaatcacttgagcctgggaggtggaggttacagtgagccgagattgcaccattgcactccaacctggctgacgagagtgaaaccccgtctcagaccaaaaaaaaagtgggctgggcacaatggcttaaacgcctgtaatcccagcactttgagaggctgaggcgggtggatcacctgaggccgggagtttgagaccagcctggccaacacggtgaaaccctgtctctattaaaaatacaaaaattagctgggcgtggtggtgcacacctgtagtctcagctaatcgggaggctgaggcaggagaattgcttgaagctgggagaaggaggctgcagtgagctgcgatagcaccactgcactctagcctgggcaacagtgcaagactccgtctcaaaaaagaaaaaaataagaagaagaagtctggagcacagaccagggctctagtggtgtcaccaacccagaattccacccagaaggcaggcaaaagagctgaggcctggacaggggtgtgaca

SEQ ID NO: 97483 - DNA, 13296 bp, Homo sapiens
cctttccaaatccatatattgaagccctaactcccagtgtgactgtatttggagataggttaaatgagctcataaaggtgaggccttactctgataagatgggtgaccttataaaatgagacactaggaaactctctctccctttctatctttgagtgtgcacaaaggagaggtcatatgagaacacagcaaggtgagggtcacctacaagccaggataagaggcttcagaataaaacctacctttccagcaccttgacttggactttctagcttccagaactgtgagaaataaatttctcttatttaagccacccagtgtgtgatgttttgttatggcagcctgagcagactaacatagcttgtcaaagtgggcagctacttctcagtcccagacattgctgggaagaaacaaaagccccaagattgttggaatgtcattatcagaaagcagaagcacagatcttgaagtgaaaaatttcctggatttttaatgttattaactaataaaaattccaacactgtgaacataggaaatgatatctataaagttcttcactgcaacattatttgtaaaagtaaaacgttagaaatagcccaagtgtgcatcaatcaaagactagttaaataaatgctgaaacattcatgaatggaatcagaactgttgtatcctttattaacacatattttgcaatgcccctttgtaacgaaatttacaaataatgtaattgatctccagacataatttaaaaaaattaagtgtcccaactataatagaaaaatataataataataaaatataaaatgttatttccatgtataagtgttcagacccttatgcaatagatgatataataacatagtccgggcacctatccatagaacctctgtgaatatagcaggcacaaatgcagatcaatgcatactgttgcgtccaatgaagttgagaagaaagctcagtactttcctctctcagtttctataatctgacaaattcattcaaatgtatatataaaatatattttatctttttaggtaaactagaatcaaggcttggataattataaacagtcctaaaaatgtccagtagagcattttaaaaagttatgtagcatgtgggggaaaccttcatcaggttgtatattgcagcatgtcaagtgtccccactaagtgctggtgctacccccaatttctatgacaaccaaaaatgtctccataaatttccaacacactttctggggagggggacagtttttctttattgagtgctatagactgaatgtttgatgtttgtgctccacccttccccccaaattcatatgttgaagccctaatccccaatgtgatagtatctggaggtggggcctttgggagacaattaagtcacggggatagagcctgtcatcagtgttctcctaaaaagaaacacgggagagttcttttcctttctctctgccatgagaaagttcagccagaaggtggccatttgcaaaccaggaagagagccctcaccagacactgaatccctagacaccttgaccttggacttcccagtcttgagaactatgaaaaataagtttgctgtttaaaccactcagtctgaagtattttgttatagtagctggaactgactaagacactgagaatcatgggactggattatttctcctgtctctttccattctttcacaggtagtaaaactacagaaatgactgcaatgcataggtaaccagaggtacatgttcatagtcaactcagggatgcctgcttatggaataacctcactagaaaatccaagatcatgagagattccagttctctgaagaaaagacagaacacgtgggaaagaggatatacaatcagtcgcgggggtgggaggtgtgaacccaggccctgttgctaatgggaaaagcctgccaggttgtcttacaaagtgtctgcagaagctctgagcttgcctgaggcaaacaccatgtgcctcctgaggatcagttacgggattctgagtgagagtgaaaggttaacgagctcaaagcctataaagaccccgatggtgttagactaaggacacaggccacccaaaggggacaagaaaaatattgttttagggtggagtggggattaccactttcatcagcttctctgtaaaaaaaaaccagcatcaatatacctttaaaatgtaaggtttaacaatgatttcattctgcctcttttttagtgagcatttcttgtatcgagagttcctaattattggttgctttcaagaaaacaacggaaagtttcaggtttctgaggccacaactggattaattcatcttgagattactgtttgcatctacctgttcgttcctttgtatgtgtaatggttaatgtgctttaaaaatacatcacccaaattctgtgttccctacagggtgttattacacaaacaatcttgtcagaataaagttgacattccctccaccacccgctcttccaccccttctgtttctcctcagcagataggcagtcctcctccctttctggagtttatttcaagattttcatcagcttccctgctagggatctaagaaatggagtcaggaccccatggagtggatgtaagtgaagcagcatcttcaaaagctggtgagaagggtccagttacagagagattataaatagaagacagagatctaacctttagtgtgaggattctgaggagggacaggagaatctccttaagtgagaaaagggatcacaaaagtgaaacaaaagtgaatgatccagcctctctttttttttttaagaaaggatctcactctgtttcccaggctggaatacagtggtgcaatcatggcttattgcaaccttgacctcctgggctcaagggatcctctggcctcagcctcctaagtagctgggaccacaggtgtgtgccaccacatctggctaatttattttttgtagagatagggtcttcttacattgcccaggctggtctcaaactcctgagctcaagcaattctcctaccccagcctcccaaatgctgggattaaaggcatgacaccaccacacccagtcaggcctcctcttctacttccacttccctcttccctacctcctcttcctccacttccctttctccttccttcccactactatcacttcaaggtccaagcatgtagaatatttggacctatgttggccgttgcctaccttgcatttttagtttgcagcaatttcaagagtgcttttaacctgttttggaatgatgttaggctagattggagtcatcaataaaacattatatagctatcatgaaataattgagaatataatattctccctagcaagatggaatagatttcattattgactcataatgtccaggcttttgtaacaaaaccacaagcaaggtcaaatatgaaacacagaggagcccttttcattcctccacctgtcctaccccaccctatacttgggtaccaaagtacaaggctaaggcatggtctctgtcctcatgcactcacagtccagtaaaggaaactttacgttcttggcaatacccataacactacttcacatttcttattatttaatgcagctttgttgaatttaattgaaaattgatttacctgggtaccagagacgggcaacttctgagtagatataatgaaatcagtctttcgtaattgcctcagaaggctgtttgccatcagcattcatcttgaggtggcatcaaagagcaagatcgggtcttacggagtctgagatgatcagatgcatgcattggtccagcctcagcctcctgccacaaggtaggggcttcacactctgatatacaagtctccagcttgcatggttgttatgtaaatttccagactcaagtttgtctaatgaaagcctctgctacacagtcatttcacaggagacctctggattttatgtttgtctgactgtgatgtcccaggcttcagatgcacttgccaaggagttacctgggctggctgtggccaccttccctgcatggccatacccagcccactcaaccaggaataaagatctcttgcctcagaggctggtgctattttgtaaaacaacctgctctcatttacatctttaatttatcttctctggagtagatcaattttcaattaaattcaaccaagccatattagataataagaaatgtgaagtagtgttatgggtattgccaagaacataaagtttcctttactagactgtaagtgcctcaggacagagatcatgccttagccttgtactttgacctcctggcatagtgctgggtgcatacagcaggggcctcgtaaatataacttgaactgaacaaagatgaattcgtctcagccattgtctttagataactcattatctagtaggggggtataaagcagttgcacagattaatcacaaatcaaggcagaatgtattaagcccaccatgcagaggtaaacaaggtgtaggaaggacaacaatagagcaattgcatattttaggggttaattttatttatttatttatttatttatttatttatttttttaacttcttgccttttaataatatctttgaatatagagggtttcaattctccaataataagatgtagagtggccaaatggtttttcatacatgtttccctagtccagacacccaagagtatgtccctcttttgggcataagaaaacctagagttatatttagggcatcatgtgtggtgaatagttgactgagctggcatgctcacaatgaccaaattatgtttgtcatattttaatccaatacattgatctactatgaacttgtaaataatgtatttgctttctagacacattccaggaagaccagagaaactgacttttatccatatggaataattcactggcaaatttcttttaggacagaccaaagctgatctagaacataatctttacatacttggatccttcccatcagtcgagaaacaacatctgaggtgaaaggctccattagaagagcaatgtgggatggtgctgtgctgacaactggtagttcctgccctacatctttgtagaggactggaggccagagcatgccatggtcaacttgtatgttgaagtgaagacctccttcgaggtgtgcatgtgcttattacagatatgccatggtgctaagtaccccaggactacaggaaaaaataagaatagatgctgtgtccatgatcatgaggcacacaggccagagcgcccgctgtggaatcgcacagcccgggttcaaagcctggctgggccatgaccacctgaatgacctgaggaatggtctcaggcaaatttgtaaaaagtggagaccctgcctgccagggaggcatgtggtaagaggcgcatccagtcaggtcagggcaccgcgtcctctctttggaaacttgcggagcgaggcatgccttgaggccacggcagccatggagaaggcgggcctggctccaggcggcacagaggcactggagaggccccgggggagcctggcaggatctggctggtcctgcgctctgcttccaggttctggccctgtaacctgggggatagggccggccaagacagggccactggatgccagccagcatctgggccaggtgccaggtggaagggctctggtggatcagccccgcacccccaacagccccacaggggggcccatccagggccacacacctgcccccaggagcaggacgtccctgaggctagagtccagctggaccggtggaagggtctcaccctttgccctttgactcctcttgtaggcaccctcgctgggctcctaagcactcctccacaccctggctctgtcaccagccccatggtgatgtcataaactcccagatgcccagtgtgcacccggccacagagaagtgggtgacttaggagtatcctctctgtttctgacccttagtttcgtctgtgcacaactcgcttaaaatgggcaactcactaagcgtattttgttcctggtcccaccgcaggtcctggccacgccatcggcaacctgctcgtcttgtctgtgaggccttcccagctggccgggctcaccctgcagctccygcacctgtgcctgccccgggaatctggggccgtttcccactcctcttcaacygwcagygacaccttrggccttcttttccagtcaggtgggacggcgcccctrtsaggctgtgtcttatcyctcggaacacgggcaccccacagaaggtcctgcctcctgtggtctggagccccccctcaaggaagaaacccatgctgtctsctcrcaactccakratgtttggacacctcagccccgtraggatcyctcgtctcagaggcaagtttaaccttcaacttccttcattagatgakcaggtgatcccagccaggctcctgaagayggaggtgagsgcagaagagcccaaagaagcaacggaggtgaaagaccaggtagagacccaggggcaggaggacaataaaatgggcccctgtagcaatggggaagcagcctccacctctaggcccctggagactcagggaaacctcacttcctcctggtacaatcccaggcccttggagggaaatgtccacctcaagagcttgacagaaaacaaccagactgacaaggcccaggtgcatgcagtgagtttctactccaagggccatggagtcgccagttcacacagccctgttggaggcatccttccctttgggaagcctgacccacttccaacagtgctccctgccccagttccgggctgctccctgtggccagagaaggcggccttgaaggtgctgggtaaagaccacctgcccagctctccaggcttgctgatggtgggggaggacatgcagcccaaggatcctgcagytcttggatcaagtaggtcttctccacccagagctgccggccacaggtcccgcaaaagaaaactgtcggggccaccactgcagctgcaactgacccctcccctgcaactgaggtgggatagagacggggggcccccaccggctaagcttccatgtctatctcctgaggcactgttggtgggtcaggcttcccaaagagaaggacgcctccagcagggcaacatgcgtaagaacatgagggtgttaagtagaacatcaaaattcaggagasgaaaacagctgcttaggaggagaaagaagacacggcagggcaggcgtggtggctcatgcctgtaatccagcactttgggaggcccaggcgggcggatcacacttggcactcctcactttgcagacaggayggcggcgcaaccttccaagtgtgaagtgacagccttgtgtgtgatctttctgccctccccaagtttgcattttcgacattaaagtttactttttaattaaaaaaaggagatcgagatcattctggccaacatggtgaaactctgtctctactgaaaatacaaaaattaggccggcatggtggcttgtgcctgtagtcccagctactcgggaggctgaggcaggagaatggcttgaacccgggaggtggaggttgcagtgagccgagattgcaccactgcactccagactggtgacagagcaagactccgtcctgaaacgatgttgtggttgagagcaggatggtcttttgggacaggaggaacaagaggttctggttgccactcttcaatcagttcttctttttctttgactgtaagatcagatcgttcttgtaatttgtgagtcttagagaaaagaagtctgattatccagagtatcagaatcccttccaaaataagatggtaagcaggagcctcgtaaagcaactgtaccatctccaccagaacccactgctccatggcggtcgccatagttagccgcttccttccggaaggctaggggttaattttaaaaagcttcatggaggagatagtaactaaggtggtccaggaagaatagggacatgatggagggatgaaagaagggaggtaaaaagtgggacaaagaacactggagatggagggaatgctatgaaagaagataccgaggctttgggagatatgggagtcggtatgcacgtgtaggcagtgtcttagtttgctcaggctgctgtaacaaagtgtcataggctgagagggttttgttgttgttgttttttgtttgtttgttttggtttttctgagactgagtctcgctctgttgcccgggctggagtgcagtggcacgatctcggctcactgcaaccccccctccagggttcaagagattatcctgcctcagcctcctgagtagctgggactacattcatgcgccaccatgcccagctaatttttgtatttttagtagagacggggtttcaccatgttggccaggattatctcgatctcttaacctcgtgatctgcctgccgcggcctcccagagtgctgggattacaggcgtgagccaccacgccccggcctgctgagtggtttaaaccagcagtccccaacatttttggcaccagggacgggtttcatggaagacaatttttccacagatggcgggggctgggggcggtgtaggggggatgatggtctcaagatgaaactgtttcacctcagatcgtcaggcattagttagattctcataaggagcgcgcaatctagatgcctcgcatgcgcagttcacaacagggtttgtgctcctatgagaatctaatgctgccgctgatctgacagcaggcggaactcaggccataatgctcactgacccgcagccactcacctcctgctgtacagcctggttcctaacaggccacagaacaatacaggtccacggtctggaggttagggacaaccccgtggtttaaacaacagaaatttatgttctcactgttctggaggctggaagtctgagatcaaggtgtcagcaggattggtttctcctgagcctctctccttggcttgtggatggccaccttctccctgcgtcccacatggtcttccctttgtgggtgcctgtgtcctaatctcttctcctcataaggacaccagtcctgttggattagggcccatcccagtgacctcattttactgtcattagctctctaaagaccttatctccaaatacaatcacattatgagttcctggggttaggaagttaatgcatgaattttgaggagaaacagttcagcccacagtaggcagaatcacacagtcattatgcacacaggctctggagttcaaatccccactctggcacttattaactgtgcagctatgattaaattacataagctttactgtgcatcagttttctcagctttgaggtaggataacaatagtaaccttctccataagggtgttgcaaggattaaatgtgttcctgtatatacctggcacttagtgagtgctcagtaaatgttatccattactaggactgaaacaaaaatttaaacactggataaaaatgctcagaggctgctttcaaagttgaactattccactaagtaggagtatgatcttgggaaatttactcagtcaatgaaatattaagtagtgtgtactatgtttctatcagttaacctcattgggatttagcattttcctgtattaaaacaagaggtttaacaagattgctttttgagtccttttcagttctggcattctgagagtgtgttcatcacacatggattgaaatgtgagctcattgtgcaggacagaaggaaacaaagatagaaagaaagggggacagtaagttgtcaggggctccgagtgctgctgggggaggagttagtattctagggattggcaagctcttgtagggttctgaacagatgaacaacttagtaggtttccaattcagggtaaggatctcaaaaatacaaaattattgattaaggtcatctgtctcactttattgtagcaaccaacaattcctgtataaatgacttaacccagggaggaaatagtttacaatttgagatgtcaaaaaactcactgttaaataggtaattttaaaaactctattgttcactgtttagctaacaatgaagagattaaactccttgggctgatgcaggggcagagacagatgagagctcggtcccagatggggattccccacctaggtggccatccagctgcaccttgagaaaaaagtgttagacaatttgaaaaccagcattaagatcattattcagaaacatctcattttacagctacattaattcaacaaatatttacagagtaccaaccatctgccaggaactgtgctaagctcttctaaagctttacattttaattaggtgagagacagaaaaatagcaaataaatacatcagcaagatagttgcaaaatatgatatatgccttaaaagatgtgactatgcacaaagagtatcctgggtgtgggccattttagattgggtgataggaggtggcatttggggtaggtaacatttggggctggctctttgcagtgggcattggttaaagtccacagctaccttcatatttgtaaagtattcataataccttttgaatccctatctaaagtttgcagaatttctcaccttgtgctctcacccaaagttaaaggaacaccttgctttcctagcaccttgagagcaaagtgcaggcatgaggcatgagctctgccagtcccatgcactcactggagattccagctcagaaaagggtgatgtgaaaggggtgatgcccttaaagcatttcaggaaggctagtgggtcttggctgagacataacaggaagaggtcccagtggtggcaccccccaatctagcatcatggagcaggctgtgacacaatgtgcgggacacctgtcagatttcccctggagcaagctgtccatgccattgttcaagctgctccctggcccatctgcagtctccaggagcctctcatatgatttaataaattgcattcctgattgaactagctccagtgagccctgctctttgcaacttagaaccccggtgggtgtagtaattgattctagaagtgtctgctgtcaagaagccttcaagtaaatggaatgcaaggatgataaggtaagctggctgcttctgagctgaagagcttaaagaaagaaaacaatttccaaagtatttgttagcccaaggcatggtcagaaaaccagggactttctttgatttctatggctgtgctgaaagaatcacttatctttactgcagacagagggcttctgtagccaaaaatcaaagtcaagggttgagtctgagggttgccaacattcagagtcagaggaattcactgtattgcctgatttcattggtggatattaaggcatcaaagaggaatgactataatcttgaatatgggaactggaccaaagaagaggatttgggggccttatactcctaacccccaaagacctgtataatggaaaacacccctctttccaaatctgatgatcctcttcctgccttgcttaaagacctcctaatggcttcattcatagcattaacctcttaaaatgtcctccaggcctcctccccacccctcccagacattgtctctaacctataactaggtgcagaaccctgtgggccctgggatgctaaaaacaaatcatacctaggaaaaggtttacacaccaacgatttgtaagaactgcccactaacagaaactttttaaaagtatgtttcacacatacttttaaaggagagtaaagtctctaggcaaaaaaaaatgatggatggttctctaaggtcccattaagtctatgtaactgagaaaactttagtactgcctgcaggacaggtccctggatagccttggccggcccagctcttccctctcttgcttgcaatgcaacatcctaagataagaaggaaatgtccagaacatctcaggctatatcttccttcctcccagactaggatgttctgcagtacttatgctcagcaatccaagttgcacccagggtataaaacccagaacgaaatacttccagggtccctcagctgcagtggaatgtggaacacataccaatgagattccatctgcactgcaccactttccttctcactgaaaggctggctcgccgtgaaccctaggcttgtgtttatccttgtgactacatgtgagtaacaaagtcactttgcctcacttgtgccagtgtcttgtcttaccagattagacctgagagccttcactggccaacagggcccagcataagccctcgaatagtgattcacagattctgagggatataggctagagagggctggacatagttttggattaggctaaatatttcattaggcatactctgtaaagatagtctaggttaaaataattagcttgaccaccctgaagtgcctctagcaacttgctcttttggcagaattaaattgaattcagtggtggccttcttaagagaaattgatatgccagaaattcctcagtgcaatgaacaagaaagataccaaagtcctagagagataggaatgtagaagattggactgtccactaatctatcccttaacctcatacctgagtgagcatggaagacatggcacccaccaggatgtagataactgcatgtgggtggggagtatcaacatctctaaaaagctcgttagctggctctctttaggcaataacgtgagtggaagatgctactactgacatggtctttctggatgtcaaatagcagcatccaactgtcagagataaaatgggtgtggaccaaatattaggcagctgagccacagtgggaagtacatgcttcaacccacagggatctttgctacttgctaagggatagtaaagtctctgacacaaaattcatggatagtttacaaatgtcctattaggtctgcgtaacagaaaacttcaggatggataaagaaaggtctggtttgagcctcaaatagagagtaacagcctcttacccaattcctgcatttgaatcagctcaaaaactcacagccctttgaatgaagaggaggctggagtcttgacaacatcacaagtacatgtgatcactgttcttcccacccttctcccaaagagacctgagcccttttactagggaacccatatacaataacaaaggaaaacacctagatattttagagattattgaacactggttcaacaagtctgggaatgcatgacatcactacagtctaccagctttgctacggaggctatctgagaaatgttgtttttcctggagtctaccttatgaggagagtagaactccaaggctatccttcccagttaactgtgtgcatggctagaaagaaatgcctggctccctgatccacggaggaaggcctattatgttagaaata

SEQ ID NO: 97484 - DNA, 34895 bp, Homo sapiens
ggcaaagaacctgaacttcaaagaagttatacaaatgaccagtaaacatatgaaaagatgttcaacatcactaaccactagagaaatacaaatcaaaaccataatgaaataccatttcacaccccctaggatggctattataaaaaacagaaaataacaaatgttggcaaggatatggagaaattggaactcttgtgcattgctgtaggaatgtaaaatggtgcaaccactgtcaaaaagagtatgacagtttctcaacagatcaaacataaaattaccatgtatattagtcaaggttctccacagagacaaaaccaataggctatatatagagagaaagatacaagaggggatttattaggggaattggctcatgtgattatggaggctgataagtcccacaacaggctttctgcaaattggagaccttagaatgccagtagcatggccccattcaagtctgaaggcatgagaacccagggggctgctagagtccaaaggataaagagcctggagtgctgatgtctaagggcaggagaagagtgtatcccacctgcaagagcgagaaaaatctctctgctatttttgttctatcctggctccagctgattagatggtgcctgcccacattgagggcaaatcttccccacttagtccactcacactcacatgccaatatcctctgtaaacacactcacagaaacaccaaaaaataatgcttcacctgttctctagttattccttaatccagacaagttgacacctaaaactaatcatcacaccatgggacctagcaattccacttctgggcacaaaagaactgaaagccgggactcaaagagatacttgtatacccatgttcatagcagtatgattcacaatggccaaaaggtgaaagcaacccaagtgtccattaacagatgaataaacaaaatgtgtatttatatataatatatatacaataaaatattcagtcttaaaaactaaagaaattctgacacatggataacatagatgaaccttaaagacattatgctaagtgaaataagtcaaccacagagggacaaatattgtatgattctacttacatgatgtacctagagtagtcaaattcatagagacagaaagtagaacagtggttgttaggggctacgaggaggggatgggcagttagcatttaatgggtatgaagtttcattttgggaaaataaaaaaattctggagatgaatggtggagactggcgcacaacaatatgaatgtacttaatgaccctgaactgtacacttaaaaatggctaaaatggtaaattttaagttatttatattttactacaaaaaaaaggtaacatactaaaatgatctcatgggttttgtgagaatcaaatgagatccatgtagagaagccttgtagtctatatagcccttcgcaaatgttagctcttcttagtcattatcactccattttccccaatctgataccattatccacacactttacccagccacacttacccaacagcacactgtttgagtttgagtgctatctggtgaatactcatcttcattttgctaaaccctggatgccatgtgctagccaacaatatcctattgttctggttcttaaacaaaacaaaatctcaaagacttcttcctcttacctagttttacccaatgattggctttgaagcagtccttattcagtaataagaggtcaccatgccatggccaagaatagggcaaatcttcctccaattcagttgaactccctggccgtctagcaaacaacatatctcataacacatcctttgagcaggtgaacaactctgaaccttctttgaaggaacaggattctgggaaaggaataaaagaaatgcatgcagtgtgtattgagaataaaatctattagctaagaaataaaaaatgaaaatgctacaacatgatcagttttgatggactagacaactctctgtagagtagccacagggctgaaccctcaaatattcccagaaagtatagacattgctgtagaaccagcctgataatgcagcagtgcagaacttaagaatgatatttctttctagaaagcagaccaattgatatcttcatcctgttattgatcagaatccacgtcagcattcaggtgctctctggctacaagtttccttagctcttgcaggcgctgctcattgaagatttctcttaacacaggtaatgctaccagtctcatctggcacctttttcatgcaatgacaactatccaggagttgctgcctttccagatatcccctgcgagaccaatgagggattttattccatgactctttgaagaggttcaaacatggatcaaacatgaagtagtatgtaccccagccttagaaatttaatcttttatgactgggagaaagaacccaagtctctgtgccttcacagtcttgaatatctctgcttgtttcacttacgtttacctcactcaagattcttagtgtcatcgacatgactggttaagaactcaggacttttcaacaaagttttctgccagtgccccacaaatcatgactgtggtctcccaaattctttgattctccactaggttccctttctcctccattcaaagccccaaataacatttaccctatatatttagtcccgttttttgtagaaatgcttctttgcttgtgttccccctaccttttcatatcatacctacatcgttaactgaggctcagtcataacatcaacaacagcatgaaacatcccaccttctgtcttcattttgctataaactggaggcaaaggaaatgctgtcactcagggagtatatcaatgaagggaaagactctcacaagacaggcactgaggcaggagtcactagcacacagtgtataagtgaaatctaaatataaaaaagcaagcacttgggatacatcccttgcacacacctcctcttttataaccagtagagtgaagttggttgctgaagtcacagaatcaatagtctatttcccacagacggctgatgatagcagaacaagccctggctaagtcccccacccttttcttgagtagctcattgttatgagccacggacccaccatcaccaggtcacatgttctgtactctttcctaaaaacagtgacaaaatatgctgagccatccatatttcctcagttacattgagaggcaggagatataacaattaagcagtctctggagccagagcaacctgagctcaaaccatgccttagcttgcttgttgtgggacctaggcaaagttactgaaacttctttagacatgtttatcaataaaatgggtacagttgactggctccaagatttcttgacctcttgatgtatttgccctgcataattcctaagactgtgattataatggattttactcttatgattaggttttcacatagcacagttgactttaatacagggagattatctgggtaggccttgcctaaacacaagagccatttaaaagcagagttctccccagctggtcaaaagagagaatctctggtcagagattcacagcataagaaggtttcaatgtgccatcactggctctgagatgtagaaacccacatgtaaggaccaaaaagaagcccttaggagctaagagctacagccctccagccaatagccagcaaagaaacaaggacctcggtcctacaaccacagccaaccaaattctgccaacaagaaaaatgagcttggaagctgattcttctcccaaagattccagataagagtacaacaccttgatttcagccttgtgagatcctaagcaaagaacccactcatgtccacccaaacttctgacctacagaactgtgagctaacaaatgagtgttgtaagccactaagtttgtggaaatttgttacacagcaatagaaaactaatacaatgaggacacagcaagtgcttaataaatgttagcttttattattactaactcattgggatcagctacacagttgtaagaaggctaaagtaaaaattatttatgcaaggctggcagtgcaacatagcattcagatccagggtccatttggtctaatatggctgatattaagtgtttctcaaggggagagacattattggcattcagtggggggaggggttcatcctgtagaactgccttggacatggcagtccatttatcatctctggcttctcttcccctagcagtagtcattgcaacaactgaaaatgccactgtacatttccaaaaatgctcctccacaagggttgagaactttgagaactactttaagggaaatttcataagaaagcatgcgtgtcttaaatgctgccataaagctacctcaataactacaatgctactcaaattacctgaccctaagaatcgccagtggcacttgtttaaatataacgattcccaagttctttccctggagtcccattccatagggctggggtggagccccaggaatctatactcttactcaaagaccccaggttaatcttttgtttatgtaagtttgccaaacactgagttagaaatatactcagccgtacatgcatttagcaaaagttcaccacaacggaacaatgacacaccaaaactctttgaaactgtgccttctacagagctgtaaatctccttttggaccattccattacacaaggtgtcctcttggtcacacagtgattgcaaatgggactctagagtcatggaaatgggtatactcttctcaaactttccatctttaccagaattacttcttaaagtgatatgcttcatggtgtaaactagcacttattaattttttctaaatatttatcatatttcatatacttttattttggagatggagtttcgctcttgttgcccaggctggagtgcaatggcagatctcggatcaccgcaacatccatctcccgggttcaagcgattctctggcctcagcctcctgagcagctgggattacaggcatgcgccaccacgcccggctaattttgtatttttagtagaaaaggggttctccatgttggccaggctggtctcgaactcccgacctcaggtgatgcgcccgcctcggcctcccaaagtgttggcattacaggcatgagccaccgcgcccggcccatatacttttaatacatgtggaattaataaaaacgtccatgcctccaattccgtggctattttaccgtcttcctttttcggacaagtccctcaaaggtagcgctcttggctccttcctttgcttatcccctaaccctgtcctcctgaggtgccccctggatttcctccaaccccggcagggtctgcctttccgggatgatacaacgacctgccctgcatgccatatcccaggcgcgtgggcaccaaagtgtggaaaaaccgatgaatgacgttttctgtttccgatactctgcctgccagaatcccctgccgcaccgccccaccacgaagcacatggaacccacggactacacgaggacagaggtctgttctccctttacctctcccatttctttaactatgcttctctcggctggcatgccctttcctcatctcactccacacacgaacaggtttagcaaataatatgcacgctgctgggacgggcccaagcatttccctcccttgatagggcggaactaaaatgcaagccccacagttgtcagcaaaggacttccctgttaccatggtaaagccgctgcgcctttattgtggttgaggagtacttgcatcaacctaagagaaaattaataagaaggaagtctgcaggctgaaacccttcaaattagcctggactcgcctgcatctggctcggaacagagttaatctcaggagtgagaatatagccctccggtggacgcaactcgcgcctgcggctaacagaatgtctccaggggaggggctctgcgtccgttccgcccaggcccttccggctcacgcgccgtacggaagcgtgctcagcgctgggcttgtgctccgtacggaagtgtgctttggcgcaccggaagccgactcaacagagctatggcgggtttgactgtgagagacccagcggtggatcgttctctacgttctgtgttcggtgagaggaattcgttgtagtcaagcttcggggagggactcccctctgcaycttctatctcatgaatcgctaccggagccgctgacggttcggacgtgcagttctccctgcttatcctgtagggcgtccaacctggtggactcatgagcaaagagatattcccattctgccgaggtctcgtaggctttccgcaatatcagtggggaagttagactagcgttcagcttctgtgcgtttctcctttcatgagcttcaattattctctagaggagaaggckcacggyaacagctcctcactgtcccgtactacttctcatcctctgccccagaatacagactatatgctgagggtatagatcctagtgtccacttactgtcctctcctaaggactttcatcctttgctttttatctgtaacattttagtgcatcaatagtggtagcggccacctggtgtcctgagatggcttgtaagtgaatgaatgaatgaactattaagatctcctcagaggaattttaaaaaggatcgaaacgattctgaattatctttttggctgaaataagttgtttttaaaaatacgtgtgattattttagagtaccatttgaaagggacatgacaaagtagttcagaatactttttaaacatctttcactacattcatcgtcattctcccttaaatgttgtatgtgtggaaatacataggaacctgttttaaaaattatattaaataacattgatattttttgtagtcactgatgagacttgcagatctttaggtaaataccagtgccaaagtatttatttgcaccaaagttaaggaaaatctaacacgtgtcagatcagtctgagaactaacatttgagagtacctacacattttgtatttagtttcagtggtatatttcctttgttaagaggtctgaagaaatacaatggaattgggattggagaacactattttgagtcttatatttgatgatataagtttactttctcactaaagatctatgttataaactcagaattttaatgttacctattttcttccttagtggggaacattccttatgaagctactgaagagcagttgaaggacatcttttctgaggttggacctgttgttagtttcaggtgagatccccttttccttcatggtgggagcttcttaaaaatcaccacagatttggctcttagtaataatggcaggttttctttactggtgacttttcacatacattttgttcttgtaacagctttattgagatataattgatacactatacaattgacatttattcttacctaaaatatgtttttttcgttaaaaatgttttttaggcagggcatagtgactcaagcctgtaatcccagcactttgggaggccgaggcaggcggatcacctggggtcaggagttcgagaccagcctgaccaatgtggtgaaaccytgtctctactaaaaatacaaaaattagccgccgtggtggcccatgcctgtagtcccagctactcaggaggctgagacaggagaattgcttgaacccgggaggcagagatagcagtgagccaagatcatgccactgcactccagcctgggcaacagagcaagactccatctcaggaaaaaaaaaaaaaaagttttaaaaaatatttctgtgaggctgtcagagatataaggttatttatgttacagtgggcccaattaaagcatggcaatgttagcaggaaccytgtatgtgtgtaacatttgttcctgacacttggttctgctctccagattggtatacgatagagagacaggaaagccaaagggttatggcttctgtgaataccaagaccaagagacagcacttagtgccatgcggaacctgaatgggcgcgaattcagtgggagagcacttcgagtggacaatgctgccagtgaaaagaacaaagaagagctgaagagtgagtacaaatccaacttggatgcagtatgagttagtaaagatgtaacaatgaagattttccatttctgatatgttttagaatatgctgaaatggttagccacgcagcttgtttattacttgactgacctgatgtgcctgagttaggcaagtattatatatatctttttaaaaactttttataaattttttttcaagtaattgtctgaaatttctatacccttgctctggatggagcagggcaaggcctcaaaccgtttcaaaactgttctggcaagcactgtagggatgcatagggtcactgcagacctaagcatgctggaggcttgctagtaagtgtatatctttaagaaacagataaagttgacattagaaattcttcagttgctccagcctgggcgacagagtgagactctgtctcaaaaaaaaaaaaaaaaaaaaagaatttccattgctaaggagttatttccagttaaagatgaattcaaattcatcaagccattagtagtactaactgtggcattagtcattcctgtcactcttttcaggaatttttgaagttagcgtatttttctcttttaaccttttgtttctgaaatgacttgttaaaagaagtcaatrtgcctagttctctaacttaggttaacattgtccttccatgtgatcatgatccccagctttcctctgagaacagaaaatacactctcactttcctccacagaaacaagaggctttcacatcatttatttctcagctctggagaatctaaaattatcagctggttcttacagcagccctgaaaagtagatatttgaaatgatttagctttttgttttgcctccctaactttcttgtactttcttcttgattaggccttggcactggtgcccctgtcattgagtcaccttatggagagaccatcagtcctgaggatgcccctgagtccattagcaaagcagttgccagccttccaccagagcagatgtttgagctgatgaaacaaatgaaggtgggaggaggcattaggttatgaataaagcaaatcacatcaggttttcaaggagttacttgaattagttccctgagctcaaatagaaattgtctgtagaccaccatttcttgcaccttcaatattctgtatgtacacagtatattttacattttgtacaaagagctttctatttttgtacacaaacacagctatccaaacaatccagctggagttttgtggcccatagatgtcagatgtagatattaaaatttggcttttttcctaaatgataatatcacagtatttgaaatgcctctttcttctcttgcctgccatgaccaaggtttttttgtgccatgcaaawactaatgataaagagcctcttgaatattacatttctcagaggggaatggctctaaatcactatcagtttctaagtcataagtattaaacctgaatctgcttatcttctcagctctgtgtccagaatagtccccaggaggcacggaacatgttacttcagaaccctcaactggcttatgctttgctgcaagcacaggtagtgatgagaattgtggatccggaaattgccctggtgagtgcttctggttcttttatggaaatggtcgggtaaaccttgaatgggataggaactacctgattgctttgttaaacagacagctcataggtttgtcttttcactttttagaaaattctgcatcgccagacaaatatcccaacgctgattgcaggcaaccctcagccagtccatggtgctgggcctggctcaggatccaatgtgtcaatgaaccagcagaatcctcaggcccctcaggcccagtctttggtagggctttatcccttaacatttttttgtatctgtcttagaatgtcattttctttttaggagaatatattgaaagaagaatggtcaggaaccagagatgataatttcaatttccaggcataaaagcaatttccaggttgcagagcacatgacatctgaatgaatatagattcgattccaagtttgtaaaacaaagagatccttcccgtatgcccttttcttataagctaactttgtgtgtatgtgcatgcctggcactgtggttggcacttcgttattccatatgcattatctcatttaatcctcaaagcaattgtatgaggttggcactcttattatctccattcttactgatgaaaaaagtaaagcttgctttcaaagcatgacacaaaaccttaaagccataaaaaattgatacatttgaaaactaaaaaatttctatataaagaaaaaaataagtatcaaagacatgacaaattgagaaaaagtatttaccacacatgtgatggaaaacagactaataaagagcccatagtcattcacaagaatgtttattgccttagagtgaaaaattggaaatgtcctaaatgtacgtcagtggaagaatggagaaaatgtgtggtacattcatccagtgaaatactgtacaacagttaaataaactacacgtatcaacatgaatgactttgaaaaacataattccatacagcagttaagatgaactaggatacataatatcaacacaactccaaaacagtgacatacggacatgaaactaagtgaatatggatgcattcccgaaatgtaggatatatgtttctgcataaatccccaaaatatgtggaatgagttgcaaaataatatattgagtatgtaatgattcatataaaattttgaaacattaagaagacgtcttagtggtcatcaaaggagaagagagcacaggatgcaattggggaagaccgtacaggccattggtttattttatttacttatttatttcctaagctgggtggctattttattttctatatgatttgtatatctgtaatttttcataataaattttaaaaggcctcctataaattagtaagaaaatttccaataacccagtagaaaaatgggaaatagacataaatatttcacaaaaggagaaatataaatatataaaaatttattcaacttcaaaataagataatgtaataaattatcatttatatatgtaatgttataagataatgtaaatagaaactacaataagctaccatttttcatctctcaggttggcagaggtacagggcagggaccagcaaacatttttctgtaaatgatcagacagtaaatatttttggctttgcaagtcacaggatctgccacagctactctgccatggtagtatgaaatcagccataggcaataagtgaacaagtgtgtgtggttgtgttccgttaaaagtttgtttataaaaccaggcagtgagcccgatttggcccatgggtcatagtttgccaacccctgctctaaataaataaatacattttcagagatagaaaaaaaaagctaaggcccagagaggttagctggtccaaaaattgacacaattataagtggcagatctatttctgaacctggttttatctgacctcacagccagttttctcttaactactttcctatacagctcttccttttcttttgtagagttttgtgttccttaaacgtatatgtgattttttttatataacttggcttttattctttatttattgagctgtttctaattcaagggactactcagttttttggggaatgcacagatgaaaagatgacattctctttttctcaacgagttttaatgtagcatttaaaaaaatatatttcacattcccccaaaaccagaattatatctaaggacaggagtgagaaaagattggttaaattaaaaaaaaaatttaattttaaaaatgtggactaccagcagttgttttttttaaaagagtcccagtctccttttatgtttcttgggtttagggcttttttttttttttttttttactcttattggcagccccaatcatgaagttaacagtaggtgttatgtgctgccttgccacacagataagacttgtcaatctctacattgagaatatgttccatcttaaccgtgttccatataaccaggctcatgacrtatattgcttctgtggagtttaaagtgtgtgacaaatctaatgctgcataagacatgccatacaaaaaggatgtttagtagtgtatttggggctgttcatttgaagaggacttttaaggtcgtagacttartatattgagtatccacagaggcatatacatactctgttttttttgcttggtcagggtggaatgcatgtcaatggcgcacctcctctgatgcaagcttctatgcagggtggagttccagcaccagggcaaatgccagctgctgtcacaggacctggccctggttccttagctcctggaggtaagtttcatttagtcttcaccatttcagtacttgctaaagttttgtcatagccactgttgcagtgcagccaaatatgataatgggatccttaggtaaaattaatacacagctagaaagtatatatcttaggtggaggaaatagtagatttcttacgttaaatcctrtatgtctaattataagaacagggaaagggacagtaaagtgaaagagcatagtaaaacttccaagttaacaagggggaaaatggaatgagtggaaacaaaatcaagccagcaaaaatagagaagaggaaaaaagtaagagacagtgtaaaataagtaataataaatgtagagtaagatggaaggaataaaaactaatgtagttgttactctgctaaatatgaatgaactgtcagattaggttcaaaagctcatgaagaaaacagacaaaaaaatacaaggtcacatttgttatagcatattaaactgacataaaattgtattttaacaaacataatcagaacaaacaacaaaagggaaaaagagaaatttaaaagctatgtacatttattgaaaatgtatagatcggcaattaataagagtattgctcatatacttgtaactgttccttgttcaacaattgtaactaagaagattgagtgaaataatgattccccatatgaaacatctgtatgaacacatgatgtattaccaatatttaaagtttttttatgtaacaaacttggtttttgttaatttatctaatctagggtaggttgagtacaacactactcatggagaatgatttaattctaaattgttctgttctgtagagaatccagtctgcagagctaagttgatgaggaatggaagaagagattttttgaagaaatttctgcaaactcaggaattttttgtatctactttaggattgttatgtatctactttatcctaatagagttatacttgtatttaaattatctttcatgacaggaggtccatgggtaagtgacattgttttcctgtattatagaagagcttcctgccaagagtttggtaaccaatgaaatgaattattcttattgaactcactattctgtcactgaaacataaagtacaaattgtaaatatactaacaaaccccatcttctctctcattgcattgttgaatatcttcctttgtaggtttctgcttgtggagcagaatgaggaaatttgtaaactcagccactgttctaatttttcttttccgctgttctaattggtgttttttcttgtctgccctttatcttctaggaggaatgcaggctcaggttggaatgccaggaagtggaccagtgtccatggaacgggggcaaggtaaataaatattaatgtctgactaatgttaattggtcatggaagtgttccacatccacagtatctaatatggcagccactaaccacccatggctatttcaatattaagttaattaaaattaagtaaaatttaaaactcagttcctcagtcacaatagccacattccaagtgctcagtggccacaggtgactagtggataccatacaggacattacagatatagaacatttctatcatcgtaaaaagatctattggacagtgctggtctagactttccacctgrtgattcagagtccagctctacaagaattgataatgaagcaagtggatcgtttgtttcctgattcctagtctaataattccactgacatgttctctctccctgtatggatatctgttgactgagtaaggaattttaataatgagcatgtaaatatgtggctgggtatgtagaagactagatttaaaccccagagaaaactgggagggaatcataggtctgtaacgcctacttaatgaacatatgttgtaccgtggctgtactgctatatacaacagtagctgctgctccaaaatctccatgttgtttcttcatgttactggagtttgaaggacaagaaagtgcagtggttcagttggaaacaatgttaggaggagagatcgtaagaaaagagaaggaactgagtgcatactatatgccaggcactttaattttcataaataatcttgtgagttaggtggcagcacctcagttttacaggcaaagagttggaagctcagaataagttactttctcaaggggacaaggtaagtaaatattaatgtatgagtaatgtggactggatttggtgctcttattttctcttccaactagtaagtggcagagctaagattcagaagtctttgactccagaatctgtcctctttctgtcactccacactgcctctgttaacttccaagcatattcttcagtgtcttctactcttattccttgggaataaaatgatgggaaagactgctttggacaagcatagagaagcttaaggttttttcttttgtagcatatggtttataagtggaacccatttaaaaagcaaaatattggccaggcgcagtggctcatgcctgtaatcccagcactktgggaggcygaggtgggtggattgcttgagctcagaggtttgaaactagcctagacaacatggcaaaaccccgtctctataaaaaatacaaaaactagttgggcaatggtggtgtgcacttgtggtcccagctacttgggaggccgaagtggaaggatcacttgagcccaacaggttgagactgcagtgagccataatcgggcaccactgcactccagcctgggcaacagagcaagaccctgtctcaaagaatatatatatatacacacacacacacatatatatacacacatacatacataaacattaatatacaagcctgtggtttttacactggggttggttgctgaagtgacagaattaactttttcttgttagaagtctgacagcaggacaaactccctggccaaatatctcatattttctctaagcatccaatgcttttgtgctattgtacatccctctatccccaccgcaccactgtcaatagatcatatatgttccccagagtatttctgcagtaatgagaaggtattagggtttcagtcatacttctgcctgtcatggggccagccctcaatccatcaggttttagctgtttaacgcatacttgcacaagacatcttcctattatagttatcttcacctttttgtcagaaattggcaaagggaagtgactcatgttttgagggtatttccaggatgtcttcatgcagagactaagtgagatgagctttcttttatagtttccttcagtacccagcagaggaagcaagagtcttttcgtgtgtgcctagtttgtcttacttttcctgaaatccatgctgcttttaatgctgaaaggagatggagatgtttgagaagatacttcttgcttccctgccatgtttgtttagtgtcggttcccatgtcatctcattagtctttgtttgctgttgtcatgatgtttattatcaaagacttgctgtggcagagtatttcttgtggagtgatattctctttcatcatgtaaagttcattcactgcatttccccatctgatacatttttgacagcagaaatttttgtgctttaaaatgtgacaaaaatagaattgccgtacttcagttatggccgtttcagaatgaatcttgccttccagattcagtgcagtttcttttatgttttgcttctgaaactacatttatgttctttgcataactagaagattcaaaactatcctttttatatatttttttcctaatgatttcataaggagacctaacggaaaactagtagcagaggtgaaaatcgaaaatgtcaggttattcccacctagatcaaaccagtgcccccatgggattccctttcaaaagctatctggtcaaaatggaactatttcagagacccaaaggagctagtgtagtttagggagattttgtagcctggagcaagccgatgaactcttggctttttaacttatatatgtaaatctcaatctccatgtgtgtgtgtttctgcgtgtgtatgcaagctattttaagtgtctgctctttctccttttgaacttactgcttacctaggaaccctacagcactcgcccgtgggacccgccgggcctgcatcaattgagcgagttcaaggtacccattgtatctgtgggtttccttttgcttgtggtgttcagggtgggacgttgagaggaaaagagctgcgtggcagtcatcctcgcgttcagaacccaaaagggtagtgtttttgggtttttgtttttttaattttttcctgttgaggccacaagcctaagattgacctcttcacacagggcagagaacatggatgatatgggcatctgtccgaggctgtactccctccctactggtgtcaggaggcttggatggaatagcagtctgtaaggagacagcgggttcttgcagagccatggcagtgttcacatatgccaagactctacctctgttttgtgactctggtccttgaactaagattgattagaaggaaaaccaggagcataagtttctccaggtcgcagtgctagtccttggcaggttgctccccagtttgctctttatataattccatccatacctctgacatggcacagattctgcctacaccctgcttctgttcttgagctgcaagaggattctgctgtggtgaggtttcacccactctaaggtgtctgaattatgttgtcagtggtatatagagtcatttcttgtttgcttatgtgtctttcacagcagtaactccccgtttgtttccctgtcagtgccgatgcaagaccccagagcagctatgcagcggggatccttgcctgcgaatgtcccaacccctcgaggcttgttaggagatgctccgaatgatccacggggaggcactttactttctgtaactggagaggtagagcctaggtaagcactaacatagaaggaaacagttgaagaaatcagaattgtcccttcttccctgagaacaaaatctttctgtaccagttgtacctgtttgcctacttcaaaaggtagatcaatattcatggccactgtccaagggtaagcacttctcctaaggcagaactatgtacttgagtatgtcattttgagctattatatttttagaaattggaaattttagtatacatacttgaacagggaaatttatagtagtggaaatattaataatagcaataataggccgggtgcagtggctgacgcctataatcccagtactttgggaggccaaggtgggtggatcacttgaggtcaggagttcgagacctgcctggcctacatggtgaaatcccatctctactaaaaatagaaaaattagccgggcgtggtggcgggcgcctataattacagctactggggaggctgaggcaggagaatcgcttgaacccaggaggtggaggttgcagtgarccgaggtcatgccactgcactccagcctgggcaacaagagtgaaactccatttcaaaagtaaataaataaataaaataatgatagtaataataattgacattaatggggatcatgcctctgactctgctctgagtactttacttagatcatcttattaaatccacaagatcctgtgagatggataccattattagtcccattttacacgtgaaactgatgtgtggaaaagttaaataatgtgtccaatatcacacagctaataagtgatagagcctagatttgaacccatacagtctgaatccagagctcatgttcttatgcattgttctgcaaactcatacatataatgaatattcgttgattcctccctaattatgaaccaaataacgaaattctagaatacrtggatttatatctctgtagcttttcttccatctatttggtgttattttcttgttagtattcatagactacatcagctctttgttggatgtttacttactgatctggttggtactttgttgttgttttgttctattttaaaatacaacgtttttctccatctccagaggttacttgggaccacctcatcagggtccacccatgcaccatgtccctggccatgagagccgaggaccacccccacatgaactgaggggagggccattacccgagccyagacctctaatggcagaaccaagaggacccatgctagatcagaggggtccacccttggatggcagaggtaaggggagatcacattgcaaatgccataatgaactcaactgtcttaggctctaatctgggataaagaatgctggaacagtaggtttgcaagcatctttaaggtttatccacaaatctgagaaactggggaggagacaatagtctcatatgttaatagctgaggggacaaatgtgactagaagagatttctatctttcttggattgttcatcattcttgcagtacatgcaagtagctacataatggttttgttacatttttctttataggtggaagggatccccgaggaatagatgcacgagggatggaggcccgagccatggaggcaagagggttagatgccagaggattagaggcccgtgcaatggaggcccgtgcgatggaagctcgtgcaatggaggcccgagcgatggaggcccgtgcaatggaagtccgagggatggaggccagaggcatggataccagaggcccagtgcctggccccagaggacctatacctagtggaatgcagggtcccagtccaattaacatgggggcggttgtcccccagggatccagacaggtatgtgtaacactgacttctggcatccaagtgaaatcttgatctattcaggaattgattattgagcctaattattactgccttctgacttgggctgtttcttagcttgttagaaagggaagacttggatctccctgtagcttctctgtcccttagggtggtgattttctggctatcaggattgtagttcaaaaaaaaacaaccttatcccacaataaatagctattcatttggagcagagcccctgaaaatttaggggttagaaagtagtcttgattggggtacaaaccaacatcatgtacacggttttttccaagatatacttgcccggatctcatccgaggtataactcagaatctcttattagtaggatctgagcatggatagtttgaaaaacttcccccaaatgattctaatgtgaaccctgactgggaaccactgggttagagtatatgaagagctgttagtggccatttagataatcttaggtttagagagacctgtgttaatttattgtcatcacatagcctaagtgaacagtggaatgtgaaaggcagtttattaataatcaccttaaaaggtgtggaaccgaagtcttgtctcctctcttttatttggatctctctgcctgtgtgtacatgctccctcttcatctcgacttggttgtggagaggtggtatgtgtgtttcttccgtgagtttttatatgctggcaccttcatttccctctaactgctccaccttccttttccccccttcctctgcgtacttctctcttctttttttatgtgtcttcctccccatgtctgtgtgtatgagagagagaaagataatggcagagctggaatggaatacatcaatcatctaattccctcagtttatagatttggaaattaaggcccaagaattcaggtgacttgaccaaattcacatgactaaaaagtggcagagcaaggaacagaagccactactttttccactttactactctgtcctgttatctgcacatttgtgtgtgtgtatatgtgtggatatgtgtctaccccctcctctgtaatatgaaatacaaatagagggtttttttgctatgtgtagaataaaactgttctctattgtgtttgaagtgtttgtgggccttgatttttattgtactctctatggtcagtagcctagtaacagaaatggtttttatgcattcattctgtcactcagcaaatatttattgagcacctactatgtaccaaacatagatctaggtacgggggatactgcagtgtgaacagaacaaagccccttcccccatgggcttacattctagttgggaagacagataacaaacaaataactacataatgcgcttacataattttactggtagttctatgatgcaagacattgcaagtaagggttggaagaacatttctggataatattttgctcctttctctctgctggtacttgaacttattaccctaatactaggtttataccatttttattagtagattcgataaagccaattagatctgaggcaagagaaaatacaaattttatcttcaaacctttaaaaaaattttaaattaatatattaacttataaatatatatattcgttcatctataaaagatatatgtattaagaacttcaagccaggcatggtgacatgcacctgtagtgccagcactctggaggctggggcaggaagaccatttaagtctaggaacttgaggctgtggtgcattctgatcgcacctgtgactagccactgcactccagcctgggcagcatattagactcccatctttaaaaaaaaaaaaaaagccagggtagaatcctgtagtcccagctactctggaggctaaggcaggaggatcagtagagcccaggagttggaggcccgcctacacaagatagtgagaccacatcttaaactaaaaggaaccttgcttcctctcctatgcttgtctcccctgtggccctctaggtcctgtagataatcacttttattagatttttcatgttactttctggaaaacatgaatatatattatttttcccctttcactgttctataccttttttttttttaacttaacaacatgtccttaattcatacttttaaattagattttaaaattaactctagtccacttagttagaaacttgtgggcaaaaggcttattattactagggtgattatataatttatcatctaaaggagaacatgaaagaaagtgctgttactttacttggaggcaaaaacataaactgggactatcttagggaaaccaagatgtatggtcacttttgctagtacttgtctgcctagaacaagcacacctagaaacttaaaatggccgttattgagtggttagatcacaattacagtacctcagattaaagcttcaaaaagattatactcaattccgaattgtgctgctataaactcatgtgaccaaacaccacctgttccccaataacctatggaaataaaaaattttaaaaaaaaagattatactcataggtgtttcagacccataatagctcgttaatgttcagactggtctctggaaacttgtctctggtttcagtattgataatgaacagaacagtgataatattctagcagtctatacaaatctgtactaatgtttcatctatccattgtctttgggaaatgagttaatgcatgtaagtgaatgttccagataatagaactattctaccaagttttttaacttttttaataaaaaattataaaaagtatttgatatttcctttcttgaacaggatacaaaaaaatagtttaatcagttttgactactcaaggtcatcattgaatagattcattattgtctataccgtaatataaaacatagttatctcctgtttggtttctggtctccttcactgtcaggccgtcacctggctcttcatattactgaagtggtatctgctcctaacagttatttatccgtatttcttttatgttttgctgcttctaatctgctgggtaagcaggtaacaagtttgttaacaatatgtgtttattaagagagtacctaagctctgggtgaatgcctgagtgtgaacataatgcttgtatagggacattctaacagttagatttggtactcaagaggtcttttccttgggttctggtagtcttgcaaagggttgaactcattgaagatcttaagtaccagtaagtatgatatcactgtacttggttttttcactccagtcagtcatattttttggtctacatttagcagaaagcatctgccatatgttctctatggaaagctataaacagcaaatgttgggctaatagcagtctttttcctggaggccttcccattgcctttctgcctctctgacattatgaacatctctgcctcacttgtgggatagggccctttgggacaaactacctgtatctgattgaactagggtagggggtggccctgtgaatgtaacttccccagtggaccagcatacattttctctagactctgttggctttcatttgtatttccagtgagcactagtttccagggtgttctcagttttcactgtgcttatttggctgaattttgattaattcagtggtatccagttgtgctgtgtaatatttgttgatgatgctggaggtgttgtaagcaagtatgtcgaacttgctagttgatctctggctaaaccctgccttctgctattgctaacagtagaaaatgatcttcagagtcattgatttgctttttttactcatatctgtatagagatcataatttgtcacattattactgaattcaggttacctatacattaaaaatgccaaaaatctctcttttctctttgtacacataggtcccagtcatgcagggaacaggaatgcaaggagcaagtatacagggtggaagccagcctggcggctttagtcccgggcagaaccaagtcactccacaggatcatgagaaggtaagcaacactgtctgactgcctccttatgcacaattctagcctttttgattcctcttttcacagttaccatgtgacgatcctgggtcttcaaagtccctttggaggtgatgtttattctaacttagaactcttttatgatcttgttacctgaaaatttgtgagtctggtcctgaagttcctaatggatgtgaagttcttaagtggatgtaaatggcagcttattttatatttcacactcatctgccaatagcaggtttttcttgttcaggccagattgacctgaaaatccacaccctttttccttccctttctactttatccctaaaaacaatagtagattccccatgattatatctttctgtttttatatttgaccattgtggggagcttatgtctgatggaaaggctaaaatttgtgaaaaagagagactttcaaaacaggattaaaacttgaaggatttccagggctcacagataccatcttagtctccaggaactttgagttcatgaagttgtctgttttgaatcgtctaatcttaggtattttaatttatacttgttcttttcattgtaccttttctcaccagtttttttttattttttattttttttggaggggggctgttggtttttttctgtgtgaaatgttcttcctttttccattttgcttcatatcccactacagtagctttttggacagaagctggtggtgggttttttgttttgttttgtattttttagctgccatcattaaaactcactaccttttttttttcctctgcacaggctgctttgattatgcaggttctacaactgactgcagaccagattgccatgttgcctcctgagcaaaggcagagtatcctgattttaaaggaacaaatacagaaatccactggagcaccttgataggtgagcaaacttaatccccatctgagtaggactagctccttgtctattctgggtatatacttttaaccttaaccaacaagattgttctctcagcggccctcaatccactcagctagactcttctttacccttcagtaggtcagctcctgtagggatagagtaaggctatacaatgtttgttcagttgttgaattgcttataatctttcctaatgacaaaggtaatgtatgatcagtttaacaaaagtaatcatatacagaaatgtagaaggtgaaaggtaaaaagccctgtttcctcaatctcattccccagacaaaacctctaaatatagtttggtgtgtatccttctacaatcaattgtattattttattccaaactgtcctgtcaaaatggaaaaatacaaagcatttcaataaaatgtgtaaatattttgtttcttgtatttattttatagggaatattttgatgttgaactatagtagcacataatttaaggtagtaaatgtccgtcatcaccatcagtttctatatattttggagatcgctgtacccygctacccttatttttcttgctcatcatttaggcagaaagaatccaggggccaagcacagtggctgagccctgtaatctcagctttggcaggctgaggtggaaggattacttgagaccaggagttcaagaccagcctaagcaacatagtgagaccccatctttacaaaaattttttaaaaaattagccaggcatggtgagatgcgcctatagttccagctacttgtgaggccgaggtgggaggactggttgagtccaggaggtcagggctgcagtaagccatgattatgccactgcactctagcctgggtcacagagtgagactctgtgtcaaaaaaaaaaaaaaaaaaggatccaggtaacctgcttcataaataatcatgtgacaacttgattacacatacatgtatcagtgtttcttttttaaaaaaaatttccccagcattttgtattttataaacagttcttttttctaaaaacagtttaaaattcatgttgccccactatcaggtaggacagcacaatttaaatttctactttttaccccatccatattataattcctattcttatgttatataatagtgaactcatttaactattaataattaccactcttacaaaatatatcattttaatccatacttgtgatgtctttaaacatttaaactgcgactatgcatcatatatgtatttagaccttaaatgaattaatgagaagctatcatagatagaaggctcagtagacttttggtaccttaacgttttattccacaaaccccacatattctttttttttagtaaaagtatagactacctattacattcagaggaataaataaaaattatttcttttactaatttacttaagccagagaaggcattccctacaatgtgagaaaattactccttactgtttctggatagtagaggtagaaatgtttctgaaatttctttcattatagttttgcttataggatgtttaatttaaggccttgcatattaaccacaaggcaaagtttttgtctatttttttaccttttatttttaaataatcatagactcaaggaaagttggaaaaatagtacaaggagtctcatgtacccttcacccagtgtagtgcaaaaccaagaaattgacattggcacattactgttaacttgactgcaaactcagttttcaccattttaaaaaaactatcatgatttgtgtatatgtatgtgtggttctatgcaattttatgtgggcaagattttattgtgtgtctactggtgtttgtgcataccatggctaaagtgttgggttttcctccatcctatacctagctagttgtgatccatctctgccatcatggacaggcttctatactgttgtcattagagatgaatggttctcaaacaagggcagttttgccccctaggtgacattgtcttgagacgtttttggtcatcacaactttagggagtatggcatgctactggcattcagtgggtagaggccagagatactgctaaacatcccataatgcacaggatggtccccctcacccacttcccaatagcaactagtactccagcccaaaatgtcagtagtgctgaggttgagaaaccctgctgcaagggctgattgctttgaggagtcaggaggcaggagacagatactttgcaaatctgtcctggtgatttgattatatgcctgtcctccctcccctagcctttttattttttttcctgaagtttttccggaagagagctttgtcttcacttctaatggctttgtcctaacttcttcttacaggttttcaaaaatacctggcaagaaatctggaaattctataattttgttgaaatattgaaaaaagatgacctgcatcctaacccttgaatgactcaaatcagtgccaggtggaggactcccatcaccttctctcagaacaaaatcacttcattttattgtcttagtttgtatattttctgtgacttgaaataaactttgaacacaattttagtacactgcaaattgatacacatgacctttttgcttttaaaaagcttaacactaagggtgaaaccttagatgtgttttctacccttactgcagtattgtactttaacatattgccatagttttgtttttaagttaaccacttattcttcttgatgatatttgagaatttctcagaagcaatgttttctggaacttggtttttgtttagtttgcttccagtaagaattattataaggctttgccctctgaaaatattctagcacttcggagtcttctaggagaaaatatcacatgcttagagctataaaatggtcagaaggctaacagagcaaagagcctagcacagctgtgtgtttagtttagaaaaatccaaatatcaaaatgcatttgtttcaatagcaggtctgaacatgtataattcagagttaagacaaaaattgttttagcactggtttgagtgtgtcagcaacacaagagactgttgacatttacttgtgtgttcttaaacttatcagtctaggcagtcaactttgaaagtttaaaaagccactgatttttcacatgctcaagatgaaataaaaacagaaatcaaatgaacaaaatacatttcatcctatcttccaggcagtccctaacctgcagccctaccctgtaactacgtttattctgggaacttacaacacagaaaaccctaaaacttgtacattcttctcattttaagtggaccaaatgtagagcacagtcagattgctcattaggtctgctcctgcctgcttccttgcggataggtatgaacataattagtgccattagctctaatctatgggtcttattgcctagtatttctctctctcgccgcgccgccgcctcctcctctccccccaccccaaccccatctctctcgtagtggcattaaggaggaacatggtttctctctatcaggccaacctcaagaggttaagagttgccttaataatcagtaaagttctactggaactacttttgagccaatttatattcttggaattctatcccctgggttaggattatggtcaggtgaattaaaagcctggcataggcttagagaatgtaatagcatattgcttacatgtcaagcaaaagaatgcaaagataatcaactttttgagtgacaatgaaattgagggattttctactcatataaacatttataagaaatttgttgattaaggtatttcatattacaactttgcaagaaaaacttgctcaaagcaggtgaggagctttctgtgtatcctgctcatccccagttcaacttggatgttggctatgcataggatttattatattcattaccatgaatataatcacgaatttatgcctactcccataaatattcaagccttgggatattgattttggcagccatcatatcttgaagtgagtgtgtcaatatatttagacatggagaccaagagtgatgcctttctcattaggaactcgttgtaagtttcaagattccaaatcaaggtcattgaagatgaagttgtcatttggtcagtagttgtctaataagaatcatgtcttcaaggtttcattgtgcattttcccaaagccttattaaacctgaattagctgaaatccgggtgaacaaattggcaacagcagtggtatccctccctatgtaaacaaccatcagtattgttttactgttgtaataaatgaaacatgattagccaccatgagttcatgacctacctttattgtgctcagactagtgacaaaaaaaaaccaaaaacagttttatccctcaagccgtagaggttcctaaactattagaaacaaccatttgttcattcgtggtcacttaatggtagaaaaaatagataatataatgctaattcagtacaaccattcttctaatctataatgagttgaattgtctgggcacaatgaagtgtgaggtttctctcttaagagccctgggcttctctccttctagggattcactgtgacgactaacatcccagagccagtgtggtccttgtaggccgaggttgggtagatggcagaaataaaaagcattctgatagagaatgaaggcattttgcttatgttattagctgaatgattccttagcgatataggtaggagtccacaaaaatctatgaaaattataaattgttattttttaaactagacattaataaactcccttaatagtgataaagagctcctcttgactaaataagtcatcctaacatggagttcaagttttcacaatcgcttttaacagaataatacaagatgacagtatagctgacttgcaattataatacaatttcaattacaatgagcatactttctagattttctttcccaaatggagagcccaaaaagaagtaacaaaagactcattcatcaagtgaagaagaaaatcctttattttttgatgagcaaaaataataaattgctgttcacactggataagaccatatcaaaagtgacagtaaacatgtacactgttggtgttatatggggatggggttctcggtaattttgtttattatttatgtttattattatgttttatcattaattattcaataaatttttatttaaaaagtcaccctacttagaaatcttctgtgggggtgggagggacaaaagattacaaaccaaaactcaggagatggtaacactggaattgataaaatcacctgggattagttgtataactctgaaccaccaaacctctgctatcaagccttgctacagtcatggctgtccagaaagatttacagttatttttctgagaaaggatccatgggctttaagaacttcagaactttaagaacttcagaagttcttaagttgctgaagctcaagtaacgaagttgaatgcaatcaaaaaaagaataccagggagtcaaggcttgagaggcacattcttatcctaaagtgactgctcaaacctgacgagaccaagtaaattactgaagatacaaagagacaaaatgcagattaccgtccttattcctataactcaaaaattttctttgttgaagtagaattgaacctttctaggatccagactggaatatcggtgacagcatttgcgcaggctctttgccaaagtccgagggccacataagaaaactcccactacagacctgtaggaacagaacaatagtaagggctagaatgcagcaatgacagaatggagaaactgcctctgttaggcctctactacttccaagaaccttgaataaaaattcggttgtttactcccacgttcttcatggtagttttttaaccttttctgcgcacaaaccccaaatatgctctcagcccttaacactctcagcactcagccttccctgttttgagaacacagatgacagacataagacagtgcagtggctaagtgccagactgtgcagccagtctgtctgggttgtctgggctcaaatctcagctctgacatttatcccacctgtgggactttgggcacatttctttttttcttttttcttttctttttttgagatggagtcttgctctgtcccccagctggagtgcagtggcacaatctcggttcactgcaacctccacctcccaggttcaagcaattttcctgcctcagcctcctgagtagctgggactacaggcacgcaccagcatgcccagctaaattttgtatttttattagagatggggtttcaccatgttggccaggctggtctcaaactcctgacctcaagtgatccgcctgcctcagcctccctaagtgctgggattacaggcgtgagccacaatgtccgacaagggaaaatttcttaacctctctctgtttcagctttcccacctgtaaaatggggataaaaatagtactcaccacatagggttgttttaaggattaaataagaacatgtaaataaattagaaaaatgcctggcacatagcaagtacatatgtattagctcccattaaacccatccactgtgagcttatccctacctcaaaatttctcctagtggagaggtagtgttctttcttgccaaagctaatctttccaactatgctctgggtctcaccgtcttcttccttctctcatacctttctctccccctcttttttaaaaatataattatggtatagtttctataccataaaattcgcccctttgaagtgtgcaatttgtgctttttagcacagccacaaagttatgcaaccatcaccactatctaattccagaacattttcatcatccgcaaagaaaccccatccacattagcagtcctcatttcctcccaactaccctgtcctacccaagacaatcactttactttctgtctctgtgggtatgcctatcctgaatgtttcacataagtggaatcatacaatacatggcctttggtgtctggtgtttttcagcatgatgttttcaagatttgtccatgttgtagcatgattcagtactttgttttttttttaatagctaaataatattccagtatgtgaatatactacatttgcttcatccattcatctattgatggatgcttggcttgttttcacttcggggctattatgagtaatgctgctatgtacatcatgtacaagtttttgtgtagacatatattttcatttctcttgggtgtataacaaggagtgggattgctgggtcatatggaaactatgtgttttttttttttttttttttttgagacagagtcttgcactgtcacccgggctggagtacaatggtatgatctggggtcactgcaacctccacctcccgggttcaagcgattctcctgcctcagcctccctagtagctgggattacaggtgcccgccaccatgcccagctaattcttttcaccttttttttttttaatggaatctcgctgtcgcccaggctggagcgcagtggcacgatcttggctcactgcaagctctgcctcctgggttcacgccactctcctgcctcagcttcccaagtagctgggactacaggcgcccgccaccgcacccggctaatttttttttgtatgtttagtaaagacagggtttcaccgtgttagccaggatggtctcgatctcctgacctcgtgatccacccacctcggcctcccaaagtgctgggattacaggcatgagccaccacgcccggcctaattttttgtatttttagtagagacaaggtttcactatgttggccaggctggtcttgaactcctgacctcgtgatccatctgccttggcctcccaaagtgctgggattacaggcgcgagccaccatgcccagctggaaactgtgtttaacactttgaggaactgccaaagagttttccccgagtgtggtatcatttcacatttccacaagcaatgtactaggattgcaacttctccacttccttgccaatactattgtccatcttttattatggccatcttagtcctctcccctctttcatgtatttattttattttatgtactggtccttgttctgtctataaatatgcttaagctaaatgaacatttcctgaccctgctactcttccaacactattgaccacgcttctctaatatttgctcccttgggttctgtgacaccacttctctgtgtactcctatttcttccctggtttgtctttttcccttcccatataacctaggcagcattccttggtactctgtccctcgctagtctctctctctccctccctctctctctctctcctgacaacctcatactctctcaaaacttcagttacattcaacatgataattagcatcttttatgcttatatgctgctttaaaatttacaaagcattttttcatatattgtctcacttaattgtcataacaaccctgcaagtgagtagagcaggcattcactaatatgacccttgtcttacagatgaggaatcaagatcagagagttcagaagttcaaggtctcataactagaaagtgtcagaaccagaataagggccgggcatggtggctcatgctgtaatcccagcactttgggaggctgaggtgagtgaatcacctgaggtcaggagttcgagaccagcctggccaatatggcgaaaccccatctctactaaaaatacaaaaaattagctggatgtggtggtggatgcctgtaatcccagctactcgggaggctgaggcaggagaactgcttgaacccaggaggtggaggttgcagtgagccgagatggcaccattgcactccagcctgggtgacaaagcaagactgtgtctcaagaaaaaaagagagaaccagcatgaggacccaggatcatctgaatccaagtcactaagtgctctagccactgccttcctgaagcctttcctaatcaccccatgtggccgtagacttttcttccctccagcatccgtgaacctctttcacggagtgcattattctgctttgaggtgattgtgtgcatctcttattcaaatgtatgttccttgtgggcaagaaccatatcctatttctctttcaacctccaaagcttctagaatggtgagagctgagcttataaaaggtaaccaaggcggggcttggtggatcatgcctgtaatctcagcacttttgggggctgaggcaggtggatcacctgaggtcaggagttcgagattagcctgaccaacgtggtgaaacaccatctctactaaaaatacaacaaattagctgggcatggtggtgggcacctgtaatcccagctacatgggaggctgaggcaggagaatcgcttgaacccgggattcggagattgcagcaagcagagatcgcaccactgcactccagcctgggcgacaagagcgaaactccatctcaaaaaaaaaaaaaaaaaaaggtaatcaagaatatttgtagcattgaattgatcatcacctccctacttgttcagggaatctcagcttcatctccttcccattggaatggctgatttcatagcaccaggattttttgtgctgtaacatgtctcaaaaccctccagaaagattgagctcaggtggccagtaaactagataatacctttgttactttaagtagagattattgagtcccctccccgcaaaaatgcatttgaattgctccagttctctagtttgtttggtagtatagatcagaagtgggtccacttgcctcactgtttgaatggagtttgctggggcaaaaaaacctcttttcatcattttcaagatcatgaccctatttttctaaaaccccagatgaaatttcctcggtcttcaccaagaatctaagaatggcacaaaagatttctgccccagagatcttttcttaagagtgttcaacatgttgtaatacctttcctaaatcctaactccgcactcatctttttttttttcttttgagacagagtttctctcttgttgcccaggctggagtgcaatggcgctatctcagctcattgcaacctctgcctcccaggttcaagcaattctccttgcctcagcctcccaagtagctgggattacaggcatgtgccaccacgcctagctaatttttgtatttttagtagtgacggggttttgccaagttggccagactggtctcgaactcctgacctcaggtgatccacccacttcggcctcccaaagtgctgagattacaggcagtaagccaccacgcacggcccctgtaaactcatcttactagaggaaaatatacttacttggggtgggaggtagctattgtagaaaactcattgtcccacattggtctcccaaaggaggttttctgtttcagacctgtcacgatgtcagtggccttgtcaaagtttaatgctgcatgaccaacctggattcagaggaataaaagttagaaaaaccaagtcctaggctgggtgcgtggctcacgcctgtaatcccaatactttgggaggccgaggtgggtggatcacctgaggtcaggagttcgagactagcctgaccaacgtggtgagacccccatctctactaaaaattcaaaattagctgggcatggtggcgcatgcctgtaatcccagttactcgggaggctaaggcaggagaattgcttaaacccaggaggcagaggttgtggtgagccaagatcgcaccattgcactccagcctgtgcaacaagagtgaaactctgtctcaaaaagaaaaaaaagaagaagaaagaaagaaaagaaaaaccaagtcctgatagctgcctcttctttccaccacttttaaacttgtgtgtgagtgtgagggcaggtaggaaatcataagaaataacttctaatccatatgcactatcctttgtctgacattcgtcttatgtttagtaggggaattagtgtgttatttggactcacaatattg

SEQ ID NO: 97485 - DNA, 22931 bp, Homo sapiens
ttgagctaggagtctattttccatagaacatgttctcctaaaaaaattggctagtttttcatgaaactcacaaaaatcttcttaattcttaatgaagtagtagtaatataatattaatgatactattttagccttaatgactcaaaggaggtgtttaataagtgcttttattaaaaaagaaaaaacattcaacctttagtgtgtaattctacgggtgaacgtcaggaaaactaatctaaaaatttatctctctgtttctcaattgttacaagatgtatttgaaagattctaagcataataacaagataaacactggttattgagtcaagtagaaaaacatgcaattctatattttgcagataagtacataggaattaatgaatatttaagggtaataaaactagatacaacatatattgattatgtaaaaatatatgtgcttggaaaagataaaaaaagaagctgccatcctcctaccacaccaaaaatgtaagaagatatatcacaaactgatattctttctgtacacagaaggattatgagaagaaaatgagaaaaccaaatgatttctcaggcaatctggaggttttcaggcttttatattttgtgagtatgaatggaagtcaaaggcgattttacagatagagaatagatagatagatagatagatagatagatagatagatagatagatagataaacaatgaataatacatgtgatcttaggaaaatacatacaatttgaaaagagaaaagattccccagaccaagtatctctcccataaaagtcatccttggggcctaaaagtactatcagaagacaatgaaatttctggttaaaatgtaaatatgtgtctggaagggatcatatctttctaactagtttaagaggttggtttagttgagccacaagtgaatggacaaattaagtgaactccctaaacatgaaggatgtggatggagggtttcattgggagagggcagtttgggaccctgagcagcataagggaactggaaactcatgttggaagaagcaaagaactcagaggcattttgcgcacccttgagtatctttatgatactgggcttctcaagataatcattgagtcattactactctgcaagaacagggcataatgagaagtgatatcttgctttgttttggttttttgatcaagaaaagcaatatcttttgcttcatataagcattcttttattattttacccaccgtgaatttgcttttagattagctccacacatcacaccttctgctggtaagagtgagtgagcctttgagggaagtttttgttgaatttggctctcctggggatggttgattttagctttccttgactgattttgtgaactattgaattgtctcaaggttgctcttaaagaggattttccattgcaaatatgagataaacacccaagtctgtaatatccatactcctcagcccagctactttgaaaggcaaggtttttttgtttgtttgcttttttcatcagccacttttctcctcttggaagtagtcatagaagagttttatattttatagagaaaatggcccatattattcccatcaacggtggtcccttctataatacctgactagtagaatcacagcttacaactgattacttgattcagacactggatcactaaagtagaggagacagatggggccaggcagagtttgattctctccatgcctcagtttttccactcatcataggaaaagtattcctgaaattagatcatacaagatagaatggccatggactgcctgacaaggtcggagtaggtaggtgtctctctgatgttgtggaaagtgaacaaaggagtcttagtatgataggtcggggtgtgaatgccagctttgaaaagaattttcacctttgcatttcagttctgtcttctgttgaatggggctcatgcctggcttgttgctttgttgtgaggcttaatgggaatgtatgtaaagaacctggcatagggtaagtacacagcaagtggctatgaatggaaataaaatctctgaactacctagcccaatgttccaggcacaggagaagcctgctacatataagtgtccttgctctttcctcctcccatgatgtatatcagcaactttctgaatattgacatcaggagtcacacacaatgcaattaagagattgttatgggctgaattttgtccccctcaaattaatatgttgaagttctaaccttgataacctcagaatgtgaccatatttggagataaggaccttatagaggtaattcagttaaaatgaggtctttagagtgggccctaaactgacctgactggtgtccttataagtagaggaaacctgcacacaaacacatacagagagaaaatgttctgaagacacaggaaaaagatggccatctaccagccaaagagagagagaggccaggaacagctccttcccgatggccctcagaaggaaccaaccctgccagcatcttgatctcagatatctagcctccagaactgtgagaaaatgcatgtctgctgtttcagccatccagtcagtggtatcttgctgtagcagccctagcaaattcatccagtgaaattaagacagaacattcaataaacacgtaaattaagccatatattgtcagcaaaggaagatattttttgaataagttctctaatgtagtttctctagtttccatatcctatactacaagaagcaatatcaaagaacatgggccttaccatattagaaaaacaaggctgtcccccgtcctgggcccctttttgaaaaaaaaattgagacaagatcttgctgtttcacccaggtggagtacagtggcactattgtggctcactgccacaatgtgcctgccactgtgactcgacctcccaggctcaagcaatactcccaccgcagcctcccaggtagctggaactacagacaggcaccatcatgcctgaactaatttttgtattttcttgtagagatggggcttggccatgttacccaggctagtctccaactcctgggctcaagcaatctgcccacctcagcctcccaaagtgctggaattacaggtatgagccaccacaccctcctttttcttaaaacaaaattatttatgggcatatgctttttaaaacattatcacttaatgtaagttttaagaacataaaatagtggtggtactgggaatgaattttactccaatttctttttttttttttattgttataatggttacaactaatctcatccatttaggccactatttctgaggactattaattttacagtgaccaccagatgaaaatcattagtttattcttcatgtagcagaccaggagtgtgtgtctcacatgagatgccatgaattgcatttgaaattttagaggcacagcatagactatccaccatcttgtcactgagctccttcccattagcagaacagataatggaaattttccttacttctttttgcatgattcttcccataatggtaatttgccttctggacagaatatacagtggctgaggttttttgttgttgttgtatgttttttgtttgttttttttgtgcttatactacaatagctatttaattataaagttaataattacatgtaatctcaggaaaatcttggaacgcatctgtgaaatggggataaaaataccatctagagcccagagtaaatgccccactctaggattttgtccagttctgagatctgtgaatgtgtgaatttgactacagttcaggtactgtgtcagagtaatgtaatttcaatgctttttttcaacccactacccatttttatcatttgcaagtaccttattacttctccatctgtcggagaaaaccctaggatagcccttgttagttagccacaggaaatctggttataccccaatttttagttgaaatttctgccactggcagagttctcagtgacatcattcttctatccacacttttttcacagaagtatttttataataatactttctagtaaaaacacaaatagaagcagaaaagagcacctcttaaaaatctctaatcaaacctggagccagctctgttttttgccctgtacattatttggaaactacagatcccccccgccattgctatcctggatccattgcagctggaatagactggaataagactgatgaaattcgggtcaagtgtctgaaaatctgggtgtttgtttgaaggcactcaaatatcatctctaaaagatttggctccatttcctgttgcatcattcataaacttcctcaggctcgtaatcgggttatttatttaaatcgaatgcatttcagaaagttccttggcttgagacaatattgactgttgcttcattttgtgacataagcactcggtgttgatcagtcttgtttaacccagttgatgatggacaggaggtcagcatggctaaatgaaatttattggtagtttgttaaagaatactaatttaacctataatttctgccttctccacaaccaagccatcacttcttctttgaaaaagtattcagttaatctatctcaagtttcctttttttcccttttctccattacattgacatgtgtccacattgcccatatgaacacagagtagctaaggcagaatcaaaatggtcaggggcacagcctaaatgtttacacactgaattcaagatcttaggcaagtttaacacattcacattttctttatactatatttatagcatcatttcctcagcctgtgttataagccactgagtaattttgactttttgttcaaatatcataaaagttgttaatataagcatgacagttttagctatcattcttatttccttttttctagatcatctttcaactagttaatataaacaattttctcaaataaaaatgagctttccttttctgaaagagctgtctcttttcccagttgaaaaaaaaatgcaaactaaagatgttcaaaacgttgtctttgagactgacagatgacctgcctgctttcactgttctcattcaaactcagctggaattctgatgaccagacatcacagagcttcatgacaggccagtggctctgatgacggcaaagcacaccacaggcagtaaattgactcagaaaagcaaatgaacaattatttcaattactgaaaaataaatatcttatatccattagaaattaaatcttttctttaaataaagctgctaagcatttccccaaaactttcatatgaggaatctggggagcataaaattaaatgatgataatgatgatcttaaaatacttcctgctatgtttagtgcttttgaaaatttaattactatgtacgtatcttataaaactacagaagtgcaaatttaaaatttccaaccttttaaatttcataaactgaggtcacctagcttttacttttgatattaaattttggtattttgctttatttttcaatttttactctagcattttataagattgagagatgaagccagctggacttcctgggtcgagtggggacttgaagaacttttctgtctagctagaagattgtaaacgcaccaatcagtgctctgtgtctagctaaaggattgtaaatgcaccaatcaacactctgtaaaaatgcaccaatcagcgctctgggtctcgctaaaggattgtaaacgcaccaatcagcactctgtaaaaacgcaccaaatcagcactctgtgtccagctaaaggattgtaaatacaccaatcagcattctgcaaaatggaccaaacagcactctgtaaaacggaccaatcaacgctctgtaaaatggatcaatcagcaggacgtgggcagggacaaataagggaataaaagctggccaccccagccagcaactgcaacacgctcaggtcccctttcacattgaggaagctttgttcttaagctcttcacaataaatcttgctgctgctcactctttgggtccacaccacctttaagagctgtaacacttgccgtgaaggtctgcagcttcattcttgaagtcagcaagaccatgaacccagcagaaggaagaaactcaggacacatctgaaggaacagactccagacccaccacctttaagagctgtaacactcaccacgaaggtccgcggcttcattcttgcagtcagcgagaccaagaacccactggaaggaaccaattctggacacactttggtgacccagatggggcaatcagctatcgccaagtggggagtaccatcggatccctttcacttgctattctgtcctacttttccttagaatttgggggctaaatactgggcacctgtcagccagttgaaagtgactagtgcagctgccagactaaagacatgagtgtcaggctttctgggaaagggctctctaacaacccccaactctttggagttggaagcgttggtttgcctggaaccaggttccacatctcctgtacttctgggctgagccgagggtcaccagagaggaaagccattcagcttcggggtcccracaacaagttggttgaccttgtggccatgagtggaactctcaaagtyacatcgcccaagtgagacttgcccttctatcctatctatcctgacccttgcctcctgggtcctaacgcctgtcagacaaacttcttctcgcctctcttctccgaggctagttccacttctaaaagccactcctggccgggtgcgttggctcatgcctgtaatcccagcactttgagaggccaaggtgggtggatcatgaggtcaggagatcgagaccatcctggctaacacagtgaaaccttgtctctactaaaaatacaaaaaattagccgggcgtggtggtgggcccctgtagtgccagctacttgggaggctgagacaggagaatggcatgaactggggaggccgagattgtgccactgcactctagcctgggtgacacagcaagactccatctcacaaaaaaaaaaaaaaaaaaaaaaaaaaaaagaataaaaaccactccctgtctctggtgcttttccagtttctcctataagaataatttctagtataaactccaggactccattcccttctttaggcacccgggctcatcaatcagaaagacatattttttgcccaaagccccatcgtggtgggggaggggcagactatcttctctgaaatgttaggatccctcctcagactagcaggcctaacaaaagctattcctgaagctaggatatggggagcttcagaaatgatatccttcctattcaggtgaggacaaaaggcatcactcctccaaccctggagatcacttccctccctcggggtatggccctccacttcatttttggggcataacatctttacaggacaggggtaaagtcccaatactaacaggagaatgcttaggactccaacaggttttcgagaatgtgtcagtaagggccactaaatctgaccttcctcagtcctctttgtggtctaagaggacaggcaagggtgcaggtttttgagaatgtgttagtaagggccactaaatccaaccttcctcagtcctccttgtggtctaggaggaaaactagtgtttctgctgctgcgtaggtgagtgcaactattctgatcagcagggtctagggactgttgcgggttcttgggtagggggggtgtggggaaacaaacaaaccaaaactgcggacggttttgtctttcaggtgggaaacactcaggtatcaaccggcttacccttgaaatgcatcctaagctattgggaccaatttgacccgcaaaccctgaaaaagaggcaacacatttttttctgcactatggcctggccccagtattctctctctgatggrgaaaaatggtcacctgagggaagtataaattacaatactatcctgcagcttgatcttttctgtaagagggaaggtaaatggagtgaaataccttatgtccaagctttcctttcattgaaggagaatccacaactatgcaaagcttgcaatttacatcccactagacgacctctcagcttatccccatatcctagcctccctattgctccccttcctattaatgataagcctcctctaatctcccctggccagaaggaaacaagcaaggaaatctccaaaggaccacaaaaacccccgggctatcggttatgttcccttcaagctgtaggggaaggggaatttggcccaacccgggtacacgtccccttctccctctctgatataaagcagatcaaagcagacccatggaagttttcagatgatcctgataggtacacagatgtcctacaggatctagggcaaacctttgacctcacttggagagaagtcatgctactgttagatcaaaacctggcctttagttaaaagaatgcagctttagctgcagcctgagagtttggagatacctggtatcttagtcaagtaaatgatagaatgacagccaaagaaagggacaaattccctaccagtcagcaagccatccccagtatggagccccactgggacctcaactcagatcatggggactggagtcaaaaacatctgttgacctgtgttctagaaggactaagaattaggaaaaagtccgtgaattattaaatgatgtccaccgtaactcagggaaaggaagaaaatccttctgccttcctcgagcggctacgggaggccttaagaaaatatactcccctgtcacctgactcactcaagggtcaattggtcctaaaagataagtttattacccaatcagctgcatatatcaggagaaagctccaaaagtgagccctgggtcctgaacaaaatctggaggcattattaaacctggcaacctcagcgttctataatagggaccaggggaacaggccgaaaaggaaaagcgagatcagaggaaggctgcagccttagtcatggccctcagacaaacaaacctcagtggttcagagaggacagaaaatggagcaggccaatcaccgggtagggcttgttatcagtgtggtttgcaaggacactttattttttttttaaacttttaattaaaaagtaaactttaatgtcgaaaatgcaaacttggggaagacagaaaagatcacacacaaggctgtcacttaacacttggaaggttgcacagtggctgggcagaggtgctcctcacttcccagatggggcagcgaccaggcagagacacttctcacttcccagacggtggggcggccgggcagaggcactcctcccttctcagacagttggtggccgggcagagggcattcctcacatcccagatggttggtggccaggcagaggcgctcctcacttcccagacagttggtggctgggcagaggcgctcctcacttcccagacagttggtggccgggcagaggtgctcctcacttcccagatgaggcagcggccagacagaggcgctcctcacttcccagactgggcggcagccaggcagaggtgctccttacttcccagatggttggcggccgggcagaggcactcctcacttaccagtcagttgggcggcagggcagagacgctcctcacttcccagatggggtggcggccaggcagagacactcttcacttactagacagggcagcggccrggcagaggtgctcctcagttcccagacagtgggcagctgggcagaggcacttctcacttcctggatggtgggcagtcagtccgaggtgctcctcacatgccagatggggcagcagctgggcagaggccctcatcacttcccacatggttggcggccaggcagaggtgctcctcacttcacaggcggttggcaggccggcaaaggcactcctcacttgccagatggggtggcagctgggcagaggcactcctcacatcccagacagtgggcagctgggcagaggcgctccacacttcccagatggttgggcagccrggcagaggcgctcctcacatcccagatggggtggcagctgggcagaggtgctcctcacttcccagatggggcagcagccgggcagaggcactcctcatgcaaggacactttaaaaaagattgtcctatgagaaacaagctgccccctcgcccatgtccactatgccgaggcaatcactggacagcacactgccccagaggacaaaggttctctgggccagaagcccccaaccagatgatccaacaacaggactgagggtgcctggggcaagcaccagctcattgatggccaggaaattgacttcctcctggacactggcatggctttctcattgttaatctcctgtcctggacagctgtcctcaaggtctgttaccatctgaggaatcctggaacagcctgtaatcaggtatttcttccacctcctcagttgtcactgggagacttcgctacagatagtaagtatgcttatctaatcccacatgcccatactgcaatatggaaagaaagggagttcctaacctctgggggaacccccattaaataccacaaggaaatcatggagttgttgcacgcagtgcaaaaacccaaggaggtggcagtcttacactgtcgaagccatcgaaaaggggaaggtgaggggagaacagcagcataagcggctagcagaggcagggaaagaccagcagaaaggaaagagagaaagagaaagtcagagagagagagagagagagaggaagagacagagacaaagaggagtcagagagacagagaaagagacagaaagtcaaagagagagaggaagagacagagaaaaagagggagtcagagagagagagaaagagagagacagaaagtcaaagagagaaaggaagaaacagacaaagagggagtcagaaagagagagacaaagaagaaaaagaaaaagaaagagagatgaaaatactaaagaaaacacagtgtatcctattcctttaaaagccagggtaaatttaaaacctataattgataattgaaggtcttctccgtggtactccagtaccaccttgttgtcagtgtaaacaagggcatagcccgaaagcactgaggccactgacaacccatagcyttcctaacaaaaatccttaacccagcaggtttcctaacaggggatctaaatcttaattaccatacaaaggtctgaccagaccaaggaggaactcccttcaggacaggagatagatgtttcctcccaggcgattaagggaaaaagacacaatgggtattcagtaaatgataaggaaactcttgcagaagcagggttaggaaaattgcctaacaactggtctgctcaaacgtgccagctgtttgcactcagccaaaccttaaagtacttacagaatcaggaaggagccatytataccaattctaagttaatatgggctgaatgaggtcttattaatagcaaagaataattgaaatcccaaacttacaaggttttcaacaaaagtaaagtttgctaaaaaagttaacagtgtaacttgtattatcctaacttctaatcttacggaaatcataccctatctgtgcccctcaaagctcaagtccaagagtgcagggccatacaactaatacccctacttatacggttaggaatggctgctgctacagaaactagaatagcaggtatatctactacattatcctactactacaaactctcaaaggatttctcagacagtttgcaagaaataacaaaatctatccttactctacaatcccaaatagactctttggcagcagtgactctccaaaaccgccaaggcctagacctcctcaatgctgagaaaggaggactctgcaccttcttaggggaagagtgttgtttttacactaaccagtcagggatagtaggaaacgctgccyggcatttacaggaaaaggcttctgaaatcagacaatgcctttcaaattcttataccaacctctggagttgcacaacatggcttctcccctttctaggtcccgtgactgccatcttgctattactcgccttcaggccctgtatttttaacctccttgtcaaatttgtttcctctaggatcaaggccatcgagctacaggtggtcttacaaatggaaccccaaatgagctcaactaacaacttctaccaaggacctctggactgacccactgaccctttcactggcctaaagagttcacctctggaggacactacaactgcagggctgctactttgcccctatccagcaggaagtagctacagtggtcattgcccaattcccaacagcagttggggtgtcctgtttagaggggggattgagaggtgaagccagctggacttcctgggtcgagtggggacttggagaacttttctgtctagctagaggattggaaacgcaccaatcagtgctctgtgtctagctaaaggattgtaaatgcaccaatcagcactctgtaaaaacgcaccaaatcagtgctctgtgtctagctaaaggattgtaaacacatcaatcagcactctgtaaaatggaccaatcagcactctgtaaaatggaccaatcaaygctctgtaaaatggatcaatcagcaggacatgggaggggacaaataagggaakaaaagcttgccaccccagccagcagcagcaacccacttgggtccccttccacgctgtgaaagttttgttcttttgctcttcacagtaaatcttgctgttgctcactctttgggtccacaccacctttaagagctgtgacactcatcacgaacgtccacggcttcattcttgaagtcagcgagaccacraacccaccaaaaggaagaaactctggacacatctgaaggaacaaactccagacacaccatccttaagagctgtaacactcaccgcgaaggtccgcggcttcattcttgaagtcagcaaaaccaagaacccactggaaggaaccaattctggacacaagatgaatactaaattatgattattggtagtttgaattactttctgttcatttctttctgagcctgttctttagaaatgagcttttgaaacatctgaacatgcaccaaatgaggatgcctcacagggcctagtctgtcagtaagcacactgctctccatccccagaaatgagctgaccagaaatatcaycagggtaatttgacatttgctaagaatataaggtcccccacgtaccctcacagtatcataaatctcagtaatttctgtcagcaaaggcaaaggttcatctaattgcaggcttcccttttatggagcgagaaccaaagttcagcaactcccagctggcctctggtttcaagygggataaacyaactgtgcaggaaagacttccctggcatctgtgtttactcttgactgacacgttatcaagatcccaccctctgctactttctggaatcctgcgtaaaaaaactatttgtatttcatctatgagggtatgcacatttattttgacgacactgtttatttgggaagcaccatctctccaagaatgtcacattagtaactggtaatgaggaatttttttcccacaattcccatcactatccttaaagttcttgtttcttacacgaggtgtaatagttaatgctttgatactctctctagtcattggtcaaagctgcaatttaccrtcatatatttatctaaagcaaacttccttactgaataaggcaaaatgtcaacatagaagtgactaaataaagcaccaaattgtcaggataattcgtgaactgttgttggattgtagtatttatatgacaactccgtggaggcattacttaatcagaagagctaatgtaaagtacctctgggtgacattcaaccacaagaggaaaagtgatataggataatgacgtaacaattgaagaatagaaggatgtaaaaataagggtgtgtgtggaatgctcatttatttgttagtgaaatgaaatgtttgagcatctacatgctctgagagactgaaaaggagagaacgaaaataagtggaagtaagcctctggagaagttcagagggaataaaatttgtagaaaaacgtaggtcagacttgaataggggaatgtcatgtcatcctctaaaaagaaggaaaagagggaggttggagcagaaccagagacagatctttggttatttttcttttctctgtggagtgtgaggcaagatcatataatgttaatttaaaagttgcaagtaaaggaaaaagctcctggaaaggggtaaatatttataacaactccttcagatagaatagaaaacacaccagaaaccagcaaagaagctgaaagcagcagagtatccaatggggatagcgatggatttgtaccatctccatttcatacacatacttacctggtttttctccagcaacgcctgactgctggtggttggagcaggaaaaatcgattattggcaagatccaaattgggagtaacaaataaaaagggtaggaatagaagcagttggcaagggtactcttaaagtaattgacctaggctacacagagaaggaagcaagatccagaggaagctcattgactatgagaaagtgcatatgtttatctgtatcaggggcagggatcgtggggagtttaaagaatgaaagtcctgctgaactggaaccatagctatagggggagaaagaaactaagagagctggaagtaaagaaggtcactgtccaagagtgaactgtcagatttagagatttcagatatagctgtctggagcaatgtcaaagcctgaggacttgccttggaagtrggtttctaaaaatcgggtgctttagtgcttaaaatgaaaactgatgaaagtgtgaggtcaaagcatcagagtgctgaatgttcatccacatggacttcaawgttaagaatactctcagaagtaggaaaggagaggacatatgtgagccacatatttgataaatatcagggaataatctggaggtgacgggcaacagcaacaaggactgacagaagctatggaaattgccaaagaggagaggctttccttttggtcagaaagcagagatctgcattatcaacatggaaagataagacaacacttggtccacctcacaaggttactcagggactcacataaaataatggacataataagtcctccaaggagtgttaaatgtaatttaaatgaaaattactattatcatgtataaaattatgtatagatatagatattaaagtctgtacacacacacacaaaagaccttatcagtcttagatactgtcaataccatttactattaatatatcagcaactcttataatttacatcttagactttatattaacaattctcaaagmatttcatgcacatatttcagtatcttctcacaaaaaccttgggagataaatagtgtagatgttgttattcacagatgaggaaactgaggatcagagacaagtagtgatttggctaaggccgctgttagtgacagagccaagactgaaattttgatgaaagaaatttacaacttctaactgctataggacaggagaaagctttttaccaggtgtttatttgcttcctgtttttcctatacaacaacatctaggacatttggacacctgataactctgttctatattttttttcttaattaccatgtattagaatattagaactctgtgaacttaaatgtattgaatttgcaaggaaactctaacctcaacagctaatttcctcttcaaggctccaaatgtttacctatttggtacaactgctttccaaactgtccttgataacaaagacactctgttcttgaaaaatttgatcatcgaaaaagaagaaaatcatttttcattgattttcaggcaaatatgatgctacttttaatagaaatgtgtctactacattcaaacaaaatgggaatatttcaacayccaaagcattctttaggttagttctcaaaggagatttttgagttggaactctctcctaaccaaaattatgctttcaataataactatatttttatgttaattgcttgcttaatgattacattttaaactttgtgggcctaattttcctcgtctgtgatccctgggattgatgcgacaaactttttgtaaagtgtcttgcacttgtgaaacattcagtaattagtaagggtgattttaatcagccataatttgtaattctgaatttcatccttagagtatttccttcttttgtgtaaaatgtatcactagggtgacaccaacaagagaaaataaactattgcaaacttgaatggttgcaaacttgaaaccacagcctaacgtaggagaggtttacatactaattacttaaaatgtgaagcagatagggaatcatctccttaagcaagatacaaatacctgaaaacaaagagaaaatattcagyaacttcagctacattaatagtaagaacttctrtgcttcaaaaacacacaaaaaaggaagtgaaaagacaattcacaaactggaacatatattataaaccaacagtatgagtcatcgttaatctgtttatgacaccaggcaacagcaagtaaatagttctgtaaggaactccactcatactgcttttactgctarggtgtccagcttgctactgtgtccctgtgatttaaaagacacaggaaagatacatctttagtttagttttgtttttcctgcttctttaacatctctctgcatcttggttcatgcacaattggagactcatcacacraacagtctaagactcgtcaaagtcatgcaactagaacagggttcttcagtagcctctgtgtctgtcctactcctcagttcatggctcagagctggagctcccttcactctcccctccgttcttccctcttcttagccttagatatgcccttctccttttcccgtctctgcagggccagccggggtgtccagaataccaagggccttcagatgttggatgaccagtatgtcaccaatatcacaccctgtgagggagatrgaaactaggcctgctggtaccaagagttgggctagggagggagtgagggtggaggacaaaagaacagggagaggaagctagctcatccgagaactttgatgctaaatttccttttggagcagaagccaattcctgtctagatgcaggcatgagaaacaagcaaaatggcagcagccgcgtcggcaaaagtaaacccagctgtattcctagggactaactgcctcatcaaggcctcgtgcctgcataagtgaagaatgggaaagagacctaaataggtgtactatgcaattcctgattgttcttcctaaatgaagcttggtgcaatcgattttgaaaaagctaaatggccttaataataagggaaacacttccatagtactgtattacgtgttgagctctgtcctaagcaggtaacacacacgaactcatttacttctcagtacagccccttagagggtatctattattaggtcaaaccatatgaaattgccaacactcaaccattttgacctacaaagggcaattgtgcatggttcaatctgcatttcacctgcattttacagatgaagaaagccaaatgcagaacattcaagtaacttgctagtaagtgacaaaccctgatctaggcaatagggctcctgtttctgtggccgtgattaactgtggaaatatctgcctctctaccacactgaaataaaatgatggaaatggtttcttccaacctaaaaattctatccacgaatctgtctcccagtctccacacacctatctcttcttgacttgcctgtttcttttgaaatgatatcactgctcactcagtcactcagctggaaatctaagaatggattttgatttctttatttctctaccaccagaattcaaatcatatttattaagtctatctcagcagaagctgcagaatcataggacatgagagtggaaaggaactttaaagataatctagtcgtttatctgatgtagacatagagcacaatcaggacaatagtctgaactcctgggttctggtcactgctcttctctgtctactacagttgtcacaatggacaaatgctgtggataatacctctttgcttctccagaacttcgggaccaactgtaatgctgtaactctcacatatgacaatagcttgactcactaaacacatactcagtgtcaatcactcttctaacggaagaatgaattagcagatcaactctatggtggttactattataaaccccatttaacaaatagaaaactaaggcacagagaaataaagtgatttgtccacggtcacacatcttgtagactagctctagaggctatgtcctccattcatccttcatcctgtcctatccttcagtgggcaaacctcagactttgagaaggggttcccaggtctcccctcactctgggctgagttgaatgtcctatctgccaaactctcacagcctctattcattatcacatttatgtaagtgactacttagttgtctattttctccactggattgcaaatgccttcagggcaatgactgtgttttactcttcttaatattcacagaatttaatacaatacttggtacaataatcattgaataaatactcgttgaatgaatgcgtcaaagaatgaatggccacctagctaatctttctgccttcaatctctccttattccatgtcttccaccttgatgagagttgggggaactaatgagacagtaaatgtgtgagtataatgaagacaagtgggccttgtcttcatttgccttccttaataataaaagataagccttttggttatttctccccaaatgtttggtcaagacctttccacactattaatttttttcaccaataacccttatgtctaggatccaaattaattttaaattgtatactttgattttttagagtgatctatttccaaggggatgcatttatttgttttattttacttaatctattagaccagaaattaggttcctgcaagcagattaaatgagcatttgaccttaacactgaacagcctaggctattcacagtcaaaatgggctgcagaagtcattatagtgagatatgttttaaatgacttgatccttaaatgtgttcattctgaggcatccagactgctactgtgtgcccgtgatttaaaatgaaatgcagaattctaatgattaatgtagagtcaattgaatatccacatggaaaaacatgtattttatttctcacatcacacaaaaaattaatttcagatggatagtataacttttagtgtaaaaggcaaaacaacacaatttttagaaaagaacatcttgcttcatgagtaggcaaaaaatactatgaagaacaccactaataaattgaactctattaagattaagaatttgtgttcattaaaagataaaaaagagcaaaaaggccaggcatagattgggagaagacattgacaaagcacatatctaacaaaggaattgtatccagaacatataacgtatacccacaaataactatgaaaaagatagataacccaatagacaaatgagcaaagacttggggacatcacaagagaagatatccaagtggccaaaaaatatatagaaaggtgctcaatcttttcactcaccagagaaatacaaataaaactaccatgcctcacaactactctctcacccaaatggttaaaatgaaaatgacagaaaataagaagtgttgacaagaatgtggaacaagggaaattcttgactaccactgctgggagtattacttgaacgatcactttggaaaacgctttggcagatttattaaagctctttgcataaagcaatttcacacctaagtataccccaaagaaatgtgtacgtatgtttaacaaaagacattctcaagaatgctcatagcagctctagtcctaagaaactcacaatggaaactactaaagtcttcatcaacagaatgcataaagtatggcatattcacagtatggagtattacacagcaatgtgaatgaataatctacaaatacacacaataatttgaaagatctcacaaacataatattgagtaaataagccagatgtaaaaaaaagtattactatataatttcatttatacaaactccaaaaactggtaaagctaatctatgtttgaacttggctaatctgtgacttagaagtcaagacagtggataatctgggaggcactaggtactgactgcccaggagtatgaggggagcttataggatgctgataaatgtttttctgcttttcttttttaacttggaagatagaatctgggaggtgtctgtgtgtgttaaatgcatttgtgatatattcacttttccacacagatgttatacctaaaaaataataaagatcatgtggagaagaaactcttggtgaagtcagtagtcattacttatgttcactattaatccataccaaaaatatatgtacttttttttagtacacagaaagtggtttgcagatagtttcatctcattttccattgtgataataagaagtcaagtaataatttcctgggtgttatgggttgaattgttttatatgttgaagtcctaaacctcagtaccttagaatgtgaccttatttggaaatatgatcactgcaaatacaattagttaagatgaggtcatactggagtgggggggggtccctaatcccatatgatggatgtctttataaaaagacagatatacgcatagaaagaagaggatgtgagacacaaggagaagacagccatctattagcaaagagaggtctggaacagatccttccctcacagctctcagaagccaaccccgctgacacctggatctcagacatctagcctccaaaactgtgagacaatacacttcttttggttaagccgcccagtttgtggtactttgttacagcagccctagcaaatgaatacattgggaagactgaaaggttaagtaacttgcctttgaatacagccatatagcaggaagttaagtaacttgcctttcgatacgcagccatatagcaggaagtgaaggtgatatcaagggttcttctgcaccggaaacacccacctcccacagtctacctcaattagcatctcatacacttggcaaggctactgtagggaatggagagccatggaaggtgttatgcaggggaatgacataatcctttctctgttttggaacaatgtaatgctcatgaatcactgaagatgaaatataaaatcctatgtatcccaaacagctgtacagtctctgtgaggaatcttcagaaggcatctttcctgaactgacagtggccaaagtctagaggacttcaaggaactaaaatggcccacttaatggctcctaaagcagtcattaccccatgttgttctggtcatgaattctgtgagaatctgttgaaagctagaaatcctctcatcagacaatgcctgtactcatctagttcaggagaataagtaaggacttatagggcagatggttggtttttgatcttgcctccagaaataaagacagatagctgaagataatggggtttttccacttatcttagaggaagtaagcaactaactactgatcctatgccaagattcaacggtatcattctggaaacttcataacttcttcacattggttatttttgctcttcccctctcactttccccacaaggattagcacttaagtacttaaaacaccaagagtttgtgtctatctttagatacagaaggaaagtaaagctagaggatgcaagctacgtctcagccagtttgaggaaagagaggacctggtgacacagtgagtaaacgagaggagagacacacaagctaataacccccaagccttgcggtggtgaatcaagaacattgttttctggggaagaattttcatgatcttccctatggaatttttcataattcatttcaactctatttcccatcataccctcttttttttttttttccgagacagagtctcacacacagtggcgcaatcttggctcattgtaagctctgcctcctggattcacaccattctcctgcctcagcctcccgagtagctgggactacaggcacctgccaacatgcccagctaattttttgtatttttcgtagagatggggtttcaccatgttagcctggatggtctcgatctcctgacctcatgatccgcccgccttggcctcccaaagtgctaggattacaggcatgagccaccgtgcccggcctcccatcttactcttattggtgttaagtgcttggtgctatgggaagtcaagtcattgactggggctagttagaagagggaagaagggaaaataaagatatatgagcattgtatatttacacattgggtatcattactgaaaaattgcacaaactccaagttgcaaccggccaaatattgctcaaagagtagggagtactaaaatttgagggctggtactataacttgttttgcattctatttgcaaagctaaacaccctgcctggcacatagtaggtactcagtaaatagtacaaatgaataaatgaatgaatggaatggaattgtcatgggatttgcagtcataagatgtggatactagccttgatgcacccactaactagatgtgtgacaagccactttacgtcttcaggactggcttttattttctttaagagaattgaaccaaatatagatatggtacttgaacattctacaatttccagtgtgaatatacttagttaagacaaagctatttgcactcactactatgtactgtagacaagatggtgtgatatgtgccaacatatagtatgtctaggagttcaaggaagtctaatttgggaaaagtttgttctgtcctaaaagaaactgagacctaaatttatctaagtgtcatcctgtgatcagcaatgcattcagcggcacttgcataaccattgcctccggcaggactgcaccaaaatagcagaaggaaaagaaggaagaggcaatgtcacacttctgctaa

SEQ ID NO: 97486 - DNA, 12795 bp, Homo sapiens
ctgcaaactgcaacttacaagattttacaacatggtcttaattctttccctaaaaagccactcatggcatggggtttggggttagaatatttcggatggacagaaagaattaaaggtactcacaaacacaaaatttacttctccttggtccatatacagacgtggagatacagattaaattgctacttcttgagtcaggtacattaggcctaagtcccaattctgccatttggcattacattggtcaggctactactacttttacatatttaaaatatagggataataataataccgaccttatagggtcattggtaggatgaggtgagattttgcctgaccgacccttagccaggtttctgtatcatagtaggtgtgctataactagctatattaggattgttcctactggtcttttacctagatgattgcttctaaattaaataaaaatagataactgaacattatttatacaattttttgctgttttttatttctataaacttatggggtacataagaaattttggtacatgtatataacgcatagcggtcaagtcaacgtattgaggacagccatcacccaagtaaaatcgatttttgttaagtacagtccccctactccaccatcaaatatggaattaattccttctgtcttaccatatgtttgtaccctttaacccagtcctcctcttcctctcttttctcccacactcacccttcccagtctctgttatttatttttcccctcttgacctccatgtgatcaaatattttagttcccacatacaagtgagaacacgcaatatttatttctttgtgtttggattatttcacttaagataattctctccaattccatccatgttgccacaaatgacatgttttctttctttttatgactgaatagaattccattacatatatatatgacattttctttattcattcatttgttgatgaaaacgggttgattctatatatttgctattgtgaatagtgctgcaataaacattccaagtttacgtatatcttttatattttgatttctgttcctttggatagataggatgtgtacatgaaaaatccaaagaaatttataattaacaagcaaagtaattagatacaagatagtatacacgaatcagatgtattttgaaacaatagcaacaattagaaaattattttttcagacaggatcttactctgtcacccaggctggagtacagtggcacaaactcaccgcagccttgaactcttgggctcaagcagagccctcccacctcagcctcctcccacctcagcctcctcccatctctgcctccccagtaattaggattacagtcaggtactaccacgcttggctaaattttttttttttgagatggggtctccctgtgttgcccaggctggtcttgaactcctggcctcaagtgatcctcctgcctcaacctcccatagtgctgggattacaggagtgagccactgtaccttgcctgaaaattaatttttaaatgacatcatttacaattgcattaaaaatatcaaacagttaggaactagtgaaatgtgtgaaagaaaactataaaacattgacataaattaaagaagagtatcttcaaataaataaagagatattccatgttcatgggctgaaaatctttatattgtaaaatataaattattcctccacataatctatagaatctaagcaatcccattcaacatcccagcagttatttttatggaaattagccagttgattctaaagtttatatggaaatgcaaaaggctaaaatagcaaacacaatttcaaagaataacgaagtaagaatatttagaatactagatatcaagacagtaattcaaacagtatgatatggacatgagaataaataaacagaccaatgaaagagaatagtgtttagtgggcatgcctctttggaaaaccacttagcagaatcagttaacactgaacatgtacacaccctgcagccccacaaatcccctctcttctaggtacagaataatgccccccctccgacacaaatatctagctacagtgtaattagtatgtctccatactaatccccagaatctatgcatacgttaccgtacatggcaaaaaataattaaggttataggtagaattcagttgacctgatcagctgaccttaaaatagagaaatgatctgggattattcaagtggctgcaaacctaatgagatgagtccataaaaaggaaggaagaagagcctgtgagaagggtctgacctacccttgctggttttgaagatagtcgaagggtcctcaaaccaaggcatgcagatggcttctagaagctgggaatggccctcatccagcaggaaaatggcaacctccgtcctacaaccacaaggaattgaattctgcccacagcccaaatgtgcgggaagtgattctcccctagaacctccaggaacaaacacagcactgctggcaccttgattttagaccctgctggacctctggtctgcagaattgtaaaaatataaatttgtgttcttttaaggcacaaagtgtgtagtaatttgttataacagcaattgaaaatgaatacagcagcagaataaacaaaaatcatgacatatgtcactgtaggccacccccttggttcctgagcaagtatgcatgtgtgcacatacacaagcacatgcctctccccataccgagaattccaaaatgactgcacctattataatgcaatggtccttctttcaaccataaaagccttcctcctcttccaatgggagatggcctagagtcagatccacacaggtcattccacaagtcgaggatctgaggatgccatcaacccctctgggaaggtataactgcagtttcatgatcttgcaacctctaggttccagacaaacgtaactattaccaaggtacctaatctaatcaaggagagaaaacaatttgagccaaaaaattaaagagagtcaggtatagtaaccgtggtccaaacaacatgttgtagccccctgggcagtgcggaagggagacccttggtcagatggacactttggctgatgcaggttctatctgtgtgcaggatgtggtttctgctcccttttattctctgtggccctgccagagaggagcctggtgaagggctgtggcccaggatggagcagccatgaaagcccacattctgagggtgggggtgaggagcctgagctggctcaggggacggaacggtcataggctcctgcgtgccaggccagggcactgtgctgcatcattctccccaacgctgtgtggatgcctatcaattgattctggctgtaaacaaacattttcctctgaatcttgccgttcttcctgccctgtctccagacctttaatccatgacttctatccctgcctcctctccggctccaagcagtgggaacagagagctgaggtagcacaaacacccccaggaactctgctcagcccccaagccatgaagaagtgagaacttgcaccaggagcaaacacagcaaaaggggtttgtgagggtgcaggattctctgctcccccatcctgatttccagaatcccagtttgatggttccctgcccaactttgtcatggggaaaggaattcagatttacagttcaaaaagatgattgtgggactgtaagtggccctggtccctggcctcgggaaggagcacatctttacaatctcaatacacctttccagctggtggctgtctgctgtcatattagtagtactgaagccacatttgtctgtcttgcattgcctcaccgatggcctcaataaacagccaacactccctaacacagcgatggctttctaccaagaatgctagacaccaagccatgatacctttgctaagtaatgaacactgcataattttagattaattaaagttttagataagtccaaggctcatggatataccctaatccaatcataaaataaagctcacatccagattcatttagttacttcatcattactaggaattttccttgttacaaaatccgaagaaaggggctcagtttgatattcatattatcttagttatctattttcaagatataagaagaaaaacgactctggatgacacaacagagagggacaacattatgaaatgtcatttgaagtcagcagctctaataatgaagacatcactggaggaaatattgtaaaggaggcagagatccccgcagagcactcctcagtttagagagacggaaactgaggcctgatcacagtcctcttgcaaggctgtagcaaaacgggacctagaagcaaagttttccatccctggacccagttactgtccttggtcaaagctcagactgtgaaatccttgcctagattcgattctgaagaaagggaagaaggaggaggagcttaaagagaggaaagcctgggaagggccgatggggcctcctgggatcgctgaggcttgcttgcctcctttgggagtctccagctgtggcggcagagggtctgcacccggggacgctggagagcggcagcagggagctgaggagaagtccatccccaaactccacccactgcagttaagagtgtagcgacttggtcttagaaaacctgggtcctctcactgttggtgggactgtaaactagttcaaccattgtggaagtcagtgtggcgattcctcagggatctagaactagaaataccatttgacccagccatcccattactgggtatatacacaaaggactgtaaatcatgctgctataaagacacatgcacacgtatgtttattgcggcactattcacaatagcaaagacttggaaccaacccaaatgtccaataatgatagactggattaagaaaatgtggcacatatacaccatggaatactatgcagccataaaaaaggatgagttcatgtcctttgtagggacatggatgaaattggaaatcatcattctcagtaaactatcgcaagaacaaaaaaccaaacaccgcatattctcactcataggtgggaattgaacgatgagaacacatgggcacaggaaggggaacatcacactctggggactgttgtggggtggggggaggggggagggatagcactgggagatatacctaatgctagatgacgagttagtgggtgcagcacaccagcatggcacatgtatacatatgaaactaacctgcacatcatgcacatgtaccctaaaacttaaagtataacaataataaatttaaaaaaaaaaaagaaggcaaaatcagaaaacctgggtcctctctattttgaggtctgcaacagctggaacagtctggctgcaagacacatgcaggacgcagatctgccccacatccacttttgttctccactactccaattaacttcataaaacttaaagtaggaatgtgttgctgacatggcaatacttggattttgtgtttgttgtgctttctgaaaaatctagttccattaatttattttattaatgtttttgtatgtccttatttgttttccattttatgaacactaggatgaatgaaaacaaaagcatttcttgctccacatcccgatgccaaggtgagcagtttccagtgcaagtcaggggccctgggaagacttcaacaagcagctctggaaaacgaggaggctccaccctggagaagccgcatctcagctgtcaccctgggtgtggtgagaccaggaggcatttccatgatttatgtaacacctcgctcccaaaagcatctgaagcatttcacacacgtacaagcatcgggcagaattaagagtaaataaaggctcctggacgcatgcgttcccatcagggaggccttcgtttccggggtcgacgcgtgggcgcttcctccgtccaagcgcagcgggtatttgcaaaagaaccgcaataagctcccccaggcagggtcctcagaagggcgcagacctccggctggaggcggtcctgagtgttagggctgggccgactcgagggcgggtcctctccgccctgcccccgcggtcccctgtcggcccagcgtccccgccgcgcgctcggaggagctctttgctcacggaggacgtgcctctcccgacgcctcgcgggcttcccctcccaggaacggcggagttctgcatggacgcggcgggagaaaggagcgggttagggtctgggctttttgtggctcgaaggacacacggagggaagcgtccgcgcgtrggaacaaggacttctcccaactccttccaagtgggtcgtccacggacgcacgggctttccgaattcgcccggcgttatgctgaccacttgcgagcgccgcgcacacctgcggataaggaaaccagtatctgtctgaacacagtcctccaggagaaaaccgtccggtttggagcctccgcccacccccagaggaaaacctacagatttgtgccacggttcctaatacctaagtgagaggcagacacccggcaaccccggcaaaggcgcgtcttaggctcaccggacgctccctgaacccgtccctctggctgccgagcccccagcgccttcccgtttcggaaagaagcgggcgcagacccctcggggtgccccggsggacggcaggtcccgctggttgctacaggaagaggcggggcgctggaaccccagcgctgggagctgcgcgcaccgggatccgctggccgccttccgcgtgagggtggccgcaccttcccgggcgcacagagcccagcaggcgcacagagcccagcaggcaaacagagcccgccaggcgcacagagccctctgcatcattgctcacctgcatcacggcttttaggcccagatgccaacaaagttagaatccaagtgagcatctgggcccccagtgattacaaagctgagcagttaagtacaaagtcatgcctgtcttttgtgctctgtcacccaggctggagtgcagtgacgtgatctcggctcatggcaacctccgcctcccgggttcaagtgattctcctgcctcagcctcctgagtagctgggattacaggcatgcaccaccacactcggctaatttttgtatttttagtagagacggggtttcatcatgttggccaggctggtctcgaactcctgacctcaggcgatctgcccgcctccgcctcccaagtagctgggactacaggtgtgcaccatcatacccagctagtttttaagttttttgtagaggcaaggtcttgttgtgttgcccaggctggtctcaaactcttaggctcaagtaatcctcctcccttggcctcctgaagcactgggattacaagcacgagccaccacatttggatgagatgccttttctaataaccatgtatgaaactgcacccagaccaccagcctccatgtccatgacagaaaatcctgacacaggctgggcactgtggctcacgcctgtaatcccagtactttgggaggccaaggtgggcagatcacctgaggtcaggagtttgagaccagcctggccaacatggtgaaaccccgtctctacaaaaatacaaaaattagccaggtgtggtggtgcatgcctgtaatcccagctacttggaaggctgaggtaggagaatcgcttgaacccgggaggcagaggttgcaatgagctgagatcacgccactgcagtccagcctgggcaacagagtaagacgccgtctcgaagaaaaaaaaaaaaaagaaaatactgacacagcttcttcacagcttgatgcttgattaaaaaaaaaaaaaaaaaaaaaaaaaaaaaaaagccacagaaagggaaaagatttattcacaaaaatatatgtgttacaggactcagccaaattatatcaggaacacctggaatctcaattagaaatagaaaaaaaaaaaccctaatagtaaaatgggccaaagacttaaacaagcacctcaaaaacaggatatccaaaatgagcggcaaatctacaaaactggattagtcatcaatgaaatgtataccaaatccacacgcccaccagagcaggtaaaatgcaaaacacaatactgggtgttgacgaggatgccaactctcatgcacagctggcagggatattagattccttgacttgaaaacctggtatacagtgtacacccaacagaaatgtgtacatacatgcaccaaaacacatacacagaaatgtccacagtctcagtaatcatcatagctaaaccatggcaacaacccaaaaggacaccatgtgaaacaagatcataaactgtggtctattcatgcagttgaatactatgccacaatgaaaaagtcaaccacaaccacactgtctaaaattcatagatgagtctcacaaacaatgtttaattaaagaaggcagacacaaaagaacacgtgtacaactccattcaggcaagagtaatcgacagttacaagtcaggacatcacccttgagagggtgggcactgagtggaaggggaatcggggaatctgtagtgtgtcctggcctggatgctggttacatgtgcgtccactttataaaatgccatcatctatgtacccatgactagcactgttttcaatatatatttgatatttcagttttgttttttggggtttttgagacagggtcttgctctgtcacccacgctggagtgcagcagtgcaatcctagatcactgcagcctcaacctcctgggctcaagtgatccccccgcctcagcctcccgagtagctgggactacaggcacacgccaccatgcccagctaatttttctattttttttgtagagatagtatctcgctgtgttgcccagggtggtcttgaactcctgagctcaaggaatcatcccacctcagcctctcaaagtgttgggattacagaggtaagccactgcacccagcctatatttcaataaaatttaataaaaatcaaaacaatacaaaaaaaaattatggacatgtatctactgatgtggaagttttttcacaatattgagaaaaacttataaagcaatgcatatagtatgatcctgtaattacaaaaaataacatatatgcataaaacaggatacacaatgacattcactcatttaaaaatatttattgagcatgtgcgatggaccaacacataatttatttggaagacgtctacacaactgtactatcccatgcagagtcccatcgcatacatcaccaccttagctcgcacgctgagccagggcagtgttccctacacgccactggcacagccctgtgcaatcctacgtcccacacgagtggatgagcgacggcagtaagggcaccactaacacaggaggtggggacagtcactgtcacagggtacacgggctgatatgcgtgcgtcctaggagtgtagacctagacctagcttaggaacatggagctccgacccagccacgggtcggcactgtgggcaccacgggtgaacacctggaaacacagcctacttctagagggcagacactgggcagcgggggtggccacggcagctcctgccgagcccaagcgtgtttgtctgtgaaggaccctgacgtcacctgccaggctagggaggggtcaatgtggagtgaatgttcaccgactttcgcaggagtgtgcagaagccaggtgcaacttggtttgcttgtgttcatcacccctcaagatatgcacactgctttccaaataaagcatcaactgtcatctccagatggggaagactttttctccaacctgaaaaagataaatgacaacaggtcaatcagatgataaatcatttgattaacatactacatttcctaatggtttaatattggacaagagaacagtattcaggtgcagaatttttttaaatgacaaacttttaacaaaaacttatcacaaagcaaagcacaaaacaaatataaaaaatgaaggaaaaccatttatttttattttctttgccacattaatcctgagcccaaagaagaacattccattttcagcagcctctgagacaggaagcccaagtgagctgggcgagctacacatgaattcacacacggatccgaaggctgccagtcagaacacgcatcacagacgacacgcctagactaactgctgcctgggaagccacagaggcctgtgtaaagggagcgccaaggcacagctcaggcttctgtccatctgggggaccctctggacatggcacaaggggcctcaggctgatgtgggtctctgctctccctcacttaccgtgtcacctgagggaatgacttccctgacttcccttccagagccctccacttcccgtgctgtcagatgggaaatgaagccaatgacaacaggcgctttctgtgtaaggattaaatcactcctgcacaaaaggcgtggaccccagtgtgggccagcatctgccatcactaccaccacccaggcctgtctccctgaggaccggcacccacaggacagaatcttacaactacgtatcttactttttgagatgtggggtcttgtctggaagtgacagcccagctcagagccacagacatgtgccttctccacactgggtttctctgcaacacaactgaacccgtgaccacgtctcctgtatggacagggactgggtcgtccatcatgaacagcgtctgcttccagtgtgtggtgctgcaagacaggggtgcgtgtgacctggaggctgagctagggcagtctccacatggccctcggggcgctgactcaggctcgcactggctctcgcccccaacagcacccacacagccggcagtccaccctgagggcctggggacacaaagcttggcttttcaggctaactcagggaacatatacacccccagccctgtgatctaaagggactctatgggatacactgggatcaaagttacgctagtgagacagatcctgccaatgccaaacacaagcttgctcctgagaccactcagattccaggaggtgtggacggctcaccctgggtggcccagaggatgcgggagctcaggggacacacagctgcactaaaggtcccgtgtggtgtcgactccccggcccgccaggaggacggctgtgcaaccccttcctgcacccttgcctaagctgcagaggctggtgatctagctcctgctgttaaactgtggtgtacacagacagaatcaggtccaaggagtcgcttctgtgaaggttacaaggtgaggacaactgtcacatttggggggaaatagtaaaacgctatgattctgcactgggttgcgttggaaacatctctaagttcctcaggctctgtcttccctcaaactcccactgtccacggtggggccagcagtgaagtggggggctcctcaggtctccagtttttccctgactctggtcacacccctcaccccagcctgtgccccaggtcactgccccctccacgcccccagactcggggatgggtataactggcctccaagctgcccacctccacccggtgatggcactggaggggccaccacaggactcttgtgatggggaccacatgccaggccaggccatcaaccccgcacctctgcgacctccctggagccggggtcccctcgcggggccaccacgctgggaagtcagcggggcaggtgccagagcggggtagccaaccccacccaaagggaaggcctgcagggccctgaaggcagctccactgccacacatgcccagggtgctggcggggaaatgtgtcccaaaaaacaggcacctccaaaaacgtcaggtgaaccccgacgccccgtggaggcgctttgggtcagaccatgaagagctgtggtgctcctcgcggggtggaagacagggagctcctcccgttggggctgttgtcggagggacgcccaggctgggcccagagtggtggcgagacccggaagggggcacacaggctgcggtgtctacaccacccgtgcccccatgcgcgccgcccccaccccactgcccgcgcccccacgtgccccacccccccacgaccgccacgccgcgtcccaccccctcctgcgcgccccatccccgcaccccgcctactcccctgccccccaccccgcaccccgtgcccgcgccccgcacactcacgggtggaagggcccggtgctgagcactgcggcggctgcccctcctgcaggctctggaagtggacgctaaaccaggccgtgaagccgtgcagggtccccgccttcctgatgtcgaagcgcagctcgcccctcagggtctgggtcaagcagatgacaaggcacgcgtgggcaccgcgtggcaccgcagggcccgggttggggcggccccctccacgcgccccgcgcagacgctgaatgcgtcaggaaccgtagaaaagccccccagcctggggaaaccacccccaaaacccgcatcgtgagttcagaggcttcagtcagaaacgtttcaagcatctgagcttcttgcgcccaattttctaccccagattctgcggaatcttttcggcgctcagctcttccagttaaggagttggagagctccaggctgggcctttccacagcagaacgaactaaaaaccaaagcgcgccggcgccaccgcgcccgccccatctccagacgcggcgccagctggggcgccaggcagggcgggggcgcggggaaaccgcccagagcccacgagcgccaccgcgcggccacagacagggattcacggagggaattctaacgattctgtcatgaagagtggcttaaaatacttgaaaaaaactgtaatgcaaataccataatgaaacgaaatataatttatttgattttgaagatgctgagaatattaaacataaa

SEQ ID NO: 97487 - DNA, 17507 bp, Homo sapiens
cgatctttgttatttcttttcttccggcagccatatgtttggtttgttcctgttttctagtttattgaaatgtgacattaggttgttaatttgtgatctttccattcttttgatgtatgcatttaatgctataaactttcctcttcagactgctttttctgtatcccagaatttttggtattttgtggtttcattgtcattcatttcaaaaaatttttgatttccatttttattttatcatcaatcaaaagacgcttcaggagtacgttatttaatttctatgtgtttgtatagtttcaaaagttcattttgaagttgctttccagttgtgttccactgttgtttgtaagatacttggtatgattttggtttttttaacttattgggatttattttgtgtgacaacatatagcctatgttggagaatgtcccacgtgctggtaataagaatgtatattctgcagctgttgaatagaattgtctgtagatgtctgctagatccatttggtctattgtgcaaactatgttcagtgttcctttatttttctggattatctatctagggctgtcaatgaggtgttgaagtcccctgctattgctgtattgttgtctatatttttagatatggtaatatttgttatataaagttggatgctctgatgttgggtgcattgatatatcctcttattaaattgatccctttattattatataattgtgttatttgtctttttttactgttgttgatttaaagtctgttgcctttgatataagtatagctactcttctttacttttgtttcctgtttgcatgaaatagatttttccacttttaacttcagtctgtttctttagcagtaggtttgtttcttgtaagccacatagcgttggtttgttatttttatcctttatgccaatcgatatattttaagtgaaacatttaattcatttactaccaagattaatattgatatgtgtggttttgttccatcataatgttgttatctgtttgctttgtagatttactagttctctattctgcctctgtcaatttttgtggtttgttggagttctgtcatgctgttttatttattttttttctttttgagatggaatcttgctctgtcatccaggctggagtgcaatggtgcgatctcagctcactgcaacctccacctcttgagttcaagcgattatcctgcctcagcctcctgagtagctgggattacaggtgcgtgccatgatgcctggctaatttttttgtatttttagtagagacgggatttcgccatgttagccaggccagtctcaaactcctgatcttgtgatctgcctgattaattgttacatggagtatgatacatgaagcattaatctccaaactatccctattatgactttacattgttactatacagaaagtttcgaaacacagaaaattttattatttggccaatcaaccttcaatagttctgtgaaaactccagcataagatccaaattcccttcattatttggtacctgaattttttccagtcttatctctaacactcgtcagtatctataatacactatagtcacatacacatagaaaatgctttgtgatctaaaattgacaaatgggatctaattaaactaaagagcttctgtacagcaaaagaaactaacatctgagggaagaggcaacctagagaatgtgagaaaaattttgcaatctacccatctggcaggggtctaatatccaaaatttacaaaatacttaaacaaacttacaaaaaaaaaaaaaagaaaacaccaccatcaaaaagtggggaaagaacataaacaggcacttcccaaaagaagacatttatgtgaccaacaaacatatgaaaaaaacctccacatcactgatcattagagaaatgcaaatcagaaccacagtgaaataccatctcacgccagtcagaatgacaattattaaaaagttgagaaacaacagatgctgatgaggctgtgaataaataggaatgcttttacactgttggtgggaatgtaaattagctcaaccattgtggaagacagtgtggcaattcctcaaaaacctacaatcagaaataccatttgacccgggaatcctattactgggtatatacccaaaggaatataaataattctattataaagatacatgcacacatatgtttactgcagcactatttacaatatcaaagacatggaaccaacccaaatgcccatcaatggtagactgcttaaagaaaatgtggtacatatgcaccatggaatactatgcagccataaaaatgaatgagattatatcctttgcaggggcatggataaagctggaagccatcattctcagcaaactaacacgggaacaggacaccaaacaccacatgttctcattcgtaagtgggagtagaacaataagaacacatggacacagagaggggcacaacacactctgaaacctgtcaggtggtgggggcaaggggaaggagagcatcaggacaaatagctaaaaacctagatgacaggttgttgggtacagcaaaccaccatggcactcatatatatatatatatatatatatatatacctgcacgttctgctcatgtatcccaaaacataaagtaacaacaacaacaataacaaaatgctttatgtaggggagaagtgtgtacgcgtatgtgtgtgtgtagtgtcactgttcaaatgaaaatcagaaacgaaaatccattggtgggattttctgagccattttaaaataaatttacattttttttaaattttgtttttctgtaagttattggggtacaggtggtttttggttacatgagtaagtcatttagtggtgatttgtgaaatcctggtgcacccatcacccgagcagtatatactgcaccatatatgttgtcttttctctcttttgcccctctcccatgcttctccacaagtccccaaagcccactgtatcattcttatgcctttgtgtcctcatagcttagctcccacatatcagtgagaacatacaatgtttggttttccattcctgagttatttcacttagaattatagtctccaatctcatccaggtcattgcaaatgctattaatcattcctttttatggcttagtagtattctattatatatatacgtatatgtatatatatatatatacgtatatgtatatatatatatacgtatatgtatatatatatatacgtatatatatatatatgtatatgtatatatatgtatatatatatacgtatatatacgtatatatatatacgtatatatatatacgtatatatatatacgtatatatatatacgtatatatatataccaaagtttatccatttgttgattgatgggcatttgggttggttgcacgattttgcaattgttaattgtgccgctataaacatgcgtgtgcaagtatctttttcgaataataacttctttttttctgggtagaatacccagttgtgggattgctggatcaaatggtagttctacttttaggtctttaaggaatctccacactgttttccatagcagctgcactagtttacatttccactagcaatgtagaagaagtgttccctgatcacctcatttacaccaacatctactgttttttgatttttttattatggccattctttcaggaataaggtggtatcgcattgtggttttgatttgcatttccctgatcattagtgatgttgaacattttttcatgtgtttgttggccatttgtatatcttcttttaagaattgtctattcatgtccttagcccactttttgatgggattgattgtttttttccttactgatttgtttgagttcgttgtagagtctggatattagtcctttgtcagatgtatagattgtgaagattttctcccactctgtgggttgtctgtttactttgacgactgtttttttttttttgtcattcaaaagctattttgttgaattaggtcccagctatttatctttctttttattgcatttgcttttgggtttttggtcataaaattattgcctaagccaatgtctagaaaggtttttccagtgttatcttctagagtttttatagttttaggtcttaggtttaagtctttaatccatcctgagttgatttttgaataaggtgagagatgaggatccagtttcattctgccacatgtggctagccaattttcccagaactatttgttgaaaagggtgtcttttccccactttatgcttttatttgctttgtcgaacatcagttggctgtaagcattttggtttatttctgggttcttattctgttccattggtctatgtgcctatttttataccagtaccatgctgttttggtgactatggccttatagcatagtttgaaatcaggtagtgtgatgcctgcagatttgttctttttgcttagtcttgctttgtctatatgggctcttttttgtttccatatgaattttagaattgttttttctaatgctgtgaagaatgatggtggtattttgatggagattgcattgaatttgtagattgcttttggcagtatggtcatttttacaatattgattctacccatttatgagcatggcatgtgtttccatttgtttgtgtcatctatgatttctttcagcagtgttttatagttttccttgatttgattctccacttggtcactgttggtgtacagaaaagctactgatttgtgtacattaatcttgtatccagaaactttgctgaattattttatcagttctaggagctttctggaggagtccttaggattttcaaggtaaatgattatatcattagtaaacagggacagtttgagttcctctttactgatttggatgccttttatttatttctcttgtctgattgctctggctagatcttccaatactatgatgaagaggagtggtgatatagtgacagtccttgtcttgtttccattctcagagggaatgctttcaacttttccccattcagtattttgttgactctgggtttgtcatagatgtcttttactacattaaggtatgtcccttgtatgccaattttgctgggggttttaatctaaagcgatgctggattttgtcaaatgctttttctgcatctattgagatgatcatgtgatttttgttttaaattctgtttatatggtgtatcacatttattgagttgcatatctttaaccacccctgcatccctggtatgaaacccacttgattgtggtggattaccttttagatatgttgttggattcagttagctagtattctgttaaggactttagcatctatgttcatcaaggatagtggtctgtagttttcctttttggttatgttctctcctggttttggtattagggtgatgctggcttcagagaatgaattagggagggttccttctctatatatcttgtggaataatgtccacaggattggtaccagttcttccttgaatgtatggtagaattctgctgtgaatctgtttggtcctggactttttttatgttggtaatttttaaattatcatttaaatctcgctgcttgttattggtctcttcagggtatctacttcttgctgattaagctaggtgtaagattgtccccatggcctgaaagcttaaggagatatataactcctcgcttctcaggcccagtcccaaggcgcaaggccacttgcgtcagcagtgtgtgcggcagcatgcaccagcaagatagcagaggcagaaaaatagccagtcagaagacacctacccctgaagattgagaaagaggccatatgggtaaaacatagcagttacgtcagactaggacacttcctgtttacaggagactgtaaaacatttgtcccatcctcacttggtgctaacgccattttaagcctcagcccgcctgcacccaggcactcattaagacagcatgttgctccacactgcctcgtgttgtctgttggtgcactctcggggttcaaactgttacaagaaccttatattttggtgctgaaatctgggaggggctcaggtctgcatcccccatggacctagccctccaccccaaagagcaggccacagcagctggacaaaggaaggtcctcagcctccagtcgcctctctgtgcatgcagtcggtcactgatctcgcctactggtaagtttccccagaagcccagttaacagagaaaaatctgcacagcctctcttggtttctccagtccaaagccccaacattggtccaagaaggctctggcatgtgccaggcacccgataattatctagtcttaaggggacgcctctaagccatttaatcctgttccaggaacaaaaaaggcagcagtgatgatggctccttttatcttctccctccggctgtccaggatggcctccttttccctgttctcccaagcccaccctcccttatgggaaactcccggtcctctgttccaaaaaaaaaaacagtcctctaggctgcctcataaaaaaacctgcaaacattaggcctcaagctagatatgtgccctaagcgccttgtctttttttttttttttttttttttttgcaattcagtctggccacaatatgaattaaataatgggtccaaatggcccgcaaatggaacattcaactttgcaattctaacttatttaagcaattaatgctgacgactggagaaatggcaagaaattccttacgtccaggcctttttacactcagatcacaacctgtcctctgcaattcttgcttatctgttcaaatccttcccctccattctagccgccctaatcacctttctcctcccaaccgtacctctttttttctcattaaatccagcagactgctgtccacccctcccagcccctacctcttcctctcaaccatcttctttaaccccccaagcctcctcattgtcttctcagctgccatcttcccagtcagctgtatccacttatttttctacaccgtcccctcctcagracaattctaatattacctatacctattctcctccccaacgccctctcctgaggcttgtaaacctatcctgccaccttacgcctctgtctatcctccactgcctattaactcaaccgcgctttccccttcaaaccctcagaaggaatcagtattttaaaccttcagttcatctcctaatccacccccaatgtttggctcaagctccagaagcttgacgacggccgtcaaaccccacaacaagtccttcttaatttagccttcaaagtcttcaacaattgtaatgaggaaagtaaaaggcaaaaacaggcagagtttcaaatgcttgcctccaccatcaggggccctgcaggcccacggggccgcagctccacacagaagcctcctaaaaatccacctccacctggygcctatttcaagtgtggcaatgaaggccactggtccagacaatgcccaaacccaggtaaagccagcagtccatgcccctctctgcggagaaccccactggaagtcggactgtaagcagctcccacaaggactgcccccatcccttcctgagctagccaaaacctcctacttatatctcatcggccttgccactgaagaatgatggtgccctggaacagacaccctggcaactacctttgcctcatccaagccaarggtaaccctgatggtggcaggtaggccagtatatttttaaattaataccaggcaacctactctgctttacctaatttttcaggaaccacccagtcctcccaggtgtctgttgtaggaattaatggacaagtctccaaacctcgagtcccccctccacttttctgctcccttcacaccttttccttcactcactctttcttagtcctgccctcatgcccaactactctcctaggcagaaatatctttccaaaactccacactactttccacttccacattccccatagtacccaacacatcaacccagacccctctggggcttctaactttcttctactcctccaaccacccaccttaaaacgtgcaactttttcttgtcccccatctgtagttaaccccgctgtttaggatacttccacaccctcagtcgcaggacaccacacccctgtccacaatacccttaaatagcccacccagttcctatcacagaagtagtatgccatcccccaagtagctctcataagcctaaagcctatcatttctcgtctcctctccagtcacctactctgcccaacaaactccccttttaacacaccagttctacctgtgaaaaagctagatggagcttatcacttagtctaggacctcaggctcattaaccaagctgtactcccagtatgtccagtagttccttacccatatactttactttccacaattccctccgataccactcatttttctgttctaaacctaaaggatgcttttttttcataattcctttacactctgattcccaaaacctcttttcctttatgtggaatacccccgacacccacctttcatgtgagctcacctggtgcatactacctcaaggtttcagagacagcccccacttttctgtgtccaaaaggcccttgctcatgacctctgtagcttatccctaaagctgtccactctctttcaatgtattaatgatctgctcctgtgtagcccctctcaaaaaaactgcaactaccatactatctctcttttaaacttcttcccaaaatgcgagtattaggtctcccctaaagaaacaaaaatatgcacccccctcagtcacctatctatgcctaactcttaccccatgaacctgagagctcacaaccgaccacatatccctcctccagtccctcctgcctccgcaaactaagcaaaaaaatctctcttttctaggactagtgggatattgtaggctctgggttccctccttcgctctatctgccaaaccattataccaggctgctaaaggccctctctatgtgccattaaactctgcacagcctattacccaacctttccatctactccagaaggctctcayctcagcctcatcctcactctcccagacctcaccaaacctttctccctctatatmgacagatgatgtaaagttgcattatgtattctaacccagtctaagggacctaccgcccaggttgttgcctacctctctaaacagcttaaagccaccattctccgatggcctgcctgccttcaagcattggtggcagctgctgtcctcacccttgaaagcctaaaactatctctccatgccaacctaacagtttattcaacccataacatcaaaaacatgttagctcactgcagtgtactaagtctcatctctgccccatggctcctccaactgtatgctctattcatagaaaaccccctcctaccaatcaccatactaaccagctcccgtctaaacacagccatgctcttacctgaagttacaaccgcccaagaccctacacacttctgtgtaaacactgttcaaaccttccttataccttttccaaacctaacagaacaaccctttccagatgccccctttacttagtttgtagatggcagctccttcctacatcaaggacgctggcatgctggctatgctatagtgtcaccccacacacacacactattgaagccaatctgctcttgctaagcaccacctctaaaaaagctgaactcgtcgctcttcctcaagctctcactctagcagccagacaacaaatcaacatatattcaaattctcgttatacattctacatagtgtactcacactcgtccatctggaaaaaacgaggcttcctaattgcaaaaaacactcctgccataaatggctctctcatcagcaaactccttcaagctgccaggcttctacagaaagttgccatcatttattgcaggggccaccaaaccccggatgatcctatatcagctggaaataggctagcagatcagataaccaaacaagtagccctccaacccatgcaaggccagtttctgtccctgtcctttttctctcctctttactcctcagaagaaaaggaggacttccaagcccaaaaccttcaaaagcaaggaccatggtatgtcaaggaaaggtgctttattcttcctcactctcaaagccttcctcacctccaaagcctccacaaccctttccatatcagttacaacctctcttgcaacttctctgccctattctcacttgccctcacctttccagccatgtttgagaaattacctagtcctgctctgtctgccactcagtgtcaccccaaggctccttccagccaccttttcctacccaccaagcccagggccaggtacccaggcaaaattaacaaatggacttcactcacatgctggccaataaacggctccactatcttctagtctttatctgtactttctccaggtagataaaagcattcccaacaacttcagaaggtataaatgtcatcacacaaactctcttcatgcatataattctccgttttggacttccaacattcatccagtccaacaacggaccctccttcatcagccaaattatccaaggcatctctacatccttaggtataaaatgggttctccacacaccctataggcctcaattctcaggcaaagttgaaaaaattacgtctgtccttaaagcccaactcaccaagctggctctaaaaactcaccagtcgtaaacaaaaaatctccctttcacccttataagactccacacaacaccaaaagcaccctctttttatagtccctttgaaatcatatatggccaaacttttgtcttggggtctccacccttaccagactctgagccactcagatattacctcycctccttaatccagacatggtctttcattcgtgaagcagcaaataaggccatgcctctccctgttaacacctttttgtcctctgaacgtaactgtcttacaggcacagacgtgtttccagacaatccagatgatgcttctgctacagcgacatggtaaataccaacccgtctctcaacaatacccccaaaattaagattttctttttccaagatgtccacgtcaccccctatgtcatgcctgaagtaattattgagtaagtggtcccttttcccttttctctaaccaaatagacaggaatgtaagattctcccggggcctgaaagcttaaggagatgaataactcctcccttctcaggcccagtcccaaggcgcaagggccacttgtgtcagcagtgtgcaccagcagcgtgygccggcaagatagcagaagcatgaaaagggccggccagaagacacctactctggctggaagacacgtacccctgaagatcaagaaagaagctatctgggaacaatgtagcagttacgtcagaccaggacacttcctgtttacaggagactataaaacctttgtcctatcatcacttgatgtggacgccattttaggcctcagcccgcctgcacccaggcactgattaaaacagcatgttgctccacactgcctcgtgttgtctgttggcatgctcttggggttcaaactgatacaagaaccttacactaggagggttgtgtttttccaggaatttattaatctcttccagattttctagtttatgtgtgtaaaggtgttcatattagccctgaatgatcttttgtatttcagtggtgttagttgaaatatctcctgtttcatttctctgtgaggttatttggatagtctctcttattttcttggttaatcttgctaatggtctctcaattttatttatcttttcaatgaatcaactttttgtttcatttatctttcgtaaaattttttttttcaatttcatgcagttcttctctgatcttggttatgttctttgtctgctgggtttgggtttggtttgttcttgtttctctagttgcttgaggtgtaaccttatattgtctgtatgcactttttcagactttttgttgtaggtgtttagggctatgaactttcctcttagcgcctccttagctgtatccgaaagtttttgataggttgtgtcattattgtcattcattttgaagaattttaaaattttcatcttgattttgtttttggcccaatgctcattcaggagcaggttatttaatttccatgtatttgcatggttttgaaagtccttttggagttcatttccagttttattccactttggtctgagagagtatttgatataatttcaattttcttaaatttgttgaggttcattttatggcctatcatatggtctatcttggagaagttccatgcactgttgaatagaatgtgtattctgcagttgttggatgaaatgctctgtagatatctgttaagtccatttgttccaaggtatagtttaaatccattgtttctttgttgactttctgtcttgatgacctgtctattgctgtcagtggagtattgaagtcccccactattatgattctatctatctcatttcttcattctattagtaattgttttataaatttgggatctctagtcttaggtgaatatttgtttaagattatgcggttttcctgttgtatcaggcctttttaccattatataatgtccctctttgtgtcttttaaccactgttgctttaaagttcattttgtctgatataagaatatctactcctgctcagttttggtgtccatttgcatgaaatgcctttttgtacgcctttactttaagtttatgtgagtctttttgtgttaggtgagtctcctgaagacagtagacggttggttaattcttatccattatgtggttctgcatcttttaagtggagcatgtagggtatttacattcaatgttagtattgaaatgtgaggtactcttgcattcatcatgctctttgttgcctgtgtactttgtttttgttgttgttgttttaactcgtgtttttgttttataggccctttgtaatttatgctttaaagagattctgttttgatgtgtttccaggatgtgtttcatgatttagagcttcttttagaagttcttgtaatggtggctttgtaatggtgaattctctcaatatttgtttgtctgaaaatcacagtatctttccttcatatatgatgcttcatttggctggataaaaaattcttggctgataattgttttgtttgagaaggctgaagataggaccccaatcccttctaggttgtagggtttctgctgagaaatctgctgttaatctgttaggttttcctttataggtttcctggtgcttctgtctcaaaactcttaagattctttccttcatcttaactttcgataacctgatgacaatgtgcctaggtgaagatctttttgcaatagatttcccaggtgttctttgtgcttcttgtatttgcatgtctaggtctctagcaaggctgggaaagttttccttgattattcccctaaatatgttttccaagctttcagagttgttttcttcctcaggaataccgattattcttaggtttggttgtttaacataatccaaaacttcttggaggctttgtttatattttcttattcttttttctttgtctttgttggattgggttaattcaaagactttgtcttcaagctctgaatttctttcttctacttgttcaattctattgctgagactttccagagcatcacacatttctaaaagtgtgtccaatgtttcctgaatttttaattttttttttctttaagctatctatttcattggatatttctcccttcactttttgtattattttttggacttacttgcattgggctttgccttactttgatctctccctgattagcttaataactgacctcctgctttctttttcaggtaaatcagagatttcttcttggtttggatccattgctggtgaactcgggtcggggggtgttgaggagccttgttttgtcatattaccagggttggttttctgcttccttctcatttgggtagactctgtcagagggaaggtctagggctgaaggctgttgttcatattatattttcccacaggctgttccctttatgtagtactctcccccttttcgtgtggatgtggcttcctgtgaactgaactgcagtgattgttgtctctcttctgggtctagccacccagtgagtctacctggctctgggctggtactgggggttatctgcacagagtcctgtgatattaactgtctatgggtctctcagtcatggataccagtgcctgttccagtggaggtgacacaaggggcaatggactccatgggggtcctcagttttggtggtataatggcctatttttgtgctggttggcctcctaccaggaggtggcactttccagaaaacatcagctgtagtagtgtggagagggactggtggtggatagggccctacaactcccaaggttatatgtcctttgtctcctgccaccagggtgggtagggaaggaccattgggtgggggcagggccgtgtctgagctcagactttccttagttgagtcttgctgtggctgcagtggtggatgggggtgagactcccaggtcactggagttgtttaccaaggcagattatggctgcctctgctgagtcatacaggttgtcagggaagtggggtaaagctggtagccacagaccttactcagctctcactcaaaccgaagggctggtctcactcccaccatgccctcagcaacagccctgaacctgtttccaggtgaagggccagtcaggcttgaaaattttcccaaggttttcttcacatttgcaaatgaaaagggctttagttctttccccacctgtgaagtctgcaaactggattcgcgccctcccctgagttctggccttgagacttctcgccctgttcaaattgttagaaatttcagctagagaagttcttctcattgtggagttttaccccctgctcctctggccaccctcctgatggatccctgtggtgccaggcaggaattgtctgcttggggatccagcgagctcccagtgcctttctgctacttcctctatccctgtgtttcgctgggtttggctctctaacttgactcggctccaggtaaagttgggaacttctcccacaaacagaccttcagcttctccattggggatgtctgtttgggagaggagggtctcccttttccacttccatggttggggcactcacagtatttaggttgtctcccgtgtcctgcaggagcagtctgcttcctttagagggtctgtgggtcctctcaggattgctggtctgttattgcagtcgatctggagctaaaattcacaatgcaagcctccgtatgctgctctgtccggagctgcaatctagtcctacctcccatcaaatttacacattttaaaataccatttacttcctaatctgacaggatatcaaaccaggttcgtccagctttcctgtctgacacctctttagtttccttggtaacaaaactttgctccatgattccggtaacaaaactctttagtttccttggtatcaaaactctgctccatgattctggggtctgattttgaataaatgcaacgtcagaagcaagagtgagctgagtactttacagctgtggaacctaaagcaaaaaaaacagacacagcatcccaattctaattctgactctgatttggattcagatccatatttcccccagactctacagacacatcacttctcctcctttgttccccttccagttctgctatggaagaagcaacatctaagatgacggaaattatttcagagcccacagttacactggaaaatgaggtaaaaaaaaaatagaattctgctcactaccttacagaaaaacaagccagacaaaagggtggaatggttaagagacagtgttgacaatgagcacttggactatcgctcatctaaatgctgctgcatttatcaaaagcctcatgcctttggtgaaagctcctcagagagtgaaaaagaggatgaagaaaattgtaatttcatgctatatttctggggtcatcacaatggacggcatcattcccttcccaatagggcttctagtactttatctaaaaaaccttgagacacatctcatcctcttccttcacccatgaagggctaagcttactttgcttcccccatccctgaatgagactggactaaaatatatccacgttgctattcagggattaaacatattttgaatcttttttgatgtgtgttctatctctcttctgtctgatggaaagggtagcaatgaaggaagacaaggggagagaaacaaagggatcaatagaatacctggaagccctggtactgcatgactactattctacaatacacatgtcacatgtatattcttgtcttttttagagatctggaataacttctcctatattttcttggctagtctattatcatgacaccaaacccccactttccacagagctaccattttctctatacttgttacccataatagtttctatcatctaatgagtaccagattattctttaccattaattggaagctttgtaatcttgtcacctgatatttacccattacactttattcttgcttttatcctgggtgatttcaatatccctgtagataagatttcatataaactaggtatttctcctctacttttatttaggaaccccacagccatagtcataccatgaagctaatgagcactagtactattccacatctaagttttataattagggatcttattttctcatcccaaactcctatcttttgacttctgtctcatactcgcttacaacactattttgtgaattcatggagactcctagtcacccaaatttgtgctgacctctcaatcagtcaaccttctgggtataacttcttttccacccaaacttctgacccatcaacagcattctttcccgtgttcttacttcttcactcttttgtgaaacctctcttgccaattccaaattatgacatgtgactcaggaaaactaaaatgaagtgtttgtggacttggggaaaggtggtatcaaagaaacatcaggaaactatcaagaggtagaatagtagtttaaatttattacatgttttgtgtgtgcctagcattttcttcaaggctttatgtataataacccaggaattctgggaaagtctcagtctttatctcttcaaatatattctgcttcattctctttttcctatttctttgagactccaatttaaacctatgttacacttccttctatatttgttaatattatctttatttttctgtctcttttaaacatcatttggatcatttcttcttatcagcatttagttcaccaatatagcttgatttatatctaaaaagctattaaacccatccacttaattttgtttccttatactcttcagtcctagaatttcaacttagtactttttcccaattgttagatcccttattatgaggacctgaataattcaaattctctgtaagaaacttttggcttgactttgatttcct

SEQ ID NO: 97488 - DNA, 124305 bp, Homo sapiens
  misc_feature (1)...(124305): n = A,T,C or G
cctgccttggcctcccaaagtgctaggattacaggcgtgtgccaccacacctggccagattgtgtctttaaagcatcaactttcatagggtgaattttccttcatacattacccacactcctttggacagccacttttattatttctttacatgtcaatttccctatgtagaccttaggctcttttactgttgggtttgtgttgtgtttattcgtttattccttcttgtgccgtgatggtgttttgcatttgcttttgcaccttcctgctactgcccacactggacttcagctccttcccttttcttccatctactgatatctatgcattatttaagggtcatctgaaatgcgatagtctgggagaaacagattgttcacagattgttcagttggaattaatcacaacttcaactccactttgcttcattctctttcacagctatttccttctgctgtgtattttacttattgatgcctcactcccaccccagagacacacgcctccacacactctgctgtaagctccttaaggacaggcctcccagttatcccagcacaggattagtaccttcttcccacattatagatacctcataagtgtgaattgaatgaatgacacatttcggggccttattaagatcgtttcaaaaccatctattccctgatgactcacaaatttttatctccaacctggacttctctttacctattttgtactcacatatccaagtatctacttaatcccttggctgtctaattagaatcacaaacttaacatgatcagagaactcttgatttatttttctcttctttatctcaagtaaaagtccatttacaacactgcagtactgttctctcagctcattgacaaatctgtttttcttcaagtgagagagaagctcatagaaaatgggaagttattgaagactaacttcattattttagctctttgaactcagccttcaaattctggtatgatgtgtgatgtgaaaaaaaattacattaaaaactgactcagtaatccttgcagaatactggtaacagttgtttgcttagttggttggttggtttacaaaatcagatcacttcttggtcacaagagtttctcttgtgaccaagacaaatggttttcaggtacaaccatttatagcactgcagtaccgctcaggccaaacctgagcataagccttgatttctcctttccacactgtattcatgaataagtcctgtcagtacattaccaaaatatatctgagtcttacatatttttaccatctccttttccatagctttgttccaagccaccatcatctcttacctggaatagtatcaccatattctttcctgaactacattcagagcctcctgattggtctacctgccttcattattacttccctaaaattggttctccatacatttgccagagaaacttctctaggatgtacatcagatcataacattcccgttttaaaacttctccaatggcttctacttagaattaaatgtaaatttctaactacattatccaatggcccacttaatctgacccctaagtaacttctagcttgtctctctcctctttgttcatgtggtatggtgacatttacccactttctgtccctcaaacatgacaaggtaattttttcttatataggaacttcgtccttgcattttgagctcaaaatgcttttctttcagagcttccccttcaagtcctcagaagtcttccctgaccaccttggataatgagcatcctatgatttcaagttctctgtagcccatactgggtgcaggatgcatttgttacccgcactttccaactagaatgagatatctacaatagtgcttgccttaatatgtatttattgactgactaactgctagactaatgccatctcagtgacaatctgccttgctgtctagacggctggatccttttcttgtgttaagaattgtgccctgtcttgtagctctctatgcacatcacagccttttcttatgcttgactgtgagccccttggaagcggataccacacttgtatcaccactgcctctcagagaatgcggcacagatggaggcatgtgttttctctttaattctgtaatcactctttcctctttcattctttttctaatggaattgcttgtttggtataggaaacttaaattcctattaaaaccttttaaaactgagattggggaattgatgaggcctataattagtaaaagaaactctgacctaaggtacttgcctaatgaaagaatgtggtaggagggcaatgagaatagtttcacttaatagaggagatgaagatttgatgctcctggtgccagtttattaggcaggaaaaccaatgctattaattcactgaaaaaaaggatctgtcagaaaagttcatcttctctataagctgagagactggcttaggtcttctcacaaattacagcccttttacttatattaacatgattaaatgtttatctttattataaaattttagataatataacaatattatacatggaacattgatattggaccaaggttgatggctttacttccaaccaatggaatacttcaggttctttggcaaactcttgtgaccaagaagtgatctgattttgtaaaccaaccaaccaactaggcaaacaactgttatcagtattctgcaaggataacttagtcagtttgtaatgtaattttttttcacaccacacgtcataccagaatttgtaggctgagctcaaagagctacagttggtcttcaatgacttcccattttctatgagcctctctctcacttgaagaaaaacagatttgtcaatgagtaataatacccaacgtgtgggtccaaaggtatttgcacttttacttttatgattttattttttatttttttgagacagggtctcactctgtcgcccaggctggagcacagtggtgggatctcagctcactgccacctctgtcttcctggctcaagcgatcctcccacctcagcctcctgagtagctgagattacaggggtgcaccaccacacctggctattttttgtattttagtagagatggggttttaccatgttggccaagctgatctcaaactcctgacctcaggtgatccatctgcctcagcctcccaaattgttgggattacaggtgtgagccaccatacctggctggtatttgcacttttaaagtaaaaattcctgagaagaacaatcacttaagagtaatgaatcatccataggggaatttcagacataacgttaattcacatcatatcattaaacacccatgtgccatggtcctaatgtctactctaacgataatatagtaaattagcggagttaaaaaatggttgcatgtagcttagttatagtttactaaaatatcgcaggtgtacttattaaggtctggtttcacttggggatccagaaaaatcctgcaaagtgccttgcagagcatcgtggggacctctctgtgcctttctcacctccctttggctgagttcacaatggacacaagtagagcagctgcagagagcatgcactaggtagacccttcaaagccaacagattcaaaatgagctcactattttcttcttccttctttaagacgcatgtcccttatttatttcctgtttggttgacagcattgctaaacaagcaaccacttaacacagaaacctggggtcatctcaggaacatgattctttaatttccatgtatatccaatcatcaaaacttataaatttgacctcttctcttcactaccactcttccagattagttcagatcttcacaacatttaccttgggctattgtaatagaataccatctgatcctttctgtatccagtatagttttctacaaatcgatcctccatacttctagcaagttccaaaaaacaaatcctttccttgttccctgttgcctgtagaattaatcccaaactaaggcaaatgtagctctttatcctttatgaccacatcttgacctcttcatggtacagctttattttctgacagtcagccatggaattcaatgtcttgacctttttgatcccctggctgttctctaaaagcttcatgttctttcttgtttctgtgacttgcttctgtatatgttgctctcagtacttgaaatgcacatctcttgctatgtgccagctttgctttaaccacttgacatgaattactttattaaattcctacaacaatgctctgaggtagataatacagtcaatgccttcactgccttgtgtcattgtgacttaactctgatttcagtcatctccatggccattcctgaggccactcctatgtgactgctaagattgtgttcagatagcacatcctctgggaaatctttctgactgctatgacctctgggcagagtgtgttgctatctactttgtgtagcaattacacccaatatatacgtttatcttgatgtctagtgctttgactgacaaatgcttctttgctgcctgtagtacactgtgaagagactgagagcagtctttagtatttatttattcacttaatttattgttattatttttgtatcacatggtataaagcacttagtgtctggtaggcactcagtaaatgttaaaaagaagaatcacagctaacataattgatcccttgctatatgccaggttcgttctaaccactttacatgaattactttattaagtccctacaacaatgcttttgaggtagacaacacagccaatgcttccagtgccctgtgtcactgtgacataactcatatttcagccatcactatggcagagagttttgtgtgagctcagacttgtgctgagtgtctcaccccatgcacaagtatcagtctgcctgttcaggccttctctaaagtgcaggaagtcactagatctttctaatgtcctggcacagaagtgaagtggatttaacattctcagggcaaccctcaaccacagatgcacaggagctggtgggtaaattctctagcttcccaccctttgaatggacaattctaagaggcattctgtacactcttggaagtctcagctgagtcaaacttccattgcttatagaagcaacttctgtaatttactcctattgtagctctgtctcactcttgtcattcgtaactccttccagagaattctcccaagccaaatacctgcatccaagatcttgtcatgttctattttggagaaacccaaatgaagataagtactactattatccccagtgtatttgaaacagaggcacagagaggctaagctaagttacttgcctaagactttacacctggaaagtgaaagagactagatttgaactcggataatctggctgcagagccagcccattcctgactatcactctatgctcaatgaggtttataacagatataggggtctcaaacagtctaatattacctacctgcccttataatgtttaaaacttgtcttggctggaaggttaagttttcatatctcttacctaggtttggaagcaagggcatactgcttctttagattttcaccctctttcaaatgaattcccacttttaagctccaaagtgttttcccctcccccaccggaagaagaacaatctaaaagagtgacagagcaaacattaaagtattgtaacttcccactttcaaaagctccatttttaaaatctcacattggagggctttgaatagaggcagtgtgaaaagtggaatgagcgtttagattatcattgaggaaaccagtgtcatctgaatcactaactaggttcatcaccttgggtggctttattccccaatctgggcctcagtttttcctattgtgtaagataaagagtttgagttaaagtggctgctcttactgtttttagagtcattaagaatcttctgaactctatgtatatcatctctattatttctcctcccactctaaatacacatccacatgtacatgtattcttccttgagtaatttcagatgctggtgtcatctctggatcctctggggttaaaaatccatggacacaatctctaaatcctattccagttccagcctcctatggtcttaggtaaggaagcacacattgatttcattttgctttagattttttttttgagaaaatactttatggctgggcataaaggttcatgcctgtaatcccagcactttgggaaagaatcactttgggaggagaatcacttgaggtcaggggttcaagaccagcctggccaacatggtgaaaccctgtctctactgaaaatacaaaaattagctgagtgcggtggtgcacggctgtaatcccagctrctcgggaggctgaggcaggagaatcacttgaggttgcagtgagccaagattgtgccaccattgcacttcagcctgggtgacagagtgaatgagactccatctcagaaaaaaaaaacaaaaaaacaccttatgctttctgctgtcagactaaccataaacgaattatttaatgagtccaggtgatttttaaaatagacattagtgagaagaaacaaacatttatatcttacaccttattctgttgttattctatggttgaatattttatttcgccatgacagtagatatgtaaatgattgactgataggcacaccctacaaataatgtttgttgtacaatataaataaaatttaacataatgagaacatgatgggtaggtattctgatatttctgtttctgattccaatatctgtgattaagatgtttatgcaaatgtttcactgctctggactgttctataagttatattgattcaatatctctactttctttagagagaaaaatctcattaagtgagaatctaatgggctggaaaaattcaacagactaacctcagatgaagtaatatatttattgaaaaaaatagcaccttgttagctggaaaataatgatacattgacttacattgttctgtatttgattaaaaaaaaaaaaaccagaagctttttgctgartttcttgcacaagttttatgagctggattatagcttataagagatgatgatcagaaaaataatgctggattttagttcatgtttatataaataaaagaaagatgttggcatactatgttgtcaactggtttaaccgatatctcccttagaagtgacagtaataagttaacagtgaaaatccttacaattttctggatctatccaaagtcagttctattttgttaattttatcttcaagcaaattttctctcacatgattgtttggaggagagtggggaaatacatctattttcaattacaaggaccaccttccacctgtctactgattttccattacaacccttcctctaaatgcagtcaaagttgttggtccagtctgaatttctgtgctgtatttggaaagagtgttttggtgcagtccaccacttgctgtgctttaagactcatgatatactcaggtggtcacaactcttgtgtaattttattttgcagaattacacatccagcccttcagtgccacccccacctataagtgccttgtagacctcatttccctcacctgtgcttctggatccatgcttaatcttttaaaagcttcaatatcttcattgccttgctaatctctaatttggggccattccattatcaacttttttcactgtcagattaccaagctttgttgcagaatgccatgacattttttggactgaggtctgtgcagcatcatgatctctcacctctgctgtatcctcactgtggcttaatctcctatttatcttactttctaggatatttctcaaagtaattgcaccaaatgtttttcacttttttcaaacacctgattgcaccatccccagagtagattatttactcttaagagagtaaatctcatatgtccctagtcttaacgagtttcatggttccctttgtcctttctaaccaagcgaacgtcttagcctcatatttargggcctcgatggtctagccttaacctccgtgttctagcatgtgtatctgaggatctccagatacacatgctagaccctcctgttaagggtctcttgtcttcagagtagatcttgattaacattaatgtcaggaggtgggagggtggggtagaggatggaaactaatgctgggtgttgcagaataaagaaatcctcagagatttaggacattgtcctctctcagaaatatctctggaggaataatggctgctatgaattctgatatgttcctaggagaacagctggtttctctttgttcttgtcaaaacaagatggttatgttcacagggtgggatctcagtatcattagagccccaactaagattttttttttatttgacagtatctataacatcaacaacttctttgatgtcagcccagtatggtgctgtgccagctattttctgacagttgccttgaattttttattattgtgtaaagcaagaaatgacctttgaggatttcagtatctgtttgatgtatgtgttcattcatatacttttccaactaccattttaaaagtcaagaaatgaacctaagagtttagtgagaaaagagcttctattgtttttagtttgcttgtgagtttttacttacgaagtacagattaaatgcagtttgtatttcagatgtaaattatatatttttattgcatatgcatgtgtaattttgtctaacacgtcaaaaaggggaataaaaatatcttgaggatgtgatgaaactttttggagaaaagaaaaatttacgctctcataaattattaataaaattagcattctgtcataactttttgaacttgaaataaaacatcttaaaatgaataagctcaaagaattttaaagagcagattgagcttttaggcagcctcaatgaatatgttgaatcattaattttctatagaatttcctttctgtttcaattttatgagagcttagataatttcatgtcttgactattgacattgcttctttgctgattttttaaaaaaatttttacaaagcaaaatttgtaattttgtctttagaaaatttcctaaccacagagatgtatggcataaaaattgaaccatagttaaaattggttcaggcatcacttttactttggtagtatacacagctagcacactggtggttactagtttcctacttccttatgatattatttatttgttctttagaaaagcaacaagtacaatttgaatatatttatggcttccaagtttttccttaagatctgatgttatattatgttgtaattgtcaagctcagtttcccttctcaatcatgggttgatttttctggtgaaactcttccatcctgtttattaggacaatatgttggttcttcacaatgttctgttgtttgtttcttggttttacatattgttatttagtgttaaatctaatcaagggggaacattaattaatatctatcaaaatattatttctcttaaatttgccattttaatttcatcagtaaaatgtgttaatgacttttaaaaaattatgaaagacttctgttagtgttaacaagttagcatacttggagagagacttagaatatatttaaatgtaagcttctaagcaattttcacaatatcatttaagattgaaataagataatgtagtcgcaagtgagtagaaactgatgcttagagaaattaaaggacttctccaagatgacaattgtagtccattcacgtggctataacagaataccttatgctgggttatttgtaaataaaaggaatttatttctcacagttctgggacatccaggctgaaggcagcagtagattcggtgtttggtgaggattgctctcggctttcaagawggcgccctgttgctgtgtcctcacatgatggaaggtgggagggcaaaaagaatggacagctccctcacacctcttttataagatcattaatcccatttgtgagggctctactctcatgatgtaatcacctcctaaaagccctacttcttaatgctatcacattggcaatcaagtttcaacactcagaccatagcagtgacacagttagctgctaagatttcattcttgttctgatatggtttcttcctgttcacatatcctcttcaaatatatggcacacacaccacaccacatatagaatgctttctactgcagtgatgatggaagataacgtacttgttgcttgtctgttagaaaagtgtactgcaatgggttagatctaaactaacaagacagggaaattcatggacaaatttggtctggcttgctgaaaartgcttcttgtaggattgctttactgctcagcaatgtgccataagcgagctttatccagaggcagtgtcactcaggacagctatttttactcttgagtaagctcacctcacaggattatggtggctcccataattatactgaaaatttttatccctaagatgatctgtcttcccaaagtttttcttctgaacttaggaaaatctgtgcatatgtatttgtgtgtgtgtttgggttgggggtgcagttagagaagtgaggtgggtgtggtgatggctttctatttctccactctagtattaaccagtgtttycatgagccctgaaggctctaagatgcttacagaatttgagggagttgcagaatgagagccagggcacttaacacagacatgtagagtgtgtagagtgcatcaaaatgaagaaacgagaaaaagcctggtgtgtgggcatttggcataacatgacagacaactctctgcctgagaagattaaggtcagtcaactccaagccatggcctcaagttatgcaacacatttttcttttacatccaattgtatcagggtttcatattgactctagaagatcagaaatgatcatttttggctaggaaccataatctggctagttcccatacctacacagctggccctgctgtattttgagaggttytaggaatggtttatgctccaccttggctagaattatgttatcttgtcttaagtgtctgaatgtgactgatttgtatttgaatatataaaaagtctgggctgccccaatgttcccttttaacagagaatgcctaatgtaatttacttaatgtgatatctgacaaaaagggctggtgcaatctttctatttctgtcaatgtgtaaaatagaaacaaatatcacaagtgcttggtcaacttgacaatgactttcaattgaatttttctrttataggttgggctttaaaaatctcttacaacaattattacaatggcatccactgtgaacactctttttataaaattcaaatttagtagaaaaaatatgactcagttatttggcaaatattggtgtgaatactaaaatgaacacatttctcaatcttggccacatactgatgtatgtttttgtgtagaaagattttcatggtaccaatttaaaataaattatatgatgtagtacattttctctattctcaaatggggagatcaatatggaaaaatgtcaaaaggaacctatgcacaaaacttcaacacattttccaacttgcagaaggactgaggactcctgttagcatgaccgagagggaaagtggagaaggctgcagaatacaattaaaaatgctcaataaggtgtggatattttttagcaaaaagcaaaaaaaaaaaaaattgcttattttatgacaatgtagttatataagcaaaataattaggtccatattgtgttcttgggaagataatggatgctacgtcctgggccagagaagcttctgtgtgagtatgtgttcatgttgcaagatttgggagaatacaaataaataagaaataacagaacactgtgatgtgtactatattagtgggtgagaccaggttgctaggtctagtgttcattttggggaatacctaacccagctttgggaagaacgttcagggaagaattcttgaaggtaataacttgtcatctaaaatgtaaagaatgagtacaatttaggcaaagtagaagggttgagagtagagagaaataattgccagttatgttcctggatgtggtagcaccattgctaggccaaaggcaaaagagaaagcatggtttgttcagggaacacttttcttcataaaaagtccaattttcagtggttttatacaaaatttaatataagaataggtagaatcattaaaatgatcagattcacttttttttcaattagctgttctcatgtaacatgactttcccagttttttgagtcagtagttgaaagtataaattttcagcataattgattgctctataagagtattgtggctcttcagcataattgatttcatctctggaattggttttgcaggcttttacatgtgttgccactagcttcaagtatacagctggtcatttatgtaaattgtctatttgaataaaacaataaccttttacgataatttatatccttttgctatgtttttctaccaagatctctgattttagtttcctctctgaatctcttttgttagttaaaagatgttttgtcctccccatgtgtgacatggcagagaagctattaaaatgatatattactgttcttaaatatgatggcataagaatagcattttccagatttatttgttcagaaaatgtgttctcaagtccatgatactatctacttaatgagaaatgtaggtttctggatatttgtgaactttggcagttgtatatttagtgactgcactgacagatcttggtttgaggtacttgagtttggctttaattaactgaggcaaaatatcataaaaaatgccaacaaatagaatttctggttttctttctgcagagaagaaaatcagaggacttttcttaaacttatttttaagtttaggaaaaagccccccttttctcctgccccttggagagctgaatcaataattcgcatgttctttttttgtttcttattatctaagtatgtaccagaattgcttcacagggcaattaaattttttttttttttttttttttttttttagaaaaagctctatataagctctggggtaakttctggttgagaggcaaattacctttgtgatctcggacacatcacttaacttctttgtggcatagtatgtttgctccattcatttattgattcaaaatgtattgattgtttaccatgtgcctggtgttatattcaacttttcagggggacttaggagtgaattttagaacttagtagcagaaatgagacacatacaaaaattgttattaggcaacacatacacacacatgtaattcatgcaaagcagaacattttaagtactacaagagacttaatataagatgcagtgagacttcttgggataggtaattcattttgagttgatatcatcaaagatttgaagaggaaggatttggactagttctctaatagagtttgggttcaggaagatgtggagagaagacgaaattgtgttagaatttgaaagaaccattttaatgtaagccttgttgccaggaaacttggaacttggaaggaaactaaggttgaaaattaaagttggtgacagatcattgatcttgaatacaaaacaggggtttagtgtttattttgtagaacttctctgagatgtcattaagggtttggctttgtcaagacattggttcaagtgctttctcttctacatactagttaaatgctttaagtaagtcaaactaactcttgagaaacttgctttcctcatctataaaatgataatagccatctcatctttctaggtttctgtaagaattagtaatagcatgcataaagagacagtcacatwgtagttgttcactttgtattagcagttgttatctacacagtgaaaggcttttaacaagtgattttttttttttttttttgagactgagtctcactctgtctctcaggctggagtgcagtggcacattctcagctccctgcaacttccaccatctgggttcaagcgagtctcgtgccgcagcctcccgagtagctggaactacaagtgtacactgccacacccggctaatgtttgtgtttttagaagagacggggtttcaccatgttagccatgctggtcttgaactcctgacctcaggtgatccacctgccttggcctcccaaagcgctgrgcttacaggtgtgagacattgtgcccggccttaacaagtgaatttcaaggttgctttctttgtcatgtttctgtgatctctatgtgatatatttgctcagaatatcatagaattgcagagtccaagggaaccttagaggttttytagtccactccctgttgagggcaagtgtcccttttacaactttcctgattttattctatactgtcatgggcctctggaggaacttacaattatgacagcattcactcttttccaaaaagagtccttttcattgctgaatatttaatggcttgaaaaattttctatctattgatctgagattcttttgcctggtaatgttcatacattaattccctaattcttttatttcagagataacaaatgacagcaactcttcacatgtcaaaccttaactattcaayataaatatgttactttctttcatgagttccccctatgtcctttcacttctagaccaaatatccttggtctttcatctattcatcctatgctatgattgcaagattcttcacttttatggttggcttccttcggctgcacttcaatttttaaatatctttttaaaaactattatcccagaactaaataatgtcccactgatgagatctattcagagctaagtacaacaaatcttgcttaatctagaatctagaccagtgtcactgcctgttgcctatggagtttaaaaaatgcacaaagccaagtccaatccaaaaatattctgattcactagttctagatttgggcccagatattgtcattttaaaaaagcaccacagaaacaataggaactttcattcattgctggtgaaaatacaaaatagtgaaaatgctttgggagacagggagtttgctacaaagccaaatatattcttaccctaagatccagcaatcatgctccttggtatgcacccaaatgaattgaaaaccctgcacgtggatgtttatagatttattcataattgcccaaatttggaagcaaccaaggtgcctttcagtaggtgagtgaataaagaaactgtggtaaatccagacaatggaaaattattcagtgctaagaagaaatgagctatcaagttagaaaaagacacggaggaagcttaaataaatattactaagggaaagaagccaacatgaaaaggttatatgctgtatgattccaactacatgacattctggaaaaggcaaaactatggagacagttaaaggattagtggttgccaagagtttcagggaagaagggatgaataggcaaagaatcaggatttttagggcagtgaagctattctgtacaatattgcaatggtaggtatatgtcatcacatatatgtcaaaacccatagaatgtacatcaagaacaaacccatagtaagctatggactttgagtgataatgatgtgtcattgtagatatccattgtaaaaaatataccactttgatgtggttggatagagaatgagcttggactgttgataatatcagggttgtgtgttgtagaggaaggggtatatgacaactctgtgtactttccactcaattctgctgtgaacataaaactgctctaaaaataaaatttactaattaaaagctctacacataactttgatatctatctggggctggaagccatagatctagacactatactcaattaatgaaggtaagataccataatgtttattgattgcagccatacaacactattcattatgtaccagatttgggaacggttaaaaccagtaggactcctttttagatctttccaaaatttgtacactacattttctgggacgtaaatctatgactttacatttattcttattacatctcatcctggccatttgtagacattattctatattatcattgttgttttcaatttcatgtgcctaattcaggttatcctaaaaattcattagttctggataggcattccagaatgataaattttacaaaagctattaattcaggtctgttctttatttatcatactcttttcttatgattataatgtgttgtccttactcatctatatttgacatatctattagtatgcctaatactttgaatcacctttcctttctaagttataataatctatgcccacagagtttggagctgatagagaatgagcttggaatgccgtagagtaagaggagcctccagttttatcagtaaagttaggcatcttacagctgttatcaaggatcttataagatgatattgctgtagcttagttgggatgattttgggtgcaagtattaggatctcaacttagagtgtcttaaataataagaggattaattgtcttacctagcaagaatcccagaggtaaggcagtttcaattttgttaacgccgcagttttctaatgtcatgaaaatcttactttattttcatctttctactctgccatcttcagcaattcctttcaggctaacttccttcatggtcccaaaatggctgctacagttttataacatgtagacatgacaacatcgaggagcaaaagaggagctctttcctcttcatctctgtttagaatcttttcatcagacttcctctcttgtctcattcattcgcctgcactatatcatataccccagaataaagcaaccactagcaagaggatctggacaaattatgattcccctccagggtcgagggctgggactggatctagagataaggccattggagtatttgatacctagtaaaaactggggtttaatgaacaagacctaaacaaaatcgagattctgtgagcaataacaaaggtgtttgtggggaacaatttctgggtgagaaactactagtgtttgttatactactaaagctcaaaaacgttttctatttttaaagagtatatattgtaattatgctactaaaaatgttctccaaatagagattctggctttttttaaagaccaagcaaacattttatagggcaaagttaacaggataaactattatactgatcacatgttattttatttctctttaaagcaaattaattaaagcccattttaaaaaatagtttgtgcatggctccagattaattttatatctgtgattgttggctttatgtagagtattccatccttgctcagaagggaccttcagctctcagaagtaagggcttctttattttttttctttagtctgtcttacaataactctttttaaaaggaatcaaaattatagctttgtgtttggaagtaatggaaaaataggactaattgagactgctgacagaggaaagcatcagggagaggaaatataattttcaatgagctggatagtgaagcacaaattaaaaatttgtttgaaaaagttcatatgaagtcaatgcaatattatttttaattgattctagtgaaatctagggtccagaaacagataatgatatagacatagaatatagtctgaggaattcatgcactgtgaatcactcaatgcccttcagaaagaaaactctaggtgaatgaaagtcagtaactattacttaatttcaatgctaacttaagaaaagattaacagatttatgaggatagatagaatagaaatgtgtgccacctatagaagaaaatgggatcagtcatcagaatgagagttcccattcactgtgattgaagtatgtgtgcaagagtcacccacattgtttcatttaatccttacaaccctttgaggcaggtgcaatatgaggcaggtctaaatcataagaaattaagtaatttgatgtgccatacaaatgcaacatatttttagtccatgtttttctgcacacatgtcagtctattgctgggcctgctagctcctctcaattctaatgtgaatacacaaaaagcctatggatcagagtttagctatagaagaatcattaagcaattttatctgacgcctattctcaatacctcatcatatttaataaattcactaaatcaggaatgagtttccaatcaaattcactaaaaaaaacacattttgagactgaatctgttcatgttactgatatgcatatagttttaaggttggcaaatagtacaagaacccccataccctgagataataactttgaatttttaaaaaaattttttgatttgggaaagaatgcattttkctaagtaatgtagacctgtatttaaaatgctactccaagaatttttaaagactggatatggcataactgttaaaaaagatacaacatgatagtgaatattggcgtaggcagggaggagatacagaatgaaagaaaaagcaggtatataccacaacatgcattaggtttattcacatacagacacatgatttgggttccaagcaattctttttgttgcttgtcattacttggggtcactgttacttcagcccaaataaaaagctcactagtaaaagatgtcctggagaacagcatgactcatttacttgagaaattgagtgcaaaagaaaccccgtagctaataatattttggagttatgtttgagaatccatggaattattaaaggtataaaaggaaattctgaatgaaaaattcacactcatcattccagatcagcaagtttggaaacaagcacaattggcatctacggcattaaatacaaacttacttggaattgcaccattgtgattctgatttttcagttgctgaaggtggaaatcagtcacgaaggtaatgccttctaggcttttcttaaaaattattaggagctggattgggcgtttgtgaaaaaaggaaggaaatgaaagaaagtagaaggagaattatacttgagatttcaggaaagtggtaaatgctatcttcagagttttaaaaataaaattacatgtaataagtatactagctttttgtagtaatttgcacaaaaatgatatgctattgttcttaatattttctttgtcatagtcatactgatataaagctcatcttttttgtacataggagggaaaacaatttatttaaaatgttttattttctctttgagaagcatattctactataggtgagatttcaacagtaaaattaatccttaaagtaaatttatggaagcttttgggttatctctatttgaaaagacatatactcccaagtgtccctagatcgcagtaagccttaaatctggtcaagagcaaatggagagaggggggatcaatatgcacatttgttttgagagattctcctgggctgaccyggtctttatcataccagctggattgctgatgttgaaatgacaatcagtacatcaacaacaaatcaattttggcttcactataaagtaggtttaagagtatgagtaatccaacaatatcaagctagctaccaagtaatattggatatatttaaatattgtgtgataacgagaatgagaaagacatactatattattatttttgaccactcctccatgtacatttagaagtttaaccttgaaaaaagtaagcrtttgaaataaaattgtcactttattagagcaagatataactaattggtataagtccaaatctggttggtgtaagaacggtcttataaaactattgtgttgagtattttttaaacattacatctcagtaaaatgcttattcttactaaaaagttctgattctgtcagaataaaggctttatcatgtgtcttgaggcttggagctctcctctgcacagagctgtttctgcctaggcagggtgtgcaagaaattatttatactcttctgaaccagatctatagatcgtcactcaatgcctggctcaaagagatacttaggaagtgcttcctgggtcattgaattctagtaactctctattaatacatgctgttccttcctttgttcataggaaaaaaggaaaatttgcttttcttcaaagacctctcaggatgtacaggaaaatgtggctgataaagaagacacatctggtcttcctttgttggggaatttataggaggtagtctcagctgtcaggccgctagtaactgataatgtaaaatacgatgytatgtgaagaattacagaggatctgtaagattcctgtacgactcttgctgcctgacagctgcattctgtaactcttccaaggacaaaagaaggactcattaagtccagaatttcctcagctggttgcttaaaatcaaacagtaaagctgagaaaggacaaagcttccctcttctcctccagcaaccagcagggtgttcacttttgacacatgaaagacacatactttcaagccttagggacagaagcttgggcggaaattcaggttgtgattcttgagtctagagaagttagatctggaaaagatcagtagttggggaaactgaagacccgtgtggcaattcaaaccgatctttaggagaggattgccaggacagcttcctcctggatcagaattttatttcctaggcccacatccccttgcctrtgaggcacctttggcctcctaaatctctgctctccacagggaacaacttaattttctttttcagctggatgtgatgtgattcactgatcttcaccttatgtggctagcttccattctacagctctaaaaaaaagtctacttccttaagtaggtcttagaggaaatttcaacttagatgcctctaggcttacagagtttgtgttttagctttatatattacaaggcaggcccctagataaaaataaaatagarttatatgttccacagatgttaagtggtttaaaatttaaaccttttaaaaaagtggttgtatacaagatatgatatgctttggggagggtgaaataaatttcagaaatacttggaaaaatactaattgtctcttttggacagtgcatcaggccttggggacagttttgtaagaggttgtctcttctctgtgtctgagtgatatggtttaatgattgaaaaaattatagtgtcaaatgtggaataagtgatagaatcgtgtctatcgcatcactgttctctgatgactgactggtatgttccagctgacttcaagatagtactctctttcatcatagctccatatactccaggcagaagctatctgcttagaagacagccttattgaatagagcatggcatattaatagaatcacagaatcatgtgtcttgaggaggccattaggaaacatgaatttaaaaagcagagtgttactgcttcttgaagattttcagggatgcatattacatagctttttggggtaaaagagagagtggaaacaaagtatgtgttaggagatgcttttatatcttacagaaaaatacatcttgtttgcctgtttaaacccattttgtattgcacagtcctccacagatgtattacaaaaatcagctaatcagcatctgtctccttaacactccctctccatacttgaggtcaattgtcgtcatcaggcttgttttttttttttttttttgacacagttaactccattactttggctttttatgaaaacaaggaaacaaaactttctgtttgcccattaattcatttatactattctyagagctcacttttatcatttgactaatgcccctaccttcacatagttctaacatggagcttacatgggcccctttttgtcatatttcttctcagtatttctcaacatcatgctatttttacagctgtactcaaaayttgctatttggctacagtgtacttaggtctttctacaataactgtatttagttcttttgcatactgtatgaattcctaactcttctactttttgagaatgttccttattaagttttctcatctgatattttacatttagtctacctgtttctaggttatcccatgtgtttcacattaaatgatctaaaaaacaatagtattggtcataaccctcccctcctcaggaattgtttaaatagtgtttaaattctataacttggcatccaagactgctcattatctgacttaagagttagttactcagcattcacttccaatctgattagacccatctgccaaggggcccttgtaattggacccctcaatctttcctctgtgtttatgctgcaccagcaccacctgctctcagacctcttcccattacatccaggtgatctgaagcccacccaagctttgttcccagcttatgtgccactttcttagtggaaacctcttctatatatctacatacatatcatgacaaactatgagtgagagttactggtggccataaacgctaagtttagtgaaagagacatccttcctgacacttgtcatttaaaaaaaatcatacattccatccacttggtaaatgatagattctttaatcattcctctttcatggggcagtttggtcattttttattactttcaattataatggtgctgtacacatgattacacctgtgaagttttttctgtatttttcagtctctatatcattagttcatctgctttgtgatttatctggagaaatttggcctttgaacacttacatattccctaaatattttgtaggagcattttttttccacatatgtattgatattctatatatcaaagttttatctttattatattacattttagtgtgcaattttaaaatgtacttaatctatcttgtgtctaatgattgtgcttcatctcttgaagagtcaagttattgtctcattttcagatgggatgaaaaatactttttttatattaaaattggttttaattatttgatgcttttgaaatgcatagccatgaggtggtgaattatgagtttataacatttttyccacactgacatctttactagtagtaattatttttcatctattattgtgtggctctgatttgggatttattaaagttttataattkatttattttcttgactatctgttctcttgtattaatttaattttctatgttgaatacttatagtttcagtaattttcactttgtaatgtaggttaacatcacataaaatacatgtgtcacagccttaatattatttttatataatcttatctgggttattcttccaaaagaattgtatcagcactgtgtaatactgttgttcttgtaatcctattaatttttatcttatacagcaaggtggacacaactttagaattattcactgttatattttaaggtgaactggatcttttattgagtggatacctttttatccccagtactgcctttagtcttaaaatggattcttaaaacgatggctacatcattttcttttacttcttttaattggtttactcttttgattcatccttcgtatccagtatgcctttgtaagtttgactcttttgaagaccatattgttagatttacttggttacttttttgaagttagaaactttgttttttaaagaacacgtttagaccacttttatgtattgtcttaccatatatatataaataaacatatatatgttttatatatatatggtaagacattatataatatatattatatatggtaagacattatatatattatatattatatatatgctgagacataataaacataatatatattatatatggtaaggtataatacataatatatattttatatatatatatatttgagacagagtcttgttctgtcactcaggctggagarcagtggcacaatcttggctaacagcaacttctcctcccaggttcaagtacttcttgtgcctcagcctcccaagtagctgggattatgggtatgtgtcaccacacctggataatttttgtgtttttagtagagacggggttttgccatgttagccaggctggtctcgaacttctggccacaagtgacctgaatgccttggcttcctaaggtgctgggattacaggcctgcaccactgtgcatggcctgtcttagctaatatatttgaaagtccttctgctgtygttttgtgcttccaatttgtcttttgtgttttttccccktgtactttttgtttttcctctttctgccttctttctcagtgggaaagtttcccattactattaaagttctttaatagagggaagaatatcattcaattttctattttttttttctgattcagtttggataagttgagttgtttaggaaatgtccattccatttgttattaaattaattgacataaagttgttcattatattttattatccatttaatatctgtagaatcactagcactatgtattctttaattattaatttttacaattttgtttcttcttttttctgattactttgctgggagtttaccaattctattaaacttttcaaagaactaacttgtgtttttaaattttctctatcatttgtctatttaattctttggcttctgttctgatttttgatattacttttcttttccttactttgggttcaawttgctcttccttttttcatttttttaagtcagaaacttagattttattttctagtatagataggcatttaaagctacacatcttctaatcaccatgctagttgtgtcctctattactctgttgcattcttaacattaattttcaaacattttctaagtttctttgtgatttctctttggtctatgggttatttagaagtgggttatttaatttctaattatttgggctttttctatagatctaatttttatagatttttaagttaatttcagtttaggaagagaacatactctgtgaaaattcattcttttaagttttttaaaattatactctaagttctggggtacatgtgcagaatgtgcaggtttgttacgtaggtatacacgtgccatggtggtttgctacaccctatcaactcgtcatctacattaggtatttctcctaatggtatcccttccccagctcccccaccccttgacaggccctggtatgtgatgttccccttcctgcatccctgtgttcttattgttcacctcccagttatgagtgggaacatgcagtgtttggttttctgtttttgtgttagtttgctgagaatgatgtttccagcttcatccatgtccctacaaaagacatgaactcattcttttttatggctgcatagtattccatgctgtatatgtgccacattttctttatgcaatctatcactgatggacatttgagttgattccaagtcttagctattgtgaacagtgccacagtaaacatacatgtgcatgtgtctttatagtagaatgatttataatcctttgggtatatacacagtaatgggattgctgggtcaaatggtatttctagttctgcatccttgaggaatcaccacactctcttccacaatggctgaactaatttacactcccaccaacagcgtaaaagcattcctatttctccacatcctctccagtacctgtkgtttcctgactttttaatgatcgccattctaactggtgtgagttggtatgtcatcgtggttttgatttgcatttctctgatgaccagtgatgatgagctttttttcatgtttgttggccacataaatattttcttttgagaagtgcctgttcatatcyttcacccactttttgatggggttgtttgattttttcttgtaaatttgtttaaattccttgtagattttggatattagccctttgtcagatggatagattgcaaaaattttctcctattctctaggttgcctgttcactctgatgagagtttctttcactgtgcagaagctctttagtttaattagatcccatttttcaattttggcttttgttgccattgcttttggtgttttagtcatgaagtctttgcccatgcctatatcctgaatggtattgcctaggttttcttctagggtttttatggttttaggtctaatgtttaactctttaatccatcttgagttaatttttgcataaggtgtaaggaagggatccagtttcagctttctgcatatggctagccagttttcycaacacctttgtttaaatagggaatcctttccccattgctgctttttgtcaggtttgtcaaagagcagatggttgtagatgtgtgacattatttctgaggcctctgttctgttccattggtctatatatctgttttggtaccagtaccatgctgtttgtcttactgtagccttgttatatagtttgaaatcaggtagcgtgatgcctccagatttgttctttttcctgaagattgtcttggctatgcaggctctttttcattccatatgaaatttaaagtatttttttctcattctgtgaagaaagtcattggtagcttgatgggaatagtattgaatctgtaaattactttgggcagtaygaccattttcatgatattgattgttcccatccatgagcatggaatgtttttccatttgtttgtgtcctctcttttttctttgagcagtggtttgtagttccccttgaagaggctcttcacatcccttgtaagtcatattcctaggtatgttattctgtttgtagcaattgtgaatgggagttcactcatgattccactcttgtttgtctattattagtgtaaaggaatgtttgaggtttattttctggttagtgtatgtcctatcatgatgaatatcccatgtgtttttaaagagaatgtgtgtgtagtatttgttgagtatagtattctataactactaattaggtaaaggtggttaggtagtgttattcagatttttttcttaataaagaaataaagaataaagacttttcatctcttcttatattaattactgagagagtggtattacagaccttcaacaatgattaccaatttgcttatttctccctctakcttgatcagtttttgtgttatgaattttgaacctcttttatcaggtgcatacatatttaagattgtcatatctttctgatgagtttactcttttattattttgaaatactatttttgtttcttgaaatagattttgtcttgagatttatctgtctcatattaacataaccacaacagctttcttatgattcctgtttatactatatattatttccatctttttattttcaacttatttgtcttttcaaatttaaatcgacttttttgtaggcactcttattatacaggacactttatgggaactaaaaagtgacatcataattcccctaaagtctcccgtatagagtatttattccaagggttaccaaatgttttctgtaaagggccagatagtaaatatgttaggttttgcaaaccatacagtttttgtcaaaactactgaattctgccattgtagcataaaagcatttatagaaaacatgtgaatggtcaggcgatttttttccacaaatatttacgaaacaagtaggcaagatttttcctgcaggacatagttttttgaccccttgtttagtcttagtctagttacatttctctctctgtttacatttcatgtaattatccatatggttgtgttcaaatctatcattgtcccatttgttttccttttgtcctttgtttttgttttgtttttgctctttttctattttgggctaattggatatttttaaaatattctattttatttactttattggcttcttagctcttttaaaaaattctatagtgtttaaggttaatgctatcctattctcaacttttaaggtctatttagattcagtgttaatccacttaacacctaacccttcacagttccagctccaaacctgatgattcccatttctcagtttctacttcccatttcccaaatataataaacattcaacagtaaaattccgttagcttgtcccttatccattgtaccttcttttgcacatctttttttatatactaaaaactcyaccttgtgaaacgattattgcttttataaaaaatagcctatcttttaagaaataataaggaggaataacatcttatatttatrtctatttatttttatgactcttcccatctatggacatgacttttcatatagtttaatttttcccttttttatttaacattttttgtagtttatgtttgttgcaaataatttctgatcttttgtttataataagatgcccattttaccttatttttgaaggatatttttattagatataaaattctcaaataaattttttcagcatgttaaagatattggctcattgttagcttgcctaccttgtttagatgagcagccagcaattgtttttcattattgttccctgtagtaatgttccttttcctctgattgctttatcttttgttttcagtggtttgaccatgacgtgtttggggatttctttaatttgatcttttttaggattttttcaaattctggatcctataagttgatttttccccatcaaatttggcatattttcagccatgaattctttaaatactttatattctatttttttcttcctaagactactattatacttatggtagttgttggatattgtcccccatttctgttcattaaaaaataaattgtgcctttatccttcagattgcagaacttcaactgatttctctttcacctcactgactcttctactatttctggcctgctgttaaactcatctagtgaattttacatttcatttattgttctttccattatagagtttctatttgccttttaaaatagatttcatttcttttctgagagtcatcatctgttctttcattaagactatattttcctttaattctatgaacacattttctttggttttttgaatatgtttaaatagttgatttaaagtcatcatctgctaaatgcaagacccatgccatctctgggtcagtttcttttgatggcttattctttactatgtgtcacttttttatgtctatctagtaatctggtaatataagtagttatacatggtaaaaacgtttagtagatgatcaccttgaactcatgtatcccagggtatacattttgttagggcagacctttggaaaaccttacatgtgtcaaaagccactctaactgtttcacttaatctctgaactctatgtctcctgtagatcttgtcaagatttagctttaagctttgttagggtgaatctaaaacatatcttacttkagctcattatctccactcacaaagtatgactcataaagcagccaatttctcagctggctgcctggggtattagactgcattaatgaggtatctccactctgggtgacatgaactccaatatccactgtcactgcttgacctctaatttctctaacatctctcatgcattctcaatcagtagcagtaactctctaaaatgyctcatgtattcttgtcctggacaagtatagctcaatccttggccaagaattcacagggaattctgctcagatatctgaaacctcccttctgagcagctacttcctttctggcttcttgccttgcatattccattcacttcagcttccttgaactctaatctctgccttctaagagctgcagtcccctttgctttgcttggattccaacttgctttgctgaggttggaaagttatcactaaggagataactgggactattatggagctttcctgttactcataaagtacagttttgtgctgcatgttgtgcaatgcttgaaaatattttcccaatatattttggccactttttggttgtttgtacagaatggactaatccaagacaagttactccattatagccagaaacagaaattcctcatggcttgtttctgattgagattttctgttttcttctgttcactctgctggtttgaagttaatacacttgaattctattttacagaaattaaccttagagtcattacttttataatcggattctaaagttaattcgtctctctcgtctccttctcagtattgcaagatattataactgaaattttatcacctccctcttttttggtacaatcacttagctctacattgttttgttatttattgaattaaacatgattactttaaatagttattgttgattaagtttacctacctattcactattttttccagttcttcttatatctcatacttatctgagattcttttctttctgccccaaaatctttctttaaaatttcctttcccatgggtcatttggttgtaaactttgttttgattcatctgaatatatatttgcttcatttttgttctcaaattatagtttaagaacagagtcttaactgacttttttttctcactactaagactatattttttctacagccttctgacatccgtcattgctttgaaaatctgttgatatatgatatatttgtgatctgtttattgctaattgtcttagtttgcacttattagagtcaactcaagatggggattctcagttttgttagttggaatcagaaaaatgaaaayagaaataaaaacaagatagagcaggaaaattgcaagttaaaaatgcaacttagcagaagatcagcctggtcccacaagcatctctgcaacctgagggttccacaaaaatgtcccccattcatgctagggtactggcctttggtatccttttatmagtcatgctttggctgtgggctgtccctagagggagtatgaaacttttgagacatttccagtgataggaggacaattatcaataggagggtgagtgtgggtctactgttttggtgaaggaaatctgggtagggcaccaagagtcaatctgttatttcaggctgtaagaagatctctttrtcgttggtattctactgttttactagcttcttggtgcaaatttctttttatttattctgcttggaaaactctgtttcctgaacccaaatatttaattatggaaaattgaaacttctttttttagtattgtctcttctagatgacaaaatttaagagtaaatgcctccttaaactttttgccctattcccttgccatgacctaggcctggccctggtctctccattctctcttctctcttcttcagggaatctgactggtcacaaattagaacttcctattttcttttccaccttgcataagttttatcactttttctgtctttgttttatgtaatgattcaaatgtatttttcagtttattaagtccctctctgaagttgtacctaattttcttcaatgcatctatgcgattataatttatttatttaatttttaatttctagaagttacttttagtcttttaaaattctaattggttttaatatcctattattcctttgttatgtctttagtttctgtaaatggtttggatgtgtgttttctccaaatgtcatgttgaaatgtaatccccagtattggagatggggcctggtgtgaggtattggatcatgggggcagatatctcatgaatgactcagcactatccccttggagtaagttctagctcagttagttcacataatatttggttgtttaaaaggggctggctcctcctcgtctctctcctactcccactcttgccatgtgatgtgtctactccctcttcaccctccaccatgtttgtaagcttactactatcctcaccagaagccaagccattcttgtatagcctgcagaactgtaagctaattaaatctcttttctgtataaattacccagtctcaggtattcctgtataacaacacaagaatggcctaatacatttccttttttatactcttagggatttttaacacactgattttattttgtgttatctgactgtacaaagtctgaattccttggcaatcaaattctagtgtttgttgcttctttggactttcctttataaaggcttacttttgggtaggttgtgtaattttggattgcgaacttattattggtttatttaaaattctgggaatcctgagatgtctaagatgaggttatattcctttgaagaggatttaatttgctcttttaagttaatttatcttctgaaagatttttaggacttataaactgtagaaaacaaagtccaaaagccatgggggaaggattgtggattatgcatttttagaagaattcctttttttgctactccaagccagaaatgtcacaaatatttcccttgtcacttacccctgttaaggtgcaatttttttttattgtccacccttttgggcttttgagtgttgtaaactccaacagctcatcttttacaagactaaaatcttctccactatttcttataaggctattaaaatccaaggttccaagatcctagtgttagtaaacaccaccaatgtacccataatttttgcactaggatgttaaccattgtttcaactccgacttcattttgcccttgtgagatcatccttacttttttaaaattcaaaagtgctttttaaagtatgtttgttgtgttttattaagcatttctaaatgttttgaagcagaaaagcgttttagaattactagtgtctatattgccagaagcataaatctacttattgagcacaatgtagtttttatttttgtttcctttttctgtcatactttgatagtgggatatggaggtattcaactataattccatttgcttagattgtttattttttgaatttagattttttgggttttctgtgcttatgtgctttccacattgcaaaatttgtttcagctgaattatttctgttgtttatgttctccatcaaaattgttgaatcctagaagaatagaggcaaagactgacagttaattttatctaatttttaaaatgttaattcctctggacacctaaatttgtatactatgttttatacatgctttagtgcgttatgcacataaactacctagtagtaaaagttccatcctctttcggctaaatcagaaatgttatgaaaatgggaaaattgttcttcatgtctcttttcaatagttattgtgaagagtaagagcaataatatatatgtgaaagaaataccaagtgattagtttgagcaaaggctcaataaaaggtgcttgtagcgtttcttaaatataatgtgttatttcagttacattgtgaatccttaaaataacgtattattttttctttcattgcttttaatccaatgacctaatgagttattggagcctcctgcattgatgctaaaatttctgtatcattgatgtcttttctaggctcttaatgttcctctttctgtctgtctttgtgggatgcgtggggtgcttctgtctttytacattttgtggtggtggtgtatgtataccagtatgttacattgataattttttgatatttcaatcgaatttactgaaatataaatctctaagagataaatatattcattttacataactctgatatggttatcacacgtcacacagttaaaattgactcattaccatctaatgcccattctataggcaaacacttcatattttcctattggacaaattctaaacaattactttccttgataccatatgctcaagtaaattaatattcttatcctacttagctcatataatggaatatcattcaagaaccaatgcaaaaagataaagtgataaagaaatttcataatttctatcaagatatgggtactagaatttcgttaaaacagtgataagcacttaccaacatagaattttgccttaatttaaaaactgaaataagattgattttcttttgcattaatttacggtttttgaagtttatttgatggttttcaaagggatatttctctttgagggttttattttgttattatgtttggttttggacattgttgatggtgattgttttagccagaggcaagaatcctgtattactacwaagtcatctttctggaacttcttcaggacagcttatacaaaaaacaagaaacccctaggtcaacttgtaagtgaatacttgatagctaagaaaacctgagaagaatttccacaagacttaagatgaacattgtgaatacagcagatagtataaaatcacacaggattttgagaaaatagtagctcctctactactgatcttttaacttaggaacgctcatagacatttacaaggctacacactggagctaaagtatgtcagttctgtatattatttccaactgatggcatttgtagacacatatggggaatacagaacctttcaaacaactagttttgcagacagcccttggaatctaatatgtttataagaagagaagcttcttttttttgtttttattatactttaagttttagggtacagtgcacaacttgcaggtttgttacatatgtatacatgtgccatgttggtgtgctgcacccactaactcgtcatttaacattaggggtatctcctaatgctatccctcccctcttcccccacaccacaacaggccccagtgtgtgatgttctccttcctgtgtccgtgtgttctcattgttcaattcccacctatgagtgacaacatgcggtgtttggttttttgtccttttgatagtttgctgagaatgatggtttccagcttcatgcatgtccctacaaaggacatgaactcatcattttttatggctgcatagtattccatggtgtatatgtgccacattttcttaatccagtctatcactgttggacatttgggttggttccaagtctttgctactgtgaatagtgctgcggtaaacatacatgtgcatgtgtctttatagcagcatgatttataatcctttgggtatatacccagtaatgggatggctgggtcaaatgstatttctagttctagatccctgaggaattgccacactgacttccacaatggttgaactagtttacagtcccaccaacagtgtgaaagtgttcctatttctccatatcctctccagcacctgttggtttctgactttttaatgattgccattctaactggtgtgagatggtatctcatcgtggttttgatttgcatttctctgatggccagtgatgatgagcattttttcatgtgttttttggctgcataaatgtcttcttttgagaagtgtctgttcatatccttcgctcactttttgatggggttgtttttttcttgtaaatttgtttgagttcattgtagattctggatattagccctttgtcagatgagtagattgtaaaaattttctcccattctgtaggttgcctgttcagtctgatggtagtttcttttgctgtgcagaagctctttagtttaattagatcccatttgtccattttggcttctgttgccattgcttttggtgttttagacatgaagtccttgcccatgcctatgtcctgaatggtattgcctaggttttcttctagggtttttatggttttaggtctaacatgtaagtctttaatccatcttgaattaatttttgtataaggtgtaaggaagggatccagtttcagctttctacatatagctagccagttttcccagcaccatttattaaatagggaatcctttccccattgcttgtttttstcaggtttgtcaaagatcagatggttgtagatatgtggcattatttctgaggactctgttctgttccattggtctatatctctgttttggtaccagtaccatgctgttttggttactgtagccttgtagtatagtttgaagtcaggtagcctgatgcctccagctttgttcttttggcttaggattgacttggcaatgcaggctcttttttggttccatatgaactttaaagtagttttttccaattctgtgaagaaagtcatttgtagcttgatggggatggcactgaatctataaattaccttgggcggtatggccattttcatgatattgattcttcctacccatgagcatggaatgttcttccatttgtttgtatcctcttttatttcgagctatctatgacaaacccacagccaatatcatactgaatgggcaaaaactggaagcattccctttgaaaactggcacaagacaggggtgccctctctcaccagtcctattcaacatagtgttggaagttctggccagggcaatcaggcaggagaaagaaataaagggcattcaattagtaaaagaggaagtcaaattgtccctgtttgcagatgacatgattgtatatctagaaaaccgcatcgtctcagcccaaaatcaccttaagctgataagcaacttcagcaaagtctcaggatacaaaaccaatgtgcaaaaatcacaagtattcttatataccaataacagacaaacagagagccaaattatgagtgaactcccattcacaattgcttcaaagagaataaaatacctaggaatccaacttacaagggatgtgaaggacctcttcaaggagaactacaaaccactgcgcaacaaaataaaagaggagaagcttctgttttarggtctcaataattaactcakgaaaattaaataatattccaggcaggaaagctgataagggaatgaagcattccatattattaattataacagactagaacacttagtsgtaaaaaaaaattacaagagcaagtttcatagaaattagggaaataaattagttgaaggaagaattaagaaagccctagtttagagcactatgtcatctaaagcaagtttctgaaactttaatattccttctgatcatctggtgctcttgttgaaatgaagaatctgactcagctggtctggggtggagcttggaattctgtatttctaacgaactctaggtgatggtgatgctgcagtttatggatcaccatttgagtataagaggtctaaactctcagaatttgactttggcaatggtgtgacatagaaggtaagaaaatatgtaataaaatacctaaaatgcaattcagagaatagtggtggatgtgtgtgtgtgtgtgtgtgtgtgtgtgtgtgtgtgtgtgtgttgcaatgtatagaatgatatacgtaaatttctttaaactcctaggcgataataaytactttaaattaaagatataatatgtttaaaattctaacgaatgcatgaaaatatagaaaatagcaaagacatacaaagaatagaatttgtgggggacatacatttaaaataaaatgagaaatttcacagtaagaagaatacattctaataataagacatagagacagaatttgtgttagagtaacaggtgcacatgtggaaagaactgaggcacattagctcagctgagaagtcaaaggatcggggtttgtggcagctccctgccttcaaatcttacttttgctcgatggctgtggcttgggcaacatggtaaccaaactgtgcttcagcttactcatctataaaatggggataatagtgtaatcagccaagaaggttgttatgagtatttaatatgcaagacagtaacttagaacaatgcctggtttctgtttggcagtactgaaggattagttttattattacaataatgataataatgttatttctaaaaatttaagactatacttaaatttaagacactaagatttagtgtttacaaaaggaaataatttcagaggtcaggcatagcactgaaagtctgacactgggtgtttcctggctaaagttgcccaaattttaagaatttctcaaatatatacactgttaagtatacaaatatgctttaaaattgaatagacatatattctatgctaaattaaacgtacataaaagtgattaaataaactgaggagaaatctaagtcaaaaatattaaaaacagaatgtgttctagggaaagactgctgttgtcttcaggtgcagccctgaaacgtcggttctccaatgatcacacctgtagtgctaatgaagaacacctgcagattgaaagcttccttttatttcttcttgattacctttaaaatcaggaattatttaaaaaatcggccaggcatggtggctaatgcctgtaatccaagcactttgggaggctgaggcaggcagatcatctgaggttaggagtttgaggcctgtctgaccaacatggtgtaaccccatctctactaaaaatacaaaattagctgggcgtgctggcgcatgcctgtaatcccagctacttgggaggctaaggcaagagaatcgctygatcccgggaggcggaggttgcagtgagccgagatcgccctattgcactccagcctgggcaacaagggtgaaactccatctgaaaacaaacaaacaaacaaacaaaatctaatagtgcccawtttttaagggccatagacagatgaatttggatcttaatgtcacttgaaaagtgtatcgaaggaaaagtgagcaaatcttaagtgtacaactcaatacattttttgcaaaaggaatatacctgaagatccaacacctagatcaagaaacaacatttggtgcacaccagagactctcctcatgtcctctttcaggtactgtatcctcctcagagcgtttcctcccacttttatataaatgtgtattagtttttcagggctggcataataaaatacgatagattaggtggcttaagaaacagaaatttattttatcacagttctggaggctaaaagtccaaggttaaggtgccagcaggattaatttctcccaaggcctcccaccttgacttgcagacagtatcttcctgtgccctcacagcctgtgctcatgcatccctcgtgtctttctctcgtcttacaaggacaccagctgtatgagattagagcaccactctaaagacctaatttaaccttaattttctccttagaggccctattgccaaagacagtctamctgagtgttagagctttgccatatgaattgtgaggggatgcaattgagyccataacagaatgttttcctatagtacatactttttccatgtgacttctttctttaacatggtttgtgatattcatattgttcatgtaatcagggtttcttcagtctcattaatgcatagcatttcattgtatgaatatatcttaatttattaatcagctttactgtttatggaaatttgggttatttctagttaattcttattgtgaatagtgctactgagaatattgttgtacataatattcagcaacttttatagtggaattgcacagccataaggtgagayactatcaaaggagagatactaccaaactcttttccaaaataattacatgaatttctacccctaccagcaggatatgacagtaccattcttccacatccttgctaactcttgctattatctttttttttaattcagcctcatttgtctgcttatagtgacatctcattgtaattttagcttgcattccaaaagactaataaaggtgagggatttttaggatgtttattgaaaatttgaaagccttcttttgtgaagtttatatttatgacttttgcccaattttctattcagttgtctcattttcttattgatttatgaaagtttattgtatatattctgagtattgcaggtttcyttttatactccatggcttgtcatttcatattctacttggcatcttttggtaaacagaagtttttaatttaaatgcagtcaaactttaatgttttcccttgacggttaccacttatactctgtttaagaaatcacgatctgccccaaagggaaagatattttcttctaaaagctttattgttttgttttgaacatgtaaatgcacaacctctggaaatgatttttgtatatgtaggagtcaggatccactttttccccacaaattgatatgtaattcattcagcaccatttagtaaagaaattgccccttctctactgttctacattgtcaaacttgccataatttacttgtgtaatttgttgttataacttgtgtgagtttgtttctggacttcctcttttgtttcatatgtgatttgtctgtctttgtaccagttactgtcttaattacaaaagctttataataagttttgatatctggcaatttaaaaattctagttttgtcttccttggctaatcttggccctttgtatttctgtacaaattttagcttgttaatttttatattaaaaaaagactactgggattttggttgtgattaccatgaatatccagattaatttgaaaattgacatccttataatattgagtcttccatgtatgagcatgatgcatctctctccatttatttttgtttgctttatttcctttamatactattttgtagatttttggtgtagatatcacgaacatcttttgttagattttattctgagtatttgagatatttaattctcttttaaatgttataattcttattttttatttgttcattatggtagcataatttgttcttgtaaaataactctgaattcagtaacattgctaaatttactaattaaatctaatagttttctgcagactctttaaaaacattattttcattttaaatgtatttcatcatttattaaaagaaatgaattaaaattattttcattgatatttctagtgaaaataaaattggaatttttattttaaaatattaattgaataataatattaacttatagtgaaaagaaaagctggattatagatgagagtgtgggatagttcatcagcatgtgagtagatgctagataaactggaaccattgcctcttctctgtcttcataagcataatactcttcagtaaatgagtctgccattctggtctttagtttttatatctataaaataatgatactgtactacataagtttaagttcttttttatctgggatggatgactgagataactttttgctaaatgattgtgctttagacttttttccttttctgctttttcttttatagtcttgtgatgatggggataatgggcctcatgtgatctcattctgggaaagggtactaggtgggaccaagtccacctgcactcccctgtctcctattcatggtatttgagaacttctattgctcctggataccaggtattggctattgagatgatgcaattttgtctcaggttcatctttttagagactrtcctccactaatgcaccctaagtgttcctatatcatgttagatgttggatgatgttttttttttcccctgaaaatctcaagttcttttgagtctatgtcctgaaaagccatctgctagtcctaatgcttctattacctttattccactttcttgtggggggtttcacttagaaagaagggaaatgaagacttcatgtttgacttcctcctctgtttcttttcctcttgcctatgctcttgagcctgaggtagtttattatattcttttctcctcttttagcatggcaaaagwccttgatctagttttctaagtctgaattctaatattgtaatggaaacaagaaaagccttatattcaagattattgtcttgctatatggatccagaattattggcagacatcaaaatgtagactgsctttttwaattttatttatcttgtagcaatcttgatctttttagaggcaaatgctatgcctggcagaaaggtgaggtcagacacagagaaatgcaaaaggattgcatttagatatatttccaaacaacatccttgttatccttgttacataatgtcatatcatatttctcatgttattttgttttctgcttcttttccatctgacatgtccaaatagtgtttaaatgtaatgtggccatggacacagggaggggaacartacacacttgggcctttcaggggaatggggtgggggaagggataccatcaggataaatagctaatgcatgtggggcttaatacctaggggatgggttgataggtgcagcaaaccagcatggcacgcgtttacctaagtaacaaacctacatgtcctgcatctgtatcctggaacttaaaataaagtaaaattaaattttaaaaaaaaacttkgtgcggcaacaactgctatgccactgctatgcaatttctgtcataggacatggaaggatattatgccacataagtcaacgctgtctacctacattaatagatatttaatagatagcaattgtgtctgcacttaacaggtaccttctccatatatgctgatcattgagtttagcacaaaaggaaaaatgtgagaggcacaagttaaaataactgtccttgaagaacttaaaatatatctgtggagacacgacagcacaagacaactcaagaaggcaatataagttataggcattgactataattgctgcacaaggtagaagaacgataaaatcaacagagtccaaagtacctggagatcactttctggagaagttgtcattaaagctttgacagggcagtacatttggaaggtgctgagaagtaagaactgaaccacaagtagaaggaatagacctgaagaatggaactgggatagaacaacgtggcagctgttagacactccacttgactgaataacagagattatattgaagaacaatgtaaaattcatggaatgtataggacacctttaaaatagtatatccagaagacatattgtataatttttagctgtttcccccatgagtttcttaaaacacaaattgtgaaaaactaatatcatatgatgtgaaattggaaaactttgaccccttaaagcaatagctatcagatactaatgtgatttataaaccagatcaccttgtagaaattccctagtgggagtgtaagaactgggtagatacctcctacgtttccaatccaaaagggctgggagatctggagatgaaaggaagattttatggagtgaactgaaggtgtactcgaaatatacacaaggagagatggtgtagggtgttttccccctcagaactagaaagagctcttcaaggagactctctagagagtttaaaaggtatctcttgaagttttgaggttttagtggagacagtggactggattctgattaattcaaagaccaaagatgaggtggtgagcagcttatggtacagcaaagtaaagattctgaatggggattcatctatttttcaggggttgttagattcctctggaagagaggtgggccacgaatatgaaagagctgtcatgaggttgtcctaggtatttccttaaggcttcccagcaactgaactggtctcagctgactagtgactgtggatgaagtaagtaacaaagtgagacagtatgacctgcatcaagcatagtacaggtgaaaggtctccagtgattggaggtgaggattactgaagaaccaggaaaagctcaaacggggagagaatcaactttgtgcctgtcccaaagagggagccttcttgcttagtgagcagaaagtaagcactttcctgcttcatttacctcttgtttcctcacctttcctttttcactccactgctatattccagaggcatcaggatccaaggttcactagctggaaaagaaggacatgggggaaaaatagggaccaacaaattcctttccattggctattggcttccatttgcagcagattccagctgcaggaaactgttaaaactgtaagtcagtttgtcacgtgcagctgggtgttctgatttctaagttgagaatgtgtttgatgagctagcagggatccccaacccccaagccgtggacaggtaactgtctgtggcctgttagaaaccgggccacacagtgggagatgagtggtggacaagcaagcattactgcctgagctccccatcttgttacatcagctgcagcattagattctcataggagcatgaaccctcttgtgagctgcacatgcaagggatctrggttacgtgctccttatgagaatctaatacctgatgatctgaggtagaatggtttcatttggaaaccattccacctcccccatctttagaaaaaattgtcctggtgccaaaaagtttgaggactaccaattaaattaaccrtaagattttttttaataagttctaagttatcagagtctagatagaagcctgattcttgttggccgaagacatgtgttattagtttctttgactgccataacacattaccactaattaagtagcttagaacaagagaaatttagtgtcacatttctggaggctagaaatctaaaatcaacatgtcggcagggccctgctctctccggaggctctagagaagaatctgcttgatgcctttcttttagtttctgatgttgctggcagtccttggcattccttagcttgtagatttatcactccaatctctgcctgtcttgtcatatggcactctgtctgtgtgtgtctttgtgttcacatggctttctcttctccatgtatgtccatccctgtgtctcatctcttcttataaggttgccagtcatactagtttaaggggccaccttattctagcataacctcatcttaatttacatcttaattgcataaagattctttctkaataagatcatattcagggtaggacttcaacatrtctttcgggagtacataatttaacccacaacagatgttatgcagatgttggtctacttgatgcctgcacctggagttagggattgttattggtatgaatcaaagtctcttcctaatttctttatttagaagacatatatgctgtactctttcaaaatatacagtgtaaggttytgagtctgaaacagtgtttcgtagtcaagcccaatcagggctcagctattagaaatgccactttatattttgtccattttactcccagtgctgttactaatgtttctcctctttgacatcctctgaccactttaacaagaaattgagaagactcccaatgggcactgtgagtggaccttacgttaatgtggacttcctttttttatgcttccagtttttgtatgcattaccccatcttcctggaaagacatacctgcttacctgtctgttaggcttagtacttcagagttctcttttgtgaaattttcttagaccaaatagcgctgactgtcagccgtgtgcacaagttcagctattctgactgattttttgggggttgggggacagggactcattctgttgcccaagctggagtgcagtgctgcaatctcggctcactatagcctctgcctcctggtctcaagtgatcctcccatctcagcctttcgaatagctaggactacaggtatgcaccaccacacctggctaatttttgtttttgtagagacagtgccttgccatgttgcccaggctggtcttgaactcctgggctcaagcaatcctcccaccttggccttccaaagtgctgggattacaggggtgagccatggcacccagccctgacttattttttaagattatgttttaaatccttttctgactccagaatattcttttaatactttctgctccttcaaaactctatgtattatctaataatgatattttcaccaattacttgaaataattgtccacagatgtgtttcctccactaaactgtgcttttcttgaatctctttttgtttgctgtggtttcttcagtctgccacagacgttggcttgcagtaggggctcaccaggtgttttctgaattagatcgagtgttcataagagtagataagggccagttgctttaagtgagtcttgaagtatatcacaatttcttgaaggccttcttcaagctaaagttctcagcaaaatcaaggggaaccactgcagtcgagcagttgacagcttactaatcttcttgaaatactgctattcaatctttttcacccaccagcctgaaagacccagaaggactctttcttccttcatcatcacagagtctaattaataaataaacaaaataggtaatgtccagtatgatatgayttaatcattttattgtgtggctcactagggcagtgattctcaatggaatagtaagccttttttgttgttgttctttaaagaacagtgataataataggaataataatgatgatattatattagcttatgctttctcatgcttagcttggtactatgctatgttctttatatgtatttatctcaattatcacctccatgggggataggaaaaaatatcattcccatattacagatgaaaaatgaagacttacaaaatttatttgtccaaaatacacagttggtaagatgtagtgattgcagttatatcactattcttatgactgctttagtcaattaatcartgttgttttaaactgttagcatcttctattcagccaaataactttcttaaggggtgaatttaaaattcttacctatgtatgtaacagtcctttctggaaagctattgctcaggcttgaattttgtatcctccaatctgaacatttagataatgatgcaataaaatctattatgggataytcctcaagattgttatacattaaggcagggaataagatatattttcataacttttgacttcgataaagtactttcctccttgttgcagcatagaaaagctctgaaattacatctcataaggaaggtaatctgcagttatttacagttgtcccacagtatctcattttattactttgtggaaagacccaaactttcatgaatattttaaaacccatgctcactagcagtggaaggaaagtcaatttagataattttaaattccatttcagtccattgtattccaagtaaatgttctgtcctgacattgcttacatcttgtcttttgaaatgatggaagctaatgccttttcttgctcgagtgccagttttgttcacatgtgagagaagaaagagaagcaaagaaaacagggctgagtatctgctgcagtcacccatgttctcagctgtaagggagaaaggacatttggggaagtgatttggcatttaaagcaagtgtttcctgaggcagctgctgaatggagctgaatattttgttaaatgattttcttctctgacctttattactaatgaatcttctttaagaagcatttaaagaggaaaaaagaaaggttgtttttattaatcttctttctcttttcccgtagaatacaaagaaatggtgttacctggcaagaggtcttctgtcttttatgaaaaattagacaaaggtaatgcttattttgaattgatattttttcattctgtataactctacatgaaactagttgactttccttgattattcgttttagatattgaattacccatcaaaaaagtaaattattatctgaaaagccaagggaaggccttacgatgatcatcagattgataaagtgaacagtacatttttagatatataatagcttttcaaaacattgtgggtratggttaattttctgataccattttgaagtttatgttaatatataaataggatcttgagtacaggattgcagtctctttggaaataaatccaattggtttatcatatttacaaatgataggtaataacagcattagacccttgttagggtacaatgataagattctttgtgactttatttggcgttagtcagatgactttatgtatttttttgaatatacaaaaaaaatttcaatatgaatttctagaaaatgtcatcaagctttatgaagacaccctcatgcaaaatacatattttctttggaaagattgaattatatcatgcagttgttgaatagcgtgcctgattatacttaacagatgcatatttagttgctaaattttcaaatcactatgtgaattatttacatatgttgttctaagaatatgaaaactcatgcaaatattctaatgacatacgcatgtacacaaagtgtgagtatggctgcagataaacaatgtgtgtatgttttatgaataaagctactatctcaaaagagatttttgcagaaaagtttcagacagtttagaattttgaagggaactgagacatccattgagtcctgtctacttatttagctatgaagatgtgatgacactgtatgttcatgaacatatatagtatattaatgaaatgtattatatatttttatattaactagaattgattgggttttatttttgacaaattactgaatttctaaaaataaatgagtactgaaatacagrtagcatttaaatgtaatggatatcagcagaaagcttatttctgaactttgatttgcagttgagcaaaaataaattgttaaatttgaattacaaatgtgatatatttctacatatttctggcttctaggtaattcttcaaaacaggtataaaccccttgagaaaatagcttcttttcctaagggtagtcaccctatccaagttttatctatactgaaatgttaattcaaattaaaatgttcttaaatggttaatgaagttaattgagggttgtcttttacatagaactattagctttgactctccaaatagggacattataaagagaacaaattcctagacaatatgtggaagaggttgaagctgagctgtgtgatgtaggcatagggagataaatgctagaaaagtgcttgttgaaggcaactcaatggaagatggcacagtaaagagagaaagagaaatatcctgaatgagatgaagccaatgaggaaggtcagggatccatgtgctttagaatataaataaagcatgcagggagcacagactctccaggttgcatttatgtgaatttttcttttctcagagatatgtatatactaatatactcatttttaggcttttattttatttatgtaagctatgtataagcttattttgaagtgaaggtaacaaaggaagacttagggtgagggaaagtaattcccattcatgggatagaattttcagcatcagtatacccagagtaacaaaatttgttttttttctattatgtaaataaaggaatcaaggaatcattctgtgtattgccaaaatttggcatgatacaactcccaaggtgattatgatccaagatatgtatgttgctgtggaggttggaagtgagatattgaggaatagctagggatgggagaactatggccaggagaaatgacgtttatgtcattatctttctgggctggtcctatagatttgttgaactgggggtgtttgcaatctcgtaaaattcctattaataaggtaatacacactaacatattaacattctgcctattatctcagatggaatatgtgcatttaaatttcaatgtttaaatagtggaagtttaagacataytagtgaaggtgttatttttaaacaaatggaaccattcagcttttcttagtatacatgatgactaacacattcattttgtgtaggattaattctggcaatgggctcagcatgcaatctgttggattaaccgacacttttatgtgtgcagatacctgtgagttctacatttgactcttttaaaaagggcatttaaacaacttttcaggtagcgttttaatgtgaagttattggttataagttatagttacaattttcttaattttgtcatccaaagatggagggaacttcaattagtcaggttaaaatatctttcaatatacctggtaggtataccayggtaggattacatgtaaaaatacagaccgtgattctgttcaatttttacataggtttacatgtcctggaaatagatcaaatttcaattaagaaaatttcatgactgtaattatatttttattatgcaggaatgttaaattttattctcacatatattgaattttttctggaggaaattgaaatagcatattaagaattcagcaattcttttatgtactgtaggtttactatatttaggctttctgtaaacacaattttgtaaattgaaaagaaactgggttataaggctactatacagggttacttatgttcaaggacagtaagaaataagttgtaaatatattgtttacagattggttttattttggtttattatttgatgtaggaaatgatacagatgygatacatgttgagatttaaaaggatacaaatcttgtgatattttaagrgtttattacagattatattttctattatttatcacatacctactataataacaactgaaagtacagcatcataacttgcaggttgattaataagttagtgaccatgcatttaaatgagagttagaaatagtttaaggctagtgatgaaaagtacatgtaaatctcacagtgccgaaattaggttctatgtctgatatataccatacaatgctttacaaaaacatattcataacatcagcacagtatgctcccaatgagtatttaaactgcaaatcagagaataaatcattgaacatttttatggagaagtgattaaaaagtaattattaaagaaaaatttacatgaaaagaagctgttatggtagtttttaagaatgtggcttttatgatttttttcatttgcaaaaagttcttggtctttttaactcttctgggtattagtttctgtgcaatattttatctttttgaaactctcagaactataaaccacagcattgtctagaatcagctcctgctactgttcaagttcttccatcaattccccagctatgtttcttaccttatttatgtctctcttaacaccacatattccaaacattcttgtctttgcttaggtttaaagcttggctttgaatgtctggtctgctttcttctttattccaaaaactatgtaaccttaaaacttctctttaagatgctttctgagaccttcattatattacaactctctttctcccttagccagcctacactacattcactcacacttagttgtggtatccgccatactgtcattgatttgcatattctggtatattcttgtatgtatacatatgtatatgtgtgtgtgtatatatatataatttgatatcatatataaaggtgcacacacagacacggatttttttcttcaatataattgtaaaaaagatctttctgccagccacgtttacttttccttatgagtaaagcagacaaattttgagtgaatgagctccttgaatctccaggatttccattgaaggtatatttaaaagactaaaagatctctttgtaataagaaagttataattttgctatgttttgtattaattaggactacctggagaacctactatgcttttatgacatctttttttttaagacggagtctctctctgtcacccaggccggagtgcagtggcgcgatctcggctcactgcaatctctgcctcccgggttcaagcaattctcctgcctcagcctcccaagtagctgggactacaggcacgcgctaccacgcccggctaatttttgtatttttagtagagacggggtttcactgtgttagccaggatagtgtcgatctcctgacctcatgatccacccgcctcggcctcccaaagtgctgggattacaggcgtgagccacagcgcccggccttatgacatcgttttaataagaataaaatctaaattccaatcaactaatttataacaccactgtaggaacacattctcttcaccaaagggagacagcttaattttatcacttactggctttgtgccactccatacatcattgcagaaaaatctaacctgccctacccaacaaaagcatttttgtgcaagagcatatactctgctctatagtggagtctctctaggctaagatcctaaaagtacttaaatgccaggtatggaaatggagtagggtcatggttatttggaaagctgaaaagaaattaggcctattgggtttggggagaagactttgggaattggggctctcagagaattggcaattcccagtaaaagactaaagtctttgagggaattggttcctttaaggctttagcagatctgctcatttttatttctggttttgcagcactaagattactttggaaggagaatcacatcattgaagacaaagtgatctgggctacaaataattggtaacatgtccactagattttgcaagtacacgcttgaacataaatgtatgtttgttcttctctttctctctctctatatatatgatgctgaaaatcatacacacacacacacacacacacacacacacacacgagatgcactccagcctgggtgacaaagtaagaccctgtctcaaaaaataaaaaataagaaaactatatatatatatatatatagagagagagagagagagagagagagagatatatatgtatatatatatatattcatatatatatgtatatataatatatatatgtatatatatacacatatacagttggctgttcatattaatgggttccacatccatagattcaaccaactgggaatcaaaaatatttggaaaaaaaaccagacaataaaaaataatacaaattaaaagacaatgcagtaaaacaactatttatatagcgtttacactgtagtaggtattataatctagagatgatataaagtgtctgggaggatgtgcataggttatgtgcaaagactatgccgttttatataagggacttgaacatccgcatattctggtacattgggaaagaggaaacctggaaccataccccactgggtaatgagggatagctctctatatttttaatgaatttgatgttttaaaaagtatgccactagatgtcagcagcaacctcctaggggtcctgtgaccttaatttgctaacaataaaaaatgatacttcattagaacatcttacctgagaatagtaggtacttaatttgaaagtttaagaactattttttttgccgtacaaagagtaggagtgcaggcataaaatatttttgaattattttctaaaccagtttctgttcacatgtaacaagttatttttacttccagtattctctgtatcattgagatgacaatgacgaattatgggtgaacytgagtaatttgtcaggaattgtacctgatgccggagctctaaacttctgctttgatactttatgattcatttatgccatcattggatgggtatttgtgctttggttttgtttcattctgtttttgtaacagcatttggtgctatagcccatcagaagattgtgtagtattaatttttcggcatccacatctgtgccctttttacttaataaattctatctttaatttttttccttaataatttctaaactttcatggatctctgttcagttgttacaaggtactcaacttttggatagatgccatagagtattatgaatgtttgctcatgagttgacaacatcatctagaaataagaaaaaatgatattttccatggattatagtacatataattttttagtttttaagaattagtaaaagtatctcatttttttcagaaattaataagaaaattataggctgggttcaatgggtcatgcctgtaatcccagcactttgggaggccgaggcgtgcagatcacttgaggccaggaatttgagaccagcctgggcaacatcgcgaaaccccatttttactaaaaatacaaaaattagctgggcatgtgacggrcacctgtagtcctagctactcaggaggctgaggtgggaggatcacctaacccccgagaggttgaggcagcagggagccgtggtcacaccactacactccakcctgggtggcaaagtaagaccctgtctcaaaaaataaaaaataagaaaattgtagtattggccaatgttcaatagatactaataatgttattttaaataatgccattaattttttataaggttaggtttacattagcaggaggattcaatctaatttgttggatcttaagcatgatttagaaatcagtcataggtgattgggtgtgagtcaaccaagtgtgaagcaggtttgtaagtgataaagagaaaggaagagttgttcccatttctctcccttggaaaaaaatctgctttaaatccattcaagatgtaaagataattataaaaacatttgctttcctgaagcacattgtaccaaggaaaatattaatgtaaatgttacatctttatcatgtttaagatttttttagttggtatagtgaggtggggctaactgagctagttcataggctcagggaatatgtactttcatactgaagttgttatatttgaggattattggtttaacttcataagattaacactgagtttcttaaatcttactgagttttgcatctctattttagaactaccagtaaaaaggacttaacaggattttccccaagactttgattgttattctttaattatgtttacaggtgatgaggcagacatttgaaatcatgctacagttacttggcatatgaacatcaatatgaacatcaagctaatgctgtacctttcattcatgaatagcacttgctcgtggccctgactacctatgccatgagaaagtgctattcatgaacagaaggcacagcgctagcttaatgttcagttaagacactcttatcattgagcctgatgcggacgcacaagtttgcttgatctagaatagtccagcctatgcttcccatacttaactctctagaaggggcaaggaataagatccgattggggcatctgtcttcagtctgccactttcttcgtaatttatagttaaatgacaactgctcatgaggtattttgaatagagagcccgccarttttaaacaaactgttttaactacacttaaaaagctaacttccatttctatatgtatcagtgcatttcttctcaacatgttcatttgcttgtacatttaagtggattaagttaaaacagagagaatggggtttcctttgggctatttcataaattcaaacacctcaatctgacattcaaagactgcttttctgctgctgcattctaaattttctcaacctcatttccagtcgattcctcacccagatgttgccttgtagctatacagcctggttgatctcatatgcgtacgacttacttatttctaccctgctggctttgcatttaccattctttctacctagaatttaacttttttctcccctttcctaacatcttgttcttcgtttcagagacagaagagtgtacaaggggcaattcttttttttttttttttttgctttcttttttcttattattatatgttaagttctaaggtacatgtgcacaatgtgcaggtttgttacatatgtatacatgtgccatgttggtgtgctgcacccattaactcgttatttacattaggtatttctcctaatgctatccctcccccaattccccaccccacgacaggcccyggtatgtgatgttccccgccctgtgtccaagtgttctcattgctcatttcccacctatgagtgacaacatgtggtgtttggttttctgtccttgtgatagtttgctcagaatgatggtttccagcttcatccatgtccctgcaaaggacaagaactaatccttttttatggctgcatagtattccatgttgtatatgtgccacattttcttaatccagtctaccattgatggacattttggtagccagatagtttgggttcgaatcccagactggtaacttcttagcttattgcttcctggctgaagcaagctatttaagctctgtgtctaatattgccttcttctgcaaaactgggaaagaaagattcttacataatttagttacttaagtgaggatattaatagaaacttagaatagttactggtacatagtaagtagttaatgtatattagccactatgaattccatcaagtcagtttcaaaattcatcctcataaaatttagtctcaaaatttactgtccttcatgcagccactaatctcattagcatgtatttcaaggtctacctgcccactctatcagtacttttacatttggtaatctatacattttaaccacttggtatattcatttcctcatcaataaaaaggacagtaatacttgccatggtcatacctagggttattatgaagacaaaactagaaaatagaaataataagattgatcatagtaaccatttatcctgctcttatgtgtaagaaactgaattagaggttttacttatgttaacctatcacttaataccttatcctcatgttggtagcagggttctaagaaggagaaggcagaaatgtgaaagagctcttgaggcccaaggttcagaactgacacaaattactgcatgctactgaccattacaattggttggatagaagaggcagggtaattgaggtcgtttcacaatgaatatgccagaaatccatcctacatatgaaaaaacttwaatacaatgagatttaaatacttgctgctaatgtagacttgggacctctacctggcctgttaggaaactttacctttcaggatccagtgattctgcaaggattgggcacgtgccctgagcagaattattcatagccataacatgagaaatgctatttaagagagaaagattcttcttttaggatcaaaattgtcaggatgttgacttatggcagccagtaattttttgttctgccgtttggggaagataatgcaacagttaaaaattaaaagaaaaaaattgagagataagaaagagccaagatacagaatgaatgagcaagtattagaaagatgcgatagtatcatttgggtcactgaatctagccatacttgaagcctatagcttgctaatttttgtagaatatgtatgtgtatgttattaaacaggtttgactaaggtttcttttrtttgagaactaaacaattttaattaatgacaatggattagtttgcaaaaatggccacagcaatgtctccagtctcaaatgtttttccagaacctcgttggcatccccatcaagaggtgaggactattttcccctcccttgaacctgagtgggtttgtgtctgctgtgttaagcactggagaagtaatgctatgtgatctccaaatgtaggtcataaagttgacatagaagctgcttgcctctctcttttttgggacacttgtccttagaatctggctatcatgttgtgagaaagtccaggcctaatggagtaaccatttgtaaggtgttccagctgacagtccagctaaggtctctgccaacagccagcatcatttgccaaccatgtaaataaacaaatcttcaaatggtctcagctcctggccttgccacagcccaagtgataatgagtgaaacagagaaaagctatctccccatggtcccagcctaaaatgcagatggttaacaaaacaaatgtcaatatttgaagccactaaatgttgggataatttgttaggcagtcatagctaactgcaaccctaacttctcccagagctccttcccagggctctcttctgctacactgtcagaccctgctctacctggtactgccattccactttcacctatgcctttatttctacacactttgctttaccaggtggttatagacattttgtattcagcattgtatttcactgactttgtgatatgctattcttggatgaaaatggggttggagatccccatgttattctatgccccctattaaaaagctggtattccaacttgacaaattctactcctactttctagtgctatgctagcggatagccactaggcacatgtgattatttgaatttgagttaaattcaaattaaataaaattgggaatttctttacactagcaacatttcaagtgctcaatatttatatgcaactactggctaacatactggacattgcaacattatagagcattttaatcatctcatggttctattagatgatactgctccaatttgcaaatcacacatgtggcccaaggctaaatcctttaaatactaggattcaatgatgaaaatctttttacctagagcagagagctcaaaaggatttggtctctcttactcaggtttgagctctgggagaggacagagatgaaaatctctacctcagttaatagggttgtgtttcatttatattcacatgaaaagactacctttggtagactttcctaatttatttcctagccactgcacatgtggacaattgtttattttcttgttaacattagttatatataataacatttcttattaacattagtttctgtttttcagtccagtctgatttgtagaacaattcaattcccagaagataacccagatatcttttgcaaatatttggggcccttgttctcccagcagagagtcctcgtgagcacatagggctcctgttgacttgaaagtgaactctggctgtggagtggatattactcccttaaaagagaaaaagagtaacttcaaggcaaaaagggcctttattctccctgggtgtaagtttcctttaaagcttgtttattgatttttcttgtaacaactgagcttgcaagctataaaagagaaaagcaaaaacaaatagaatcagggaaataatatcaatgatcaacaagtttattcatcagctttatctcatttgtagtcagccaccacaggcctgtgaaataaaaagcaccacaagctgcaatcccagtttttattatggaatccatagactttagctggtcaaaagggaaaacaaacacttcaattttcaagcaagggtccattgtcattaaaagtgattgtgcctgaatttatgtcaacgtgtgaggaaagtgcagaaagtaagtgaaaagaagagaacatggttgagggcgtgatgcctggtacaatgacagtggcaccaattttgatctctaattagtctgtcaaaytgcctgaagtaccctctgttaatattgttcctataggaaaacatatttctaaatttatgacccatgtgatgaacctttaagaaagtcctctcattaggtaattttggaaaatgctgaattttatatctccctcctgtaattttatgatgtaattktatgatgcacattagaatattagtctctgagaaatcttgctgtaaagaaatctgtttaactttgtttaatccagcattttctcagattggtggaccattaagccttctatattttagtgtatgttttcatgtaatactcattgcatctagtggtactagctttcaatgaagcacactgtaaaatgctgctttagaagaaaacatggtttcctaagtgggcagcccaaagtttacccagggaaagggtaacactttaacacattagcatttgtttagacagattggctttcctaaatgagcaggatcttaaaacccccaggatgtagaagaggccagcacatatttcctaaggagtgctgtttcaggggactccagggacactcaagggtggacaaccatatctggcaaggccttttctgggacatgaggctttcaaagctgtgtttctggaaaggttgattttggaaggcatcaaatgggagattattagttcaagaaaatgtaatagtgycgctgtgtgactttcagagaatgttcaatcacttccttttctctttgagtaagtatttctcagaagagtagacttctctgtttctgctttctcaccaaccatttactctttgatcyacaacaatctttcgcttactctctcattccaatagaactcctctttctcagattttccacttgccaaatgcagtagactctttctgggtgaacttactagcctcctctatgattctgtattctacctaaatgcttttgacttccatatttctatctctagcccaggctacactttgagcttcaaaattgtatccccagagacatcttgaacttagttcaaaattgatcccataaacttgtactttcaatctcttccttctatagattatttgaagaccatcatctaccctgttaacccagccagaaacctgggagtcatccttaatttctcttttgctcttagcctcttcacaattgatcagcaagtcctactggttttgacaattgtcaaaatattgagatatatacatgagaaatgctgtttaagagagaaagattcttcttttaggatctgtcccataattcccatttctttcctttccttaggttctagcaaaacactggcctcagagtcaaaacacagctcttccacctgatatatggagagcctggacatgtttgttattccccttaatgtcttattttcctcatctgtaagatggagataatagtaaaacctaagagagttattgtaattttgtgaaaattagatgaggataaagtggggatgttgagagaaaattaagttgttttctttcctctccctaggaatgagggctggggagaagtacttatttattattaggggaaaaatcttagtgggttagttgacatttatatggtaacaartatgtctttaaaatgctatagtagtgaataaaaaggaaaacaagtacrtttgtgattggctagaattcatgagacaataatttatcaatttttttttctttcgatatacaatggtgggctattgccaggaaaataaaagaaggaaactaaactatctttaacacattttaggacaatagaaatgatcttgtgtgtgatggagtagattaaaaggaaggacccaatggcagcatgccttggacatttggattatctgttaatccaggctcatgtataggtatctgcatcttgtagggtcagccagcaggagcgcagttaagggtaggattcagatgtcctcatcttttaagacctggctrttaatttcagtcaatttcatataaacacctcttatttttgcctagtggctatcttagtcaccctactgctatgacaaagtgccttagcttggttaatttataaacaatagaaacttatttctaacaattctagaagctgggaagtccaagatcaaggcaccagcagatttggtgtctggtgagggctagcactcccttgctacgtcctcacatggtagaaggtgcaaaagtgatgagcatctcttttggatctcttttatttatttattgttattatttttgagacagagtctcactctgtcacacaggctggagtgcagtggcacaatctcagctcactgaaacctccgcctcctgcattcaagccattctcatgcctcggtcttttgagtaactggaactacagtcatgtaccaccatggtgggctaatttttgactttttagtagagacagggttttgccattttggccaggctggtctcgaactcctggcctcaagtgatctgcctgcctcagcctcccaaagtgctggggttacagtcatgagccaccgtgcccagcctacacctcttatataaggtcatcaatttcatccataaaggctctgtcctcatgacttaatcactttccaaagtccccacctcttaatactaatacactggcaaataagtttcaacatattcattttgtggggacacattcagaccatagcaatggctaagagtcctttttaaaactgtattagtgagagataactgaatagcataatacacatagccatgtgtactcttaggtttaccatgataagaataataataaatgattgatgatagtcactcattcttttaataaatattattagtctttttctatgggccactgattctagatgctgggaatatagcagtctacaaaacagaaattactgtggtgctcaatcttatgatccagttaaagaagacaggcagtaaacaaataagtataaagtattctataaaggggctatggagaaaaataaagctggaaagggggtcagagtacgttgtggtgggtctggagttatatatttaaatagggaggcctgggaggcctctctgagaagattctatttgagcaaagactggaaggaggtcataggaccaaagagtggttttgataaaaggaatcaaaacctttgatctgactttcctttcactaaggccattctagctacttttgacaatcaacagaaggaaagatctaggcaagagacaatagtaatggggcccagaagaggtgttggaagggacatgttgcagagataaagttcaattttagtgtatatggcttctctaaggctcatgctctcttctgcagaagtgccaggatttgaagagtagagtcagggagagacaccaaggaacaaaaactagagagaaataccagagtgatgggaagagaatcatttgtgttgtcacaaaagcaaagacagtgcaagttttaacaagatatgaacaatgtacaccactgcagagaattcaactatgaatgtattatatctgaaggagatacatcaaatttgacaaatagaagtaaatttgtggcattttcaagaatagttttagtggagttactaaagcaaaaacaactgattgagattgggaagtaatgaggtataggtggaggatatagattgctcattcatgaagcttggtagacacaaataagtggctttcaatatgtgaaaataatattttgttacatgaaaactactttttatatgtgcagtacactcatattttccattctcytctttattatctttttwaaaaaatgctacattttattaaattgattttataacccactctagggttttgactcatgatttcaaaaacatgatcatatgtagcaatcagggataaaagattgcttcttggaaccattgtccacatcctctaccatgtttgtcagtatcatatcttggccattttgttgaaactttcaaaaacatcatctctctcttacatatacaatttttacccttcaatgaataatcacaaactggaaatcaataggaaagctaatccaaatgtattctagtatcattaagactcagtatacagttaaaggcattggctgtgctcataaatttatcctgccaacaaaaaatatgggcaagtttccctactttgattttattctgcctctatgacctctgagatggagatccatggcctagagcagaaggaattaactatgctggagagctttcatccctattgagatctggaatggatccttcttgagcagtgcttggcatatactagaggctaatacagatttgtcaaataaacaaatagtattaagtaatatattttttgaaagtcagaaaacttgcgtacgccaatagaaatgattatttcctcctgggctgtaaatctatgctaatgcaatgctaaagcttatagaacagtatgaagaataaacttgaaaggaaatgagaggtgggcaatagatagagggggttacagatcaaaggacaatttcccctctgagacaaagcaggtaataagttgaaaagaaagtgtattagtccattcttgcattgctataaagaactacctaatactgggtaattaataaaggaggaggtttaattggcttatggttccacaggctgtacaggaagcatggccagggaggcctcaggaaacttacactcatggtgggaggagaagaggaaggatgtacatcccaggagaaagagtgaaggggaggtgctacatagttttaaacaatcagatctcatgagaactcactattatgagaacagcaagggggaagtctgcccccatgatacagtcacatcccaccagacccctcttccaacactggtgattacaatttgacatgagatttgggcagggacacaaatctaaaccatattatttcacctctggcctctcctaagtctcatgtccttcttacatttcaaaatgcaaccatcccttcttaacagtcccccaaagccttaactcatttcatcattaactcaaaagtcctcagtccaaagtctaatctgagacaagggaagtcctttccacctatgagcctgtaaaattaaaaacaagttagttacttctaagatacaatgggagtataggcattggataaatgcactcatttcaaaaagaagaaatcagccaaaacaaaggcactacaggccccaggcaagtccaaaacccagcaaggcagttattaaatcttaaaggtccaaaataatctcatttgactccatgtctcacatccagggcactctgawgcaagggatgggctcccaaggcattggtcatctctgcccctgtggttctgcagggtagaaccacagtggagggctagaaagccccctccactgctttcacaggctggtattgagtggctgcagcttttctaggcacacggtgcaagctgttggtagatctgctgttctgaggtctggagtagccttcttctcacagctctgctaggcagtgccacagtggagactctgtgtggggcctctcaygccacatttaccctccatattgccctagtagagattctccatgaggggtccaccccagcagcagacttctgcctggacattcaggtgtttctatacattctctgmaatctaggcagaggctcccaagcctcaactcttgccctctgtgcacgtggcttaacaccatgtggaagccaccaaaggttatagcttacaccctctggagcagcagcctgagatgtatctggggcccttttagccacaggtggagctggagtggctgggatgcagacagcagtgtcctgaggttgcacagggcagcagggccctgggcccagctcacagaaccattcctccctatgggcctgtgatgggagaggctgccttgaagttttctgaaatgcctttgaggcattttccccattgtctgggctattaacattccatctttacctatgcaaatttctgcagcttgcttgatttcctccccagaaaatgggtctttattttctaccacatggtgaggctgcaaattttctaaacttttatgctctgcttccctttttaaaaataagttccagtttcagatcatctctttgcctacacatatgagcatatgttgttagaagcagccaagccatatcttgaatgctttgctgcttagaatttttttccaccagatacccaaaaccatcactctgaagttcaaagttccacagatctctagggcagggttacaatgcctccaacctctttgctaacgcataacaaaagtggcctctgctccatttcccaataagttctyatctccatctgagagcaccttagcctggatttcattgtccgtatcactatcagcattttggccacaataatttaacaagtctctagggagttccaaactttcctttatctttcttcttctgagccctctaaactgttccaacctgtgtcccttacccagttccaaaggtgcttccacattttcagctatctttatagcaatgcccagttcctgctaccaattttctgtatttgcctgttcttgcattgctataaagaactacttgagactgggtaatttataaagaaaagaagtttacttgtctcatggttccacaggttgtacaggaagcatggctggggaaacctcaggaaacttacaatcatggcagaaggccaagaggaaggaggtacatgttatgtggctagagcaggaggaagagggtgaagggggaggtgctacacacttttaaacaagcagatctcatgagaactcgctcactatcatgagaacagaaagggggaagtccaccctcatgatccaatcacatcccaccaggcccctcttccaacactgcagattacaattcaacataagtgggacacaaatccaaaccatatcagaaagacataactaaggagccttgatagagacaaaataattaatgggatggcactgcattaggaaaaaaggtgggagcattcctcttaaagaagagaatggccacctctcgtttgaggttgagtggttccaattatacttaagtttgtagactgagaatgggaagacaaggaggttatttactaatatctctgagtttctatatgaattaggatcttctgctgagagtaagagagtgtatgtcaagagtggttgaggatarcagtgaagttttggagagtaattgagtagaagaagatgctgatccagtgcagggattggtggacttgacagtttagtacttatctattcacaacttacaattctgtcttctttctcattggtttaaagttaagattatgaattgataattcataggagccagacagatcccatagatttgttttgwttgtttcctgttattttaataagccaagttttaaaatgaagagcttcatatgcaaattttagatttccaggtgtaaagaataagccagaagatctgaaataattcactggagttgagcaatatttagcgtctttagacaaggcctgtattctcctttaagctcagccccttayattacccagcaaatgcatagtgtataatgcatatcactcatttgtgaggcttgtctggcctgtgtaggtgtatgaatgtgagatccctgctttaaacttcagccaatgggatttatttttgaagcatgcagtaaagccaagcttgcttgtttagccttagcctaggatgattgcagcttaatggattagtggtttttaatgtcaggtcatcagctctggtggctgagctctggatattgaggcatgttaacaaaacacatgaaacagatggataagcaaatacatacccctagccagactagacaaaggacaggatgctccttttctctctataaggccattaagcaaccgaacttattgactgattgattgattgatatagtttctcaaaattgttatcaaatatcaatcatgaaccaagtacaaaggtaaacaacatacatatccgccactctctcacagagtttaaaatccagaaagggagacaggcagccaaacaaatgtagctgtgctctgggtatgccaaggtgctatgcgtattcacagccaaggtaatggcctcgagggcttaggcctgacagtgttagccaggcaaacaggagtgggaaagatgttcaaatgtggataattgcatttgcaaagtttggagatgtaaaagcatgaagtttaggtagaatggaagcaaattacctgtcagtataacaggacaggaggaaaggttgagggatgaggctgggagtgtggcagaggccaggccatgaaggagctggtgagtcaccttaatggatttggattttgtcctctgtgtaacaggagccactaaatggttttaatttgggagctttattacatttccatttaggacaatcacccaggttgcactgtggagaatagataccaaggagtaaggctggcagcctggaaacactgtctaatgcagtatactgagtgcttaactatttgacagcattataacaaaaccttgtacattatctcatttaattattaagataatcctgtgagactggagtttataataatgccagctgtaaagatgaagagatgaaagcttagagacattaatagattgttgaaagtagcaccgtgaatgagtggcagaggtaggaatcaatctctgccttagagactcatgctcggaaccattaggacatatcaccccaactgcagcttcccagaagcaatatatgatcgagggtggtagaatggctgaagagaagtaatctactcttggaaatcaggagaatatgattgactttgtgtgtgtgtgtgtgtgtgtrtrtgtgtgtgtgtgtgtgtktggggtgggaatgggtagagagacttggtaggaagagaaggataatatgcagaatttttactgatcaattaagttcatggcttcagtcattcactgagatacacaaaaaaaggagagtcagtctgtgggagatgatacattcagtgaatgtgcaggattgaaagcccacgcaagtgtctgtagaagctgtccagcggagaagcacgatctggattggcaatagagaaccgatggtcctgaacatcaaggttcccatctaatccagggcagtggaggacatttccaggaaatatgtgtagattggaaataaaatatgaccaggaaggagcagtagtttaagaacagtcagaggcaaaaagagccagtaaaagagattgagaacaaaagtctgagggaaaaccagaaagggtatggtgaatttcaaggggataaaggccaataagagtaaacgtttctgtaatgctaaataagataaaaactgagaaatgcattaaattcagtggttagtcaagggacaaagtgatggttaagcgggcactaatcagggaaggtagaagcaaaagccagattactgtgacatgaaggatgggtgggggtgaaaagtacatacgaaattggcatttatgtcaacaggtttgtgagtggtaagaataaatgcagtgactatcaggagcaagggcttgagggagagttgttcttgtcatttgttaagaataaaggaatcatcagcatgtttacgtggcaatagagaaaagtgagtagaaaagaacgtgaaagatgcagggaaaaagaatatgcaaatgatagcgatctttgagcaattgggaaggatatcgtacagagcattggagggagattaattttaaatttaacttccccatggtaatgggaggaatgagtaaaaaaatgtgtagaagcctgtgaatgtgtaagttttgtggcaagaagttaagggaatcctgcataatgaaggaattcattctgtgaagtcatagaggccacacatgtcttgtttagacaggatttaaataaagttgatgtctcaaggggtagttttaccaaattatatgtaattcatatgtcattgtactcaccattatataactcaatgcaattaatttttatagtaaattcttgtggcagaagttctttactgatttgttgctgaaaattagctatctcaaaatgtttccaatacgttatttatcagtctcactctgtgyctcccctctaccacctcaccatcatgccccagcttgttttgttttgtttttaaaagttttcttcatacatgttctggaacaagttcctgtggtttgttcattccggcctccttatcttgccatccygttgcatcctgtgttgctggtgaggccttgagtcctctgctctgtgaaacacagcttcttctaatagatattcctaccgacacactctcattggttttggggaggtaccaccccattttgcttctaaggtcagtccttgctcctggctagttaagtgccagattttggatacaccatctccttccacactttgaaggtaatgttctcatactggggtgcaccaaatggtggagctccagaaatcagccactcttctgagttactagtctggtgctgctagttcacttgtttcctgagttagccccctttacctactggaatgcatctggtcttctttatgctccagagtttggtaccaatgcattctgccctcagagaggagcccatttttatcccaggatgaactaattctttggggtactaataattgcaacattcattctttcagaaacgatgagacatgctgtagtaaattaagctgccccagagaaaacaagctttttatttatatacccataaacatcaaaccctatgttccaaacctgctaatttgtttaatgggactccctggactcatcactaaatttgggagcacatttttcttttattctcctgaagctcttgttctctctagccttcttaacaatctgtttaaggctggcattgtcatctctgcccctcataatgttcctttaatagtacttctgccataatagtattgtgacctaaccattgaatctaacttgctgcagaatgtattatcattattgtaaggtatttatctttttaaaaatggaaaactatttattaatttaaaattctgagatttcaaatacatacttgttatttrtgagaaagtggctgtgtttggaagggccaatacaacaagttgaggacattgtgagagtttcatttacattaactaatggataaaaatggccttgaaagactcacaaagagggcaggagagagagtaacaggttctgtaccaagttttttcacaatctcttccttttaatcattacatattgtcttcctttggcaggtgaggaaatcgagctgatagaagttaagtaacttgcacaaaataacatggctactaagtttctgagccaagcttaaactcacatcttattaattccagagcaagtgctctagataaactagtttttcttcaacatgatagatattagcacttgttgataaaaacatcttcaatgttatctaacttcagatgtagtcagcagcaaaatcactaatgctatgcaaccaaattagggaaatttttttttgcagaaatcaatctttatttaaaaatgttatagtttgtgaacccaaagtaaattcaaagttcttttttttttttttttttttttttgagacggagttttaattttgttgctcaggctggagtgcaatggcgtgatctcggctcaccgcaacctccgcctcccaggttcaagtgattctcctgcctcagcctcccgagtagctgggattacaggcatgcaccaccacgcccagctaattttgtatttcaattttagtagagatggggtttctccattgttggtcaagctggtctcgaactcccaacctcaggttatctgcccgccttggcctcccaaattgctgggagtacaggcgtgagccaccgcgcctggcctcgaagttcatgctttaaatcataatctagtgaagagatttctatttttatgtttttgcaataagtaattaggctttctggaatatgctaaagactggaataaagaagagtagatgatttttaagagggtctcatcaacaagaattctgtgaaccacacacaagaaataaactttacccagtgcctatatggagtcttttgtgtccaattgtaacaaacaatttgaacttgaaagaatgatttttttttttttaaagaaactactaaagcttaaagaggacaaagccatgaaagcacagaaaagatgacagggtctgtgtgtggggttacaagccaggaaaaccttgtattggtaagactgctaacagattgctcaggctcctaacttaggcttgacttggctaagcttcagtgtgagtgggagcctaactctttccagtagtctgatttcacctagttcattttgtgttgaactctcataatatgtaataaatgtgagtacatttttagtactagtatatatagtatagtagacatcaaaatatctagaatatttgagtaaatacaaatatttattgtgttcattcaattttgagaaacttctgtagttcacctgtgtagtcaacctacccaagtgtctatttgatagatgtctagaagggtttatcacctacagtaccagattttcaggctctccatagtcgactgtgtcctctgcacatcaaggtagaggtactaactccttactcctgagcttgattataagcaatggttcaggaaggtatctagtagaagaaatggtctttcaaactagtgtttaacaaaaaattctacaatttcatatatattaatatgtatttggtgaaatagaaacaagcccaaactgttaccaagacaaatccctttttctttccatgaaaccttttttttttttttggctgctcggtgctgcttgttattatttttcattttcagcatgtatctgatgatcatgccagcctgattgcaccagttagagtgtggctgcccttgacctgattggatccatgtggcattcctttaaggagccttagagttgaccttcctcattctcctggctataatacatcatttccaccctctgttttggggcatctcctactgtggagaggctggcaggagggagtacctactaaccactatggagaccaaatgggtgggatatcctctcctctttggaacagtcagtggtaattatgacataccttgtttaccacctgcacttttctgaaactttcaagtagaggctgctccaggagtggcaagcagaccagtttgctcttgccatataaacttttctgtgattcctactttcttggggctccattcctcccaccagttccccaagactggccttctagccttccattaatgctgttatctttccaataaattttcttatggattaaggtagccagagcctgtttcttttgtttttgatctatagccctgactgatacatgatcttaaccataatgtgttctgagataataaatgtttaaatcatctgggtatcaatattttataatattttaggtataatattatctaataatccttggcccagatagtttttatactgaaagctggtataaaaatataaattcatttcactgatgcacaaacacaaaaccacacataatttcacagaaaggtcatgtgacstacttctaagaaaagattataatctgagataggaaaatgcacctgctgcaaaaataaaaaaaaaatttcatgcaaataagacagggcaaaaatgagttaaaaattgggcaagtgtacaatgactagctgttttcttaaataagattgctcttttctttcccaaaagatggaatgaaggggttaatagaatttagaacagatactttgaagaaaagaagtaattctctatcctacgatggaaataagtacaattctataggaatctgattgactggtttcatcttcaattcctatagattgagttgaaggaatacaagatacagcacaaaaaagaattataaaaaccatattcaactcagtactgtgaatttatggaaaagagaagccataaaatgtgtccaactagtgctctcattatttaagttaaatttggtgccttcattgtaaataataaaaagtttattattacccatatccatgtattgttcaaattcctcatttattgtgacactaggttttttttctccctgttgcrgttttagaagatactacttggcatcatcagacttttgataaagtgatgagtcccaaagcttgattggaatggtttcaagaaaggattggagaagaaaatttgaaaaccatgagtataggcaaatctagtaagatgctttactatacagggagagagagaaagagggtggttgctgaataaaatttttttgttttgttcttttaagatgggagaagtaatagattgtttgtatgctgatgaaaaagaactggtggagaggggaaaactgtagaaaaaaaatgctaaaatgatgcccttgagtaggcaagaggagttgagatttagtataaattggagttagttttagacaaatgcatatagagttgactcacaatgatggagaagaggcaagatatacaagtgcagatgaggttgttaaaagggtctagatattgcataccttttgatgggagcttgcatatcttccagttgcttatattttcttactgaaataggaagcacagtgtcagagagacataaagatggagggggtgtcagatgtttaataggagacaaaagtatttaatagaatttgaggtatatgcatgagtgaatggatcagggatgtataatatatttgccattgaagataaagatcatggatataaagcaacgctggccagtatggttatgggattttctccagacacattcaaccacacaggtaaaaggacagagtaggtggagctctgtgatttaccaagctctgtgattaccaagctcatgattttcccaagtgagcataatgaagcacaagagagtcatggtagtttgaggtataaagatatggctgaatgcaataaacaaccatgacatttaagctggataagaatggaaatgaggacatgaggagggaaggtatattgaaaaggtggttgtacaatggattgtagatgtcaggggccaagctgagctggagagagctgtgctgtgctaccatgcttcagaatagctgattatgacaataaaccacaatgaaatagtgctctaacatttaatcactcactgtgatagtataagcaagaagctaaaccagagaaagttctgaccactgtctctaccacttcccacttccaccccacccatgcaccacctctgtccattttacccgtgaaacagtactggatatctgagggtcaagtgaatcaatacatgtggggaattgctttactgctgagggagtcttgaacaaaagtctcctttagttttatatactaggggcccagggaaaagggtgaaaaggaaggggtaggagtaaaaaattattgagctagagtggagaaaagtgtcttcaaggttccccttcagctcctccaaatgataagttcttagcagaggttcctgaaggccttcttgctgagctaagaacacggatatgcataagagcatggccagccctgggggcttgagtctgtgactgcaactcctttcagcaatgcactagctgcacaccaagtctggtatgaggaaggtagttcaggtctgccaggaaaagtctttgtaactgcctggggttaggcctgaaagatcacagtaggtttttagccaaaacccagattcctcagtagaccctgatgcagcttaaagattgttggrcacagaatgggagttagaaaaattaggaaatgagatgcttgtgattgagatctgcagaaagtccagatattggtagtgacaagatctagggtctggtaatgaaaatgaatagtcctaataaagtggagacaatcrtttaagacaaaaggcaagatcatatctgtggatattgaaatctcaaatagttatgacaagaataacactggaaggagaaatggtgacctaccctttcagtgctaagatttaaaaattaatctcgtatgtctttttttctatgagaaataatttatgaaaactctattgatttcaaatcaataaaaatgatggatttgtttcagaaaaaaattgtttataacttgtaagatctgtaacttaattgttttctcttactggtaagggcatgttcatgctaacagtagccctatagctgtggttacttatcttaattacagccaagatttatttcagcttgagtgttttataagcagattagaattttaaaattttcacagccagtcttcttgcattatactctttttaaattcaagcatgtwtcatattataagaagctaaccttaaattatagcccttgttttgttaaatattcagtattctaggaatttgaaattctcaaatgtagtctttaaaactctgagtttatctgataaggattttattattattgttatttacatatgaatacaggaacaaaatgtgatttaagtaagtcatggcctagaaagggatttgtaatgtcttggccctatttaagaacttttacccatgcctcatgttctaggatttctacttgatccagcttggaaatctgaataactcatgatattgggaaatttccatggctgcattttcttcagttccttgcttgtagctcacctttgtctcctgtttttcttgtaggtttccagtatatgctttggccatataaagtaataaagcaaataagttcmtatcgtttaatcatatagaaaagcccagcaagaatccattgtccaaatcttgtttgattaagattgattgacagttttatgtaattggatgacatttttaagagaaaatcaacagaacattatcacatggttaaagcctactgccagaaacaataaacttggcttacctatttcgttagagtattattttgatttattcactcatgtatataattcactttcacagttgatcccagactctgtttttatgaatggcaactcagagaatttaggtagcttttctgggagcaaggttgatggcattggtgtgggttggggaaagcctaacagtattaaaagggagaatgatatagaggttgttcatcccatgttcagttaccgatgtgttttcaccaaaaccatataatttaaatgtctccttttcctggaaaatatgaagcattgtacaacaggtaattttaataacaatgtaacttaggctgcttatgattgacatcaacatcacatgtatataatatgattgtaagaatttttaaaaatgcatcattgggataataaactgtaactgacatccttttaaactaaaagcaggtgaaagcttgccagtgttccactctctctgacttaccattctaagaataaacacatacagtggagtgtgcggggctgcacactgtggttttatctacttccttgctagaggaaagcactgttataaaaacaagtaaaacatgcaaagggaagtaatttaataagtaattttacaataaaagaatggaactataaacctgcttttcttggacagccttggtgttatccaatttgccctcttactgagcctctctactggctggctgtaaaggacatggtgaattaggatcagaagtcgatggctgtgtagtgcctggttttgaaatgtttggagaacaacataagtagtagctgatggcaaggcagagggacgcagggttgagtgggcactgcagatgccaggatgacccagtttaagtgggtgtaagcagtgaagtaagcaacaaagttgggcaagcactgaaggtgtagtttgtgtaggagacagatgtcagggctggggtggggaaagggagtatctgtaccacagaattacagcctgggtcagttagtgccttgcactgatgtttgtgtatattttgtcccctcagctagattttattactctttgggggtggtatccttgtttataattgttcccttgagctgctgggcacagttatggaacaaggtgggttgttgcatgaggatctcttggaaagttctcctggggctttctggccccttgaggatggtataaatgctagtaggaccaggcacactctctgtcttatcagacacatggaaaagggcacagaggaaatgatctgttttagaatcagagtgtgccttaatccatctaatatgctggtgtcattrtttgacttcctggactgtaaacactgcccttctaggctcctgggacctttctaacctttcctcgtctgataactttgtcaatactcaacattttcttgctcaatccaggggcacctgtctaattctcctagtcccagctggctctccttgaacttgatctgtcatctgatccacagtgtctaggttttggattatcctggcccgtctttcccttgagatcccacatcaagataagaaacactgccttgagcctataggggttgaggggaatttgtagccctctggatatccatcttaaaatatgccaaataagtatattttggggtaaaatatttttatttccttcaagcattatgcctgacaactaagatttgattgtagtaacttagtgctctgttggatagagcactgtcattgtcttaatgagcattatataactgatttaaattctattgcacagtttattaaatcgtatctgttgggtaggttcctgcctttgaggcatgctgctaacaacatgatggaacatcttatttttctttcaactagttattttcatcataaatttatgcatagtattttaaaaataaactgataattttcagataattatattagggaagtgacagctgcattacattctatcctttgcttgaaaagcacagtaagaactaagacatttagatgttttacwtaggaaataatatttttggcattattaaaactcacttctatgtattaatttaaaaatttttatttttagggaaacaaaattgctattcaatttggcagaaggtttgttttgggatttctggctaacagaatctttgctttaactttggcaaggctgtttgagaattagcttcatattagggacccttcagttcctgggtcattgttgaaactcagttttagaactttattatctttatgctattctgaaatagggtcagtgatcttgatgtctccataagggaacttattttgtcaggtaatgttttgtagaatttatacataattttataattttactacatgggaataagtgttaatactaaaaaaaaagtgaatgattatgaaggtgttgtaggcacattaacttgtgttgctatttgtgcaaatatccttgactttataggtgcagaataatacccctacccccaccacaagaccctattttattactggatcaatagtgacaggtagggtttttaaaccagaaagtggtttttcttatgtttttgctccccgtagagaaaatattttttctgagggactttttagttgatatctctccctatacatgcagtaaaagcaaatatatttttcaaaaatgttaagggaaagtgtaggggctgtaggctcttctcagcgtgaaccctctaagggttcactgaaaaattagtgcaattttaattatgtatcagatgcggagctcaccacaaaggacgaagctgcagataatgtctgacccttcccagcatagtttaccctgcctattagtttagagcctagaatcaaatgcctccaaaacagacaagttaaacaattctaaaaaatattacagaagtggtttataaccttcaaacaagtagcaaagacagtatctgacctgcctgaccagttttgaccaaatgtctaatttggaagacatttttactttatcaataattttaaaattagctttatttattaaagattattaaagacatgtgaactaaaaggcatttgagttaaagggttttttttttctttttttcttttttgttttttttytttgagacgagtctcgttctgtcacccaggctaaagtgcagtggtacaatctcggctcactgcaaccactgtttcctgggttcaagctattctcttgcctcagcctcctgagtagctgggattacagacgtgtaccaccatgcctgactaatttttgtatttttagtacagacggggtttcaccatgttggccaggctggtctggaactcccgacctcaagcgatctgcctgcgtcggcctcccaaagtgctgggattacaggtgtgagccaccatgcccagtcagctttcttttttaaaaaatttttaataaaatgcttgatttaagcacttactttttctttaaaccaataaattagagcccttttatttattttagtagtaagacatcacatattaccagtgtaattaagtagacatatagacacatagaagcagatcttataaatttgtgatatttttaatttgccagttttcaaggctttttcttcctactttagactgtcaatttcttgattatctgtttctttgctctcagttattgttagctaggcaaccttaaatttgcatttctaaaggaacagctaagataaaacaacatatatcatttgaattttgatattttgaaagcatagcgtgaagacattaggcctgaatattgtaccatcacttgttcaaaccaagggaaaaaaatcatgtaagtaaattttagttaagaaggtgaggaaaagcacctcaaataaaggtatagcttataaatttaaaataatggttaagagtttaatgtatgcaagcagacacccttacaaatggagagttccttaaagatgtcaggctttttttttttttttttttttttttagaaaaaggcattttaagatagccagctaaatgccagaaagttgtaaaatggctttttaacttagcttatttcttaattagattactggttttagggtggagccctttaaggaactcagcctaagaaagcagtcagtcttcagggcctaaaggatgcttttcttatccaaacactcaaagaggagcaccctgtagtaataactgttcactgtaagcaactgccatcagccattytaaaagtgtatttctcacctagccatgacacataccaaggttaatttttttcataaagtaatttctggtaccccccaaagccaagaagatcaggaaatgcaatacaaaagggaacagaattttagatctgagataactccgtccatttacagctttggggattccctaaggaaaaatagcagttactaccaaaaaggaacatgtggcacctttttctgttaatttctctttttttttttttaaggcatcaagttgttagaatttactatgtatgtgtctgtctgtctgtctatctctatctatgtatctatgtatctatctatctatctatctatctatctatagagactagcctaaatataggttttaattaagtcaacttttgactatagagctcttaaaaaatcctctcaaacctcttattaccagaatttgccagggacaaagagttgatattttaaatcacacaactgtcaaaccagaaaggacttgttccctggccaggaattgaacctaggccaccacagtgaaagggcagaaccgtaactcctggacacagaatggagtgtctccgttgttcttcccagaaggaatgtaaagcaggcacttttgaccttgaataggattttaactttgttttaggtcagatctgctcsaaagaatagctataacattactttgtgtccctttaatttaacctttccaacaattgtttagaataaaagatgggggtctcgctttgttgcccaggctaatctggaactcctgggctcaagcgatcctcccgtctaggcctcataaagtgctagggttacaggcatgagccaccccacctggcccaatttgatacctttaatctgagaaagtttttagggtaactgtaaatcttgtcggcaaatagaaggtggaaaattattaaacattgaaaggatacttcctattaatattctctatttttttatcctcaatatttatttctactccagtattttttgtttgttttagtaatctatttagagtaacaataaagcaggtgagtgaaggagcacaaggaacttcatccccaattaatctgccttttatcagttgatttttcagtgaaacttcagagggcaaagtggaagggtccccttggctccttcatgataacctaatctgatttgtgccatctgcggcttctgaaaaaaaaaatctttagtgggacagagaaataattaacatcttccatgaggtttctttttcctgtgaagaccaagtatgattctgttttgggaacattctgtaattcttcatagatttttaaattagaaggggagtgtcttagtttctcttatttatcctcctcctttcagaggagacagcaagacccagaaaagtgaagaacctgcctgaacatggtcagtggcagactcagaagtggaactcaagccttttgcttgtccccyccacgtttttgatgcagagtttttatagctcctcaagggaggaaggaacagaagggaccctgcagtccaaggtcagtggtttagaaagttggtagttgagaaggatccatgtcacactccctgtttcctgagctacccccaggaaayacagagaagagtttactcagtgatcagagagtcaatggaggttttctgagtcaggtaaccaggattctgagtttgtgttttttctaaatctgggttgttgatggagaagtagactggattttattaatacttgcaagacacagggtacatttttttcagtggttttctttcccttgtttgatttttataaaggtacatcatagtttgaccttctaaaggtacaagctgaggagtacattattcatcaggggaaatttttctagggcatctgttttcgaaacataggcctaggattgtgtgggtcctgataagcaaaaatttaaaaaaaaaaamaaaactttgcccttgtcggcattttggacccactgtttttgacattttttcaaaatgcttcaacatcacattcaagtctcagtgtaaaaggggctatcattttcctttgagttttctcactgggcttttagagtttgataggaaacatggtgatagttgcaactaaagagaatgctaagatgagaaggaaaagagacacattggggggctgagatgcgcttagagctccatggtctcgtgggaatggatttaaaccaatggttcccaccgagttcttagtgctgtcaagttctgcaggtcagctggtcatcacaggctggatcatgtattttatgtgcactcagcattatattcagaacttgaaatagcagtgtgaaaaagagatagttgctttctataatcagcttctgggtatgcatttctaaaaatagctttgagggacaaggtcctggactctgtggtttctagtttctggaggtgggggtgaggaggaaggtgctggggtcctcaggacttatttctaaacccttgctttgctgtacaaaaaggtcaattttagtattcactgggatagaaaagtgggtattgggagtcatttaaaaagtctaatgaaagttgaaggcgccaggggaggttctcttgcaggagtgggaggcaacaatttacaattccttctccagtcctttttgccagttctccagcagttctctgcaggggagcctgggtttctttcaagattgtttcaatgttaaattgacactaaatcaagagcacagtaagtcccaacctagtctttttaagtgaagaaaattttgaaggcagccagggctcctgtggggagtggatgcagaatcaaggaggcagcaaataaaaccactgaagagggtgggaaattggaagcagaaattaaaaggcttttacatttctataaaaatatgttgtctgtcttcatatgtctttttctcactgcatcttctagtattatttgttttacgtggtgaagagcttccctagtccaaaagaacaaacattacctttaaaacattttctccatgctatgttcctttatctacctgcacagcaccttgttggctcaagctctcagccagtgtcttcgtgctttgcaacacacctgagtcatatattcatggatcaatgaaagacgccgcawggtatcttaaaaggatgctaagaatcagatcctgacttgaagtcatggtgctgattgatggtgactagatctctttttggtaaaatatagctaatcatgtcactcagttgcttaataaaactcaaaagcaatrtacaggacagtgcatcatggaaaagattattaaatataagtgtcacttaattttgttatgcagacagtagttgcgatctatctacgttgcaagataaggaaagtctgtttgactttttaaattgcatgaaaccagaacttagtacttagtgagaacttagttttataggaaaaggggaaaataaatctcattttaaaaaagaattagctgcgcataaacatgcatatttatgtacggcagaatttgcttaatcacaaatgtttatctctaaaaactgtgagatattttaatgctttagaaaaggaagtatattatgggtcattttataccatccatttaggttacctctttaagaagtttcatataacaagtttgcagaattaatgttgctaggtagagaaataccactagctcttcaaatattttgtggcttgttgtttcaaaatgacccctaaacaaagagttttggaaactgttaaaagaatcataacttcttggtttaaacctaacaaaaaaggttatcatgggcaattcagcactgattgttgaaatcactagttgaaagtaacagattgcaatttcaaaaaatgtcatttatttcataaatattcattgtttgccaatgtgctgagaccttcgtatggtcctgggtgctagtccatacccaacaaacatgtaaattaattggtgagaaagatttgtttctttgtagtggagatacaaggtgcaacagggatgtaaaggtgaggtaaagagtgatgttttttgccttcatcattcgacatcattctggatggaaagaccattagcctcctgagaatataacacccaatgggttctccttgcccgctgcctagacagagttgatttattaagagagaagaattgcaatagagaaagagtttagctggctgtatgggagaccagagttttattattacttaaatcagtctctctgaaaactcagggataggggtttttaaggataatttggtggatagggggttagaaaatggggagcgctattggtcggatcagagatgaaatcatgaggagtcgaaagctgtcttcttgtgccgagtcagttcctgggtgagaccagatgagccagcttattgacctgggtcatgccagctgatccattgagtgcaragtctccagaatatttcaagcactgatattaggtttcacaacagtgatggtatccccacgagcaatttagagaggttcagaatcttgcagcctccagctgcatgagtcctaaaccataatttctaatcttatggcgaatttgttagtcctacaaagtcagtctagtcccaggcaggaaggggatttgttttgtgcaagggctgttatcatctttctttcaaatttcctcccaaagttagttcagcctatgcccaggaatgaacaaggacaacttggaggttagaagcaagatggagtcagttaggtcagatctcttttacactcataattttctcagttataatttttgcaaaggtggtttcaagaaggcttcagggcatgtaggagacaggaaaggatatgggaggatttttggttgggtcttgaaagataaatgttttccagagaaaagtattatgggaaggaatttcagaacaagcaaataacatgtgcagaatgatgaaggcaaaaaaaatcactcatggtgtatttgggggaatggtacacagtcctgctgtgttttctgttgaaagtttgctctcctttcagcactcacagagaaaacaaattctctttgtgtgtgaaaatagaaagacaaggaaatagtcttcagttacctactaaacaggatgacttcatatttattatgtagttgattctggtgatgaagtgaatctggaaagtgttataaagagaaaactaaaataatcataatactgtatggaagggtcaggccccttcaggggaaggctgagtacagctttggtatctatctagagcctgtgagtcatgagtgaatgagtagggaggatagtgttttcaggtgagatttgtgtttctttcaaggcaaaaacacaaagaatgaagtttagtcaagtgagtgatagtggaacaagggtttcataggacagggtagaaaggaataagtgaagagagaaacacacgagcattgttgggggacaaggcggagattggatagtgtcatcctggcagcttaggtgatgaaaagtttggatcccgggtaggcgtatggtgcctgagagtcccccaacatccaccctgcttagagtgtctcagcaaatgtcaactgtgtcattcatagtaatcagggctatgtcttctattcctggtaattccatgcctcccacttacttgctctttctgactgttatctccctgcccagctttgccctgcagaacccgcacaactcacattacctgggctagcccaaggcttccgtttttccttcaaggatttttttttttttttttttttggaggaaggataattgggaaagaaaaaaaaaattagtggcctcactattcctgcatccttttttgctttgaatcccagaaagtttaaagccaaatttgtttcccagctcaacaattctacaagagcttgtgctttgcatttctttgtgcaagtcctaaccagacccttatttagttacctatggttatttttgccttttcttgattttctcattcctcagttttgggctttggtattggagctatttttaaaagcgctctgaagcacttttggaatgtgatgaaatttaataagtaaaaataatcaaaaacctttctaagtttatgagtcctcaggtataatcctcccagttctctgctttggagcacattcttgattcctcgtcagtcggtcaattcatatgctcttttgtttggtgctttttcttagtaactcttagcatccacatagcttccaataaaaaagtcccccatcttgttagaaacaaagaaactctttgtttcttcccagttttcgcaagaatccccaagaattttttttctcctgaaattatcactgtttcccatataccaaaaagaataccttgccttttttcgccccaaaatctattttactcctaagcataagtcttgttctctatcccctatctccagtgaaatgaacattttctgtttccagtttttcatgatttggctggcctgctttctaatctctagagtggaggtaaaggaggcacagaatcatctctgtaggggtcattttctcttaacaaaggttggttttttcaaattataagtagcacatgaaatccaggaataagcaaatattataactgataaaactgtgtttgaagtatgctatctgatctatgaaatgcattttgtactgtagaagctctacagtatttgaggatgaaacttagtagtgatgttcaagttcagaatgattaatakaaaatgtcaaagatgtaacaatattttcgggatccttgatttttcttttgtgttaaaatggtgtgaggtggttattgccctgtattttgttacatgactcagtggtgcattagtcctttgacctcatctgtgctccagccttcattaggagtcctgaccactgattgtcagggcagcacacacacagccaactagactgttggtctggccctgaacttgggtttttttcttttggctttgacccaacatgccaccatatattgcttattcaaattggcagcaaaggttattagaatcagcgtttctccctaataagggttcttaatttacagttgagtttttggctttgtcattcyctgcttaagcttgtcttaactttcactttttgttatttgaggccttgactaacagcctgtattgctctagcatcttgaattctaacattctagatagtttcacaaattcttatgggtcatatagggagtagaaaacacagtcctagactctttgaagcctttgcagtcccagttccaacctggttgtagagtcatgaaattcyggtcaacagcctatagagattttggtgtattcagaattcaaagcgaggcttctgggctttgttaacctatgatttgtagtttgctgtaaacgtcaaaactctagttttctaaatcaaatatttatttatagtttatgtactcaatttaaccaatcttttgatatttatatagccatgtataatttttatagacttacctatttaagtcagttgtcttgacacatattttaaaaatgttatgaaaaaatgtacacatagaaacctatttatttaataataattttttttgagatagggtctaactctgtctcccaggggggagtgcagttgtgtgatcacagctcactgcagccttgacctccctgactcaggtgattttcccacctaagcctcacaaagtgttgagattacaggtgtaagccaacgtgactggcggaaacctatttaaatttataccaagtataactgctttggaaatttaaaggtggctttgtttaaaagtgaaactcttgaccacttgtatttttacaaatgactgaagatagcagaatttcagcagaagtaaagtagaccatatcaaaaaactatactgtgaaattcgccccatggaagtcactaaaatatttattgtttatacaatacttttttcaccactgaatagtctttgaaatattactcactaaaaatgtctccccaatgaaggattattctaaagtgcaattggcttttttttctcctctcttcagtcaacgaggatctataaaatggtaaatattcaaatgttcttcttgtaaaatactatatatttgcctgtctcaggcaagtatagaactctgttggcagaagtcagcttctgcttattaagtaatattgctatggcttgtaaaattgggaagaagcatatctgaagctgcagcattcctttgatatatcactgactgttctgcctttcagagttattgaggacatacttaagtctgaatcagggaataatgtcagagaaaataaatatctacattttggcagcagtttaaaataaattaaattttagaaatgttcaaagtcacacatatgttctttgatttattcctttttattaatatataaccagcatgcagtgttcaaactgaccttttgaggtttggattatcactctggctaatttttttgtagtcttatgccaattttgtccaattataattttgccaagtaattaataatgtgaaagtgactttttttctcgtataagaataatgtgaccaagacatttaattaaatgtatctcagctcttcattttattctgaaatggctgcggctaaatatcaaggataccttttcaaaaataatgtccctgaatattcaggaaaatgcaattaaatattaatggcatgtacaaaatcttaagttattggcttttttatttttaaattattacatttctttcaccgtcctaaattctcagacctttctcagttttatggctgttgagctatttgggaattattgatagtggagtccttttgcctaagtaggagggagtgggtatgggggagaggagaaatttttatagaagacttcattcatatcattaaattagactgatctccagtctgagaatattctcgtattcacagttctgcagataaccaagcatgtgctcttggacaaattctatgagcctttttgacttttctatgttgagtctccacaaagggattattcccatgcaatcccttttgggagcgctattcggtaaggcccatattgtgttctaaggatgtctcattttgtatcgtttcataaaacccactaaatatcttggcaaacctaaatactgggcaaccttgttggctggcagcaactctcccacttgcaaacatgatgaccacaaaaattctaaacaaagttttattattgcatacaaattggaggagttttgcaatgaacaaataaacaaatccaagttatacctttccaaacttatttcttgtcttttcatctccatatatccactatgctttagcctccccaaataacagctagtcctggaacacaccatgttctcctttgcctttgtatgtttgcccgaaatatccaaaaatcctgtcactctctgataactatatactcagttttcctggctcaactcaaacaccaattattctgtgaagttkccaaaatttctctccctttcccaagcacagaatggttttggtcttccttttttwaaatcaccttataccttttgcagtacgtaatagattgtatgaagacttactggcttgtttacacatgtgattcatatatcctcagatctttctagcctagagattaaaatataggttcacaataactggacagaaaggcattgtctggcttcattcccaagagttggtagtcatggggttgtctcccatgaaacctattaagaaacttaagaaacctatgcaagatacataataggtttcnnnnnnnnnnnnnnnnnnnnnnnnnnnnnnnnnnnnnnnnnnnnnnnnnnnnnnnnnnnnnnnnnnnnntagatagcatttttctctcctacagcatgtttctctgatggcccttggaagccaccaaagccagatactctgtgctgcatctgtttccctccacatggaaacctgtctggtgtcctgtttaaatgaccatgctcattttgtacaccagtgtcctcccattgcctgatggggaaagtcctttcactctctttagtactttgttttgttccactgttacaaaaattcctgttttgtgctctcaataccttacataagcttttatagaacaactggtattcctcctctcctgccaaagaaatacaaacaaagcacgttgagaaaagatatccttttatttcagggtgacaacatttaattacagtgggttgcttgtatatctaatatgcatgtactgttttaaaggagacttaggagttcatgggcactatgactaaagaagcaaaaaatgaataagacaagcttcagctgagctaaactttgcttwtctaggaaatcatctatctcaaatactaagagacacatctttttgagactgtccattcagcacatatatatgtgtatatgcatatacataatatataattgttacaatgcatttactgtacaatatactctcctttactgttccaaaagctaaagtaccgtttttatacctactaatggatatcttatagatgccaaaggtactttatattaagtattttttataacatcaaatttccaaaacagaatactcttctttttgaggataaaatcccaaatatcaattcattgcctttctctcagagtcccatgatcagagtccctggatggaggacatttttaacttcacatattaatactctgagagaatattttctgctctcatgcaatagagaaaacctttcatgcaaagatacagttgttatagtctttgcatgaaagtgacactgttttaggtataaaatgttattggtgaattagcaatgctattttcatgaaaaacacaatataataattattttatcagygatgtaatttaattacttttaaggatattattgtatttgcaatatattatagaaatatcccttctttttcagagtttttttgattgacacgaatgacagtcttcaaaaaaagatacaacactttagatttttaaagaaaaggcatttcttttataatccgtgttcaagcttagattgagtaggtattgttttagaactaaaagggaggagagagaaagagagagagagggagagagagggagagattaagattcttgccaagtaattacattaaatattctctctggaggggaaaagtgtcaaataaacctagagaaattgtggaaattggtagaataaattaacttcttgtaaaatcatttttccacatcattataacatttgttttcaaatgtcagaagcagatgaaataattttcctacagatattgcttcaaggataaggctaraactcacagagcacttagaagaacaaggatacaaacatcccaaaggtgtacattaagattaaatttgcacgttgaagaggaaaagaattgcactttatgactgaacttttgagttgtttctgcatgaattttaggtaagtatacataatgaaatatggtaaagcatagacagcaatatctgccarccatatttattaagattgaatgcacatggagcattaggatgccatacaatacaatttgtcatgttgaattttaagaaatttcaaggcagattattagaaaattargacaagtcacctgccttattcttcyactattaacattcctattattgctattttttctctttcatcgctagcaaccttcatttctttggcgtttgcargcatccactaccttgaaaaccttttggttttcgttttctttctttctttcttcccttcctctgtcactctcccttcctcttctatcatgctctctctcactccatctcgagttatccagatgttttctttaatgccaaaattaatgccacttttaaattcgttatttgattttaagctttaaacacttgaccttttctgccttgtacttcacctgaactatatttagaattttgtgaagtctagtttggttcagtgggctcttctctatttaagaccttaggtcctggcatctccaggttaagtggaatcacttgctctgaacaggatgcttctcttcactatgtgatcataggcctataatggctgtgctaggaaacgacattgacttcagatccatggctcattagaacactgtacagagtttcaaaaaaggatggtaacataagtgtgtgccttagactgtttaaagggccatgcaattacagtcaataagaatatatactgagtaaaactacaggaaagtaggattttatgcatgcggctgacataatgtaattacatgcattatatatagacttgaatgaaaactcaaccgccccagcagcctttcgtataaatgggtcttgacggaactattcttcttggctcctgagaaggggtttcctcaagagaatttattgaaggggaaataatatttggattttctgactttcatgaatgtctgtaaaaagtgtctggcttacttttgtgtcatggatgtttgagtgtcgtgggtgtttgtaaagcccatctactatgatagccatgggaagtgaactatggccacctaatcagctccagtttgtcctggtgtttcaagaacctagtcctaagcccaaagccaaaatgagatgcttgggagacagaaatagggagacagttggtggaaaggatatttttagtattggcagcctaactgtagaactgtatttggtgaatcaatacatctctagtaaaaataatttgtatgaaaggtgctttttaaaaaagtgacttccacttctaaatagcatgcaggtaactcattaactaaagaggcttaaattatgtacttgctgaaaactgtttcatgtcaagtagaaccctttgattctagaattttgcatctttttatttttcatggttttttatagataaatacccagctataaacaaagaatcaggttgtttagcaatgtatattttagagggagaagtaawtgcctttttgatttggaagcaaagttaaaacaaattataatgttagctgaagtgcttcccttgagggatatgataggtaagaatgggcaataggatttggcacggtgtaggtaattttggaatgcagtgtagctaagaaatattttgatttgctttcctattgatttcttggctggggtacttggcacaaaatgaggaactcaaattaatataaatatgtggagttttaatattttatgttaaaatgccattttaaaattagtctaaaaataatgaagtctagtttgaattcactggctaagatttgtaactagtttcatgcatggtgatgttatagctctaaatcagaactcaaagtggatgaagggtatggctagctaaaaccagccagcttgtccattgctgaaaataaaatggaatagatgaaagagaagccaggtcttcactaagagttgccatttatttctaaatttaattgcttaagtctctaatgtctagataataccgtagggtatctattttttttttaacgttttgacacagggagtactattgaagggtatacagctctattaatgcccacttgcctgactgagagataattctctcttggtaaatgatggtgatcattagtatttcctgagtaagcattgaatctcatataaatagcctgaaaagttatccgatagagagtactctctgctagataagggcttgtcaacttttcatcttatagatcttaatcctatgtatgggtttgaggtgttgatggtgtcacagaacagactgcctatggttaaatgcatgccaaccacatgtgacccctgtaatggtgtttattttaattggcacttctcaaccttactacacaacaactatattggaatgcatgctttactaatgtaaaataaaattcaggagtaatacaatctacctatacataattttaaaaaactctagtgccataaattaaacattaaaaaggaaataagctattataaaataatttgcctagcaataggtaaatacccatgcaagactttaccagaggacaaacaaataccctcactatttccaagaaacttttaagggactgcactaatctcattaggattcctcctttaaagaaagtgtactgtgtcttgtcaagcctttgaggtctagatagatgttttcctcacttgctaaggcagcaggaccctttcctccaaagaaatcacatgcaggtgtataatatataaacctgtataaagcatataaaagccctcctgtgcttcctgtaagttgtaatggcttctttctgagaaatctctggtccaggggtctggatagctaattgtgtcagtggtctcttgagaggtaaaaataaactgaagtagatgaaagggaatctgtttttattagtaaggaaatgacttcttccttaaactttattttccttttttggttagaacagtagaataatttccccagtcttattactgaaaggaattgttaaggattagagaagataaattaatgtatcttggaaagatgattcaggaatattttatacaattctttattgcacagctaaaggaaaaaaaaacaccacaacaaatgtttgagtagatgagacattcaactttctaaatgctccaaggatggtctaacttcagatcagctactcatgtttaagatgaagccatttgaggacaatctttctagcatttcttccagttcaaaacacagattaaaaatttaacttgtgaatggttggttgtatgatataaacagtttttctttcactaaccctttttatatsctcttacgttgagtgtcaagtctgtcttctaattagtctttcctggagcagtgtatcatagaatcatagtctttcagagccaaaataaacctaagggatacctagttccaaatctaaatttgtaaaataagtaaatgaggccaagaggtgcgaagtgattttcttaagatcacacacactcagttgtctaatgggagacacgtgctggctacagactataacaccatctaataaccccctctcaggaggggtttgaatatttgttactacttgcatattatcgggtatcatgaagtaaatatttattctagcaaaataggatttgttttgttaactggcaggaaccaggcttgttacaggactagagggctgatacggtagacccctctgaactgactcaatttttattatatctctaatggccaattattaggcctgtgggtttaatgtggcagcctgtcatcatagtattctaataaataatgtcataatagcctgccttcatatttgtatttctactgaaaagataaatgtatattgttaccattaattggtctcaacatgacaagactctttcctcatatgttctacacctttttttaaagttacttttcttcttttaaaagcttttttttattgtactttaagttctgggatacatgtgcagaacgtgcaggtttgttacataggtatacgtgtgccatagtggtttgctgcaccatcaacccgtcatctacactaggtatttctcctaatgctatccctctcctagcccctaaaccctggcagaccccagtatatgatgttcccctccctgtggccatgtgttctcattgttcaacccccatttatgagtgaggacatgtagtgtttggttttctgttcctgtgttagtttgctaagaatgatggtttccagcttcatccatgtccctgcaaaagacatgaactcatccttttttatggctgcatagtattccatggtgtatatgtgccacattttctttatctagactatcattgatgggcatttgggttggttccaagtctttgctattgtgaacagtgccacaataaacatgcatgtgcctgtgtctttatactagaatgatttataatcctttgggtattacacggtaatgggattgctgggtcaaatggtatttctagttctagatccttgaggaatcaccatgctgtcttccacaatagttgaactaatttacactccaaccaacagtataaaagcgttcctatttctccccaccctctccagcatctgttgtttcctgactttttaatgattgccattctaactacaatgggatagtatctcattgtggttttgatttgcatttctctgatgaccagtgatgatgagcttttttacatatgtttgttagctgcataaatgtcttcttttgagaagtgtctgttcatatcctttgcccactttttgatggggttgtttgtttttttcttgtacatctgtttaagttctttgtagattctggatattagctgtttgtcagatggatagattgcaaaaattttctcctattctgtagattgcatgttcactctgatgatagtttcttttgctgtgcagaagctctttagtttaattatattctatttgtcaattttggcgtttgttgccattgcttttggtgttttggtaatgaagtctgcgcccatgcctatgtcctaaatggtatggcctaagttttcttctagggttttttatggttttaggtcttacgtttaagtctttaatccatcttgagttaatttttgcataaggtgtaagaaagggttccagtttcagttttctgcatatggctagccagttttcccaacaccatttcttaagtaggaaatactttgcccactgcttgtttttgtcagttttctcaaagatcagatggttgtagatgtgtggtgttatttctgagggctctgttatgttccattggtctatatatctgtttaggtaccagtaccatgctgtttttgttactatagccttgtagtatagtttgaagtcaggtagtgtgatgcctccagctttgttctttttacttaggattgtcttggctatatgggctcattttcagttccatatgaaatttaaagtagttttttccaattctgtgaagaaagtgaatggtagcttgttggggatagtattcgctctataaattactttgggcagtatggccattttaatgttgattcttcctgtctatgagcatggaatgtttttccattcgtttgtgtcctctcctttttccttgagcagtggtttgtagttctccttgaagaggtccttcacatcccttgtaagttgtattcctaggtattttattctctttgtagcaattgtgaatgggagttcactcatgattggctctctgtctgtttttggtgtataggaatgcttgtgatttttgcacattcattttgtatcctgagacttttgctgaagttgcttatcagcttaaggagattctgagctgagacaatggggttttataaatatacaatcatgtcatctgcaaacagagacaatttgacttcctctctttctatttgaataccatttatttctttctcttgcctgattgccctggccagaacttccaacactatgttgaataggagtggtgagagagggcatccttgtcttgtaccagttttcaaagggaatacttccagtttttgcccattcaatatgatattggctgtgggtttgtcgtaaacagttcttattattttgagatacattccataaataactagtttattgagagtttttagcatgaaggatgttgagttttktcaaagtccttttctgcatctattaagataatcatgtgatttttgtcattggttctgtttatgtgatggattacacttattgaattatgtatgttgaaccagacttgcgtcccagggatgaagctgacttgattgtggtggataagctttttgatgtgctgctggattcagtttgacagcattttattgaggattttcgcattgatgttcatcagggatattggcctgaaattttatttttttgtttctttctctgccagattttggtatcaggataatggcctcataaaatgaattatggaggattccctctttttctgttgtttggaatagtttcagaaggaatggtaccagctcctttttgtacctgtggtagaaatcagatgtaaatctgtctggtcctggactttttttgattggtaggatattaattactgcctcaatttcagaacttgttattggtctattcagggaatcgccttcttcctagtttatacttgggaaggtgtctgtgtccaggaatttatccatttcttctagattttctagtttatttgcatagaggtgtttatagtattctctgacggtggtttgtatttctgtggtatcagtggtgatattacctttatcattttcattgcatctatttgattcttctcttctttattagtctggctagtggtctatctattttgttgatcttttcaaaaaaccacctcctggattcactgattttttgaagggtttttcatgtctctatctccttcagttctgctctgatgttagttattcttgtcttccactagcttttgaatttgtttgctcttkcttctctagttcttttaattgtgattttagggtgtcgattttagatctttcctgctttctcttgtgggcatttagtgctataaattttcctctaaacactgctttagctgtgtcccagagattctggtacgttacctctttgttctcattgatttatttcttctttaattttgttatttacccagtagtcatttaggagcaggttgttcagtttctatgtagttgtgcagttttgagtgagtttcttaatcctgaggtctaatttcattgcactccattctgagagactgttataatttccattcttttgcacttgctgaggagtgttttactttcaattatgtggtcaattttagaataagtgtgatatggtgctgagaagaatgtatattctgttgatttgaggtggagagttctgtagatgtctattaggtctgcttgttctagtgctgagttcaagtcctgaatattcttgctaataaatggcatatatttttaatgttactaccaaactcactctaaacacttatggttttttaacaggagttaacatcttaaatagctggggaaatgcaaaggctgcataagcctagactgtacctcagacttactcaaagaggaactctagagatgggatgcatgcaggtacatctttggacagaagacccaggaaacagattctgagcagatttacattcaggaagtttattggaaagtactcttggaaatgatcctgcatgaaaatgggaaaagcaggtgggcagagggagaagttgaattgaaaagtaattgcaatagaggcctcagacgacccatagggagagccttggaaagaccctggaatgaccaaccctttgaacttgtcctgggatcagagaagggaaagggcttaattactggatgcagactttttctgggtagaagtatwacttgaaagaggcagctcccatctgccatctaggttgtgccaagagaaggatgcatctatgagctattagcagccaacactgctggcagctgtggcaatgagttcctggggcctgaaacggtaacctaggtgctgtatcatgggtccacccagattcacttgctttacatagtaattgaccgcatctaggaatagctctttctggattatgggtagtctctcttcctggggaaacataaaagaggaaaattagtctgacgaacttcagttctgtgcctgcagcaaaatttgaggctgcaactgacactcaggttgtccttcatcttctgttcattctggtttacactcactctagactggaacctctactgttcaaggccttacctggtggactgacccaaatccctaacaggtctgagcccttgattcctatgcccttctcaggccaaggtacactactgcacttgtgtatttaccgttaacattgggtgggagagtacaaggaaatacccaagggatcatcaggttgcaaacgtattattctctgtcccaacctccttgtggcaattaggactgaagacattacaagaagtgtgacttttttttttttttgtctcctggtttattggcatgaagagccaagagtgactagcaacactcataggctaatatataataggactttctctgaactttaaaaattgcactatctctactttaaaaatgaaaatagattcaatgcartttcaatcaatatcaaagttattttaatagaaattggtaaattgattttaaaatctgaaaagtcaaaggaactaaaatagccacaataatattttctaaatgaacaacgttagaaaattcacactgtgtgattttaagactttgtattaactagagtaattcagtgagtgtggtctaggtaaaggacaggtatataagtggctagaaaagattggtaacttcagaaataggctcacagaagtaggatggccatgtgatgttggcaagggtgcaaagacaattcattgcagaaaggtaatctttttaacaaaagatactggaaaaactggatatccatttgcaaaataatgaacttcaacctatacctcacgtaatatacaaacattaactcagtatacatcataaacctaaatagaaaatctaaaccataaaacttccagaggaaactatggagaaagtcttcaagacttttgattaygtaaagatttccttagctatgatactaaaagcaagattcataaaaattgtaaattagactatcaaatttggaatcctctgcttcttgaaagacattattaagagaattaaaaggtgggaagaaaatatttgcaaaacacatgtgtgatatggaaattgtgtctagaatatataaataactttcaaaattaaataagaaaacaaaataactgaatataaagaaacatatttaaagagacactttgccaaaggagatataaagatggaaaataagtacatgaaaagatgctcaacatcattagtcattaaagaaaagcaaattgaaaccacaagggaatactactaaatcaactaatgtctgaaacaaacaaacaaacaaacaccaccaaaaaaccactgtacctaccaaggtctggcaaggatttagaatagctggaagtctcaaacattgctaatgtgaatgcagatggaagagccactttcaaacacagttgggaaatttcttgtaaaagtaaacttacacttactgtatgacccaccaatctctctcctattcactgaaaacaaatgaaaacttatgttcacacataagtacagaaacacttgtaaatgaatatttacagcatctttattcacaatagcccaaaatgtaaactatgaaaatgtgtttcaactgctcaattgataacaaagtagtactttcaaacaatggaatactacttagcataaaaaggaattaactactgatatatttaacaacatacagtatgggaaatgaaagacatcagactcagagggttacatgtttcatgattccattctggaaaagacaaaaccataggacagaaaatattatcagtggttgctaggcatcgagaatagagtaggagttgacctcagaggagcatgaggcaatattttggggtgatggaattgttctatatcttgatttagtggttactcaattaatatacttgataaagctagtcaaattatacagtaaaagggtaaattttacagtatgtaaattacacctcagtaaaatgaaattttaaccacttcgatgggaattttattatgccccctggtggaagtgttactatcttggaactaagacctccaaacctactaagtctaaacctatgagggcgatatgcacaaatttcccaagtgtcactggcaataatagtaagtgggacaacttctactttatcccttggtttctrgacctacaaattccactgaattgrtattgtagcaccatacaatgaaattgcatttgagatgagccttgaaggagccagttgcaacaagtctataaggtgggaaggattcccagaggaaaaagcattgtaagagcaaaatattggaggcaggaaaatacacagtgtgtttcagaatccatttcattggagcactaggtacacataggactatattgagatgaaggctgcaaaggaaagttgggtcatatgatgttgtgctgaaaaggttgtatgtaattctgtaatccattcagggctttgagagacaaattggctgatgatagctgcactttagggagattggtggatcgccaggccttagtatagatttatatggttcaagagaaaaggtggttataatgatcctctgattttccatatgacaagcctgcaaccgcccaaaactttggtgtttttacctacatctatattcttttccccatctagtgccctagaaataattatcttccacactgggcaaaatttaagagctagtttaatgttttaggtaaatttacattaagattagggtagtcttgctttttccctgtaactgactgtatgtctaattatctaggcttctagcttcccctctttctttaaaaaaattaatagataaaattgtatgaacttaccatgtagagcatcatgttttgaagtatatacatatttgtggaatgactgattctaactaattaacatgtgcattatctcacatagtaatcactttggtggtgagaacagtttacatctactctcttagcattttttaataatacaatatattattaaatattgttgccatgttgtgtaatgatctcttgaacatacttcttctatctaactgaaattttgtatcctttaacaacatcttcccaatcccacccccaaaccaccgcagcccttgatagtcaccattctactctcttcttccatgacatcaacttttttctattctacatatgactgaaatttatgtagtattagttttttttgtgcctgacttatttcacttaacataatttccttctggttcatctgtgtcctcacaaatgacaggacttccttcttttttatgactgactagtatatcattgtgtataataccacattttttcttcacctatttatccactgatggacatttgcttaggttgattcagtaccttgactattgtgtataatgctgcaataaacatggaaatgtagatacctctttgggatctttattttaattattttgcatatataaccaaaagtggggttgctggatcatatggtagttctacagcagtcctcccttatctgcaggacatgttccaaggcaccagtgaacgtctgataccacaaatagcaccaaaccctacacatactatgtttttttgatctgataacttagatggctactaggtgactcttaagtgattaatgggcaagtagcatatacaccgtttgtatgtgtatacaaagcatgcgatttcaaacttatgaattgtttatttatggaatgttttacttaaaattttgactatacttgaccaccagctactgaaaccacagaaagttcaactttggagaagtggggctcctgtatcttcaaattttttgaggaatctccatacttttcccagtaaaggctgtactaatttacatccacaacaacaggatacagggttcccttttctccatcttctggccaacacttgttatctttcttatttttgataatagccatggctatggctactgcttttgctgcctgtgcttttggggtaatatccaaaacattactgcccagaccaatgttatggaacttttcccctatattttcttcaagtagttttataatttctggttttacatttaagtcattaatccactttgagttgatttttgtttatgatgagagagaaaggtctaatttcattcttcttcatgtggacatctagtttacccaataccacttattaaagaactgtgctttattgtataatcttagtgcctttgtccaaaattagttggctgtaaatgtgtgaatttatttctgggctctcctttctgcttcattggtctctgtgtctgtttttatgccagtaccatgctgttttggttactacaggcttgcagcatattttaaagtcaggtagtatgatgccttcagctttgttctttttgtttcagattactttggctactgggggtctttgtggtgtcatatgaattttgggattatgttttatttctgtgtagaattatattaaaattttgatagagattcaattgaatctgtagatcttttgggtactatgagcaatttaacaatgttaattcttccaatcaaagaacacaggatatctttccatttatttgtgtcattttaaagttctttcatcaatattttacggtttcagtgtacagatctctcacctcttagttaaatttattaatgatcattttatttatttttatttttatttattttcttttgaggcggagtcttgctctgtcatccaggctggagcacagtggcgcaatctccgctcattgcaagctccacctcctgagttcacattcattctcctgcctcagcctcctgagtagctgggactacatgtgcccaccaccacgcccggctaattttttttttttgtattttctagtggagatggggtttcaccatgttagccaggatagtctcaatctcctgacctcgtgatctgcccacctcggcctcccaaagtgctgggattacaggcatgagccaccacgcccagccatgatcattttattttttagtagttattataaatacaattgatttcttttttggatagttcactgttagtgtacaaaagtgctactaatttttgtatgtagattttgtattctgctacttgtctgaattgtttttctagttctaatagttttggggtggagtcttcaggattttcaatatgtaagaacaagtcacctgcaaacagggacaatttaagttattcctttttgatttgatactttttatttccttttcttgactaattgctttggctaggcactctagtactaggttaaatagaagtaaatatgagcatccttctcttgttatggatcttaaagaaaaagctttcaacttttttccagtgagtatgatgttacctggagttttgtcatatgtgacctttattttgttgaggttcattccttttatacctaatttgtttgtttgcataaaaggaagttggatttttaaaatattttttctgcatctattgaagtgatcatatgttttgtacttcattctgttaatgtgacatatcacatttattgacttatgtatgttgtaccatacttgcatccctggggtgaattccacttgatcgtgctgttgaattcagtttgatattattttactgagggtttttgcatttatgttaatcaggaatattggcctgtagttttccttttttgtactttctttggttttgatatcagggtaatgctggcctcatataatgaatctgaaaatattcattcttcaatttttgaagaatttgtattaggtcttctttaaatatttgacagaattcagtagtgaaactgtcaggtcccagacttttgtttgatggcagaatttttattactaattcaatctcttcttacttggcttatagctttttatttgaccaagatttatccttgaatcatcatcatagcacttagtttcagatttgcacctctatacccaatcctttctattcaatcatctactgtgaggcctccttcttgaacagagagactggagtctgtcttcattcttcattatctcaatagccttatagtcttcgctatcctccaatgtactactcctagatccaattagcaagggctggccatatgtcaggatccttttatgcaatctcatttaattctcaaaataaccccctagagatatgctcgcagatggagacacaggcttagagaagttaaatgactcatttttctatgcaatttgtaagcagctaagataggactagatatcagtagtttgactccataacctggattcctaacatctctaatgtccaggttgcagccatattgatacaggccaatacagtgcattacagttattgagttggtagtctgcactttatggagccatattctgctagcatcaagaggtacatgatggtggaagcagcctccaatatgtagatatcaggtcatgaccaactgggtcaagattatagggaaacaaactgcagcacagagcagaaaacaagaaaaaactaaaatgtgaaggctggataaatacagcagggactgagaaggagggctacaattgagtagacacactgattctgagagataatgcttgtcatactatgtagggaataagttttactgatgccctcatctgatcatggttttgagcctattatgctgttagtatgatcagcattgccccacaatttaggctttcaaatgccagaccacagtgattgatccaggctaaggaaggtagatgttgacaaatacatatcatgttaagtgatttcttttatttataaagtccatgttttaaaatatgggtgtacttttgtttgtgatttacagctgagcttcagcagccattgaaatctgacagaacgcatgaaaaaagtctcaggttgtgttgaccttccattcatataaatagtttgtttattgaacaaatgaatattaagggttattagtctttcttaagaaatgttagcaaattaaaaggttgatagattgcatttgtcttcatccttttgctctcaaagccagtgctggtgatgtaattggacattaacaaacagtaggtgttcaacagcaagaaaagtacacacacacacacacatgtgcacacacacacacagagaaggccaataccacattaaaaattttaattttcaagagctaaatattgagatattctaatatttggtagggttcttttttgcttgatattgtattataagattttcattaatataataaaatattaagaaaaaatctgattttatttgccgtataatattgttaaataaatatttgttaactcacataactttgcctttgtgaaaatgacagctttatctctgattactttttgtttttatttacctctaaactcttttttatctttgtatttttaagctttactttttatatgcatttcttgtaaataggtttttaaaactttatgaaatgaatctaaaattatatatacatttttactcttgttgcaaaaataaactgtttcttgcagaaaaattaggaattatggatcaattacacaaaaataagcaataccttcctagttcttaatattttgatttatacttttccatttatacatatatatacacacacagatatatacacatacaagtatatgtagtagtcccccttttttgtgattttgcaatttgcagtttcagttaactgtgatgagtaccgtatagtaagatatttttagagagaaataggccagattgacataacttttattacagtatcttgttggaactattctattatttgttattgtttctaatctctactattccttgtttataaattaaaccttatcataagcatgtatacctagaagaaaacatagttcagtgctatccatggttttaggcatccactgggggtcttagaacatagccctcatggacaagaggggactactgtacacacacatacttatatattgatttatcaagcaaaagaagtattataaatatgacattagttatttttggtgcttttttattaataaaatctgaattttttatcatttcacataggttatgaaaatattttcaatggcatacagtatcccacttgtatcattttttatacttctttgactacattatttccattttttgcattagtaaacaaaactgcagtgaatgaccttgtaggtaaatctttgacacatcaatcattatttctttggaataagtttctttttctttttctttctttctttctttttttttttttttttgagacagagtctcgctctgtcacccaggctggagtgcagtggcatgatctcggctcactgcaagctctgcctcccaggttcacgccattctcctgcctcagcctcccgagtagctgggactacaggtgcctgccaccacgcccggttaattttgtttgtacttttagtagagacagggtttcactgtgttagcaaggatggtctccatctcctgacctcatgatctgcccgccttggcctcccaaagtgctgggattattggcgtgagccaccgtgcctggccggaataattttctagaagtgaatttgtgagacaaaaggcatatgaagtatggtcatgtgccacataatgacattttgatcaatgatggacagcatatcccatggtggtctgatgaggttataatatcatattttaactgtacgttttccatgtttagatatgtttagatatacaaatgcttaattgtgttacaattggctatagtacttagttcagttatatgctatatagatttgtagcctaggagcaattggctgtaccatagagcctaggtgaatagtaggctataccacctcagtttacataaatacactctatgatgttggcacaatgatgaaattgcctaacaatacatttctcagaacatattctgctgttaagcaaggcatgactacataaggattttggttgaaaaaagcaaaatttaatttcttactttagacatcttgttttctgttttctgtattttgtaaatttctgtgctcttggaattctgttttttatattttattaattgaaatatatctcatttctattgatgctttcctttcaattaaaaaaaattcttaaaacttaatttttataattataagtattataaactgattattttactgttatctttagtcttcagtatttgttattatttgttgttagtcttcgtgtttctgaatggaagtgacgtaaacctgattttggcattctaatgtgttagaaatgatctagtatctcacctttggcttttgaattgtcccatttatatattatgcagtgccaggtattggatggcaacgacctgttctaggcacagaagggacagcccagacttgggtgagaccttggtggagtattagacacaaggttgaaaagggacctggccttagcggggagaagagatggcaaagagaaccaggggccagtgagccaggtaaatagcttgggttgggcataggaacatcttggcagtgtgggacatggcttagcctgctaccatcaaagtcctggcatggctggcatgtatgttggtgagtagggaaaatctataagatgcctctcttactcttcctaattgggcccaaactgaagctgttaagtgggccaggtagatccctcaaatagataattagagtcttcaggccagagagttaagtgcatggcattcctcagatgaaatcgagttcatgaattgcctcaaagaatgcagataaccaagtcattcctctgatacatttcatttcttagtcatctttttggaatatctggaaatattttcccaaggtaattacttcatttaagcaaacattttttaaaaatacatcttgagtttctttctataattcatcatcttttaattttatcagagtgaaaatttccacttactgaaagatttttctaaattttcaatacatttgtctgaaaatcagaaaactatggtgacagttgctatagaaattcttagaaatgaatcaaaacacaattaaaatggtctttcagcttataaatatattaattttactttatgaaaaataaatggtctattaaaaatattacacataattacttagcagcttggatatatttcaaaaaatatacagttaagtgaccttttaaaaagacctgctccttatattgaagaaaacctgtccattcttattctctaaacagagatgcatttcttacattacaatgtcaacttagacagttcttaaagatgtcatccatttaattcttatctctcattttgtttctaaacttctatttctattaatatatctatattaaaatgtgtaatcacaaatttccttgaacttccaaatctaatcttaaagataaatgaaattaatttattatccttcaatatacagacctgttctcattattctaatttattaacaatgatactgatttgcttctcttagttcttgaatgtttttaaagagatgtaactttttttctgacgtgaccttttaacagataaacaaaatagatattaaacatttcaatgagaaaatggaaatggaataactcgcctgactacttctgatctagaaaaacacccattgtacttcatacctttctctcactttcacctccatctatgcttttaatgtctttcaatttctcagttggtaaattaagtttttcctttattctgataatttgtttcaacaagagacccccaacttgttccagtaacttttaatacttaggaaaaatgtgactattaatattaattaaatgttttggactaatgagatgactttcaatggttatagcattttaattatgagaccagcccatgtattttaagattataactatttctcaaacctttccatagccaggaatttttaaaaactccaatatgtcaaattttcttttactttacttttggatttggatttataggtttactttagctgctccaatgaataaacaccaaatttttaatttcttacttctttgagtccaacatgaatatttctgattagtgggmagtttttctccatggaatcattcagggaacccaggctctttccaccttttgattccaccatactctggtgcctctgagttctccatctcagatctatctgctgcttaaatgctttcagcatggaggtgacacaatctcttctcaagttcctttggtgggggctagcacatggacaaacctgaatccagggtagctaggaagtgtatctctaattgtgcagccacctccccgcgtcatcaacaccatgctctgaaatagagaggggaaaatttttggtggacaattagtcatcaatgccacataaaattaaaaatgtgagtacctacctcaaaggtaatataggtgatgctctctaataatgagacaataacaagggagcattaagattgtgcagagttttcaagaacatgaccacacatgtgcagtggtcaaactttgttcaacctctcccaccgtttttttgttttttgtttttttttttgaggcagtctcactctgttgcccaggctggagtgcaatggcgctgtcttggctcactacaagctccgcctgccaggttcacgccattctcctgcctcagcctcccgagtrgctgggactacaggtgcctgccaccacgcccggttaattttgtttgtacttttagtagagacagggtttcactgtgttagcaaggatggtctccatctcctgacctcatgatctgcctgccttggcctcccaacgtgctgggattacaggcgtgagccaccgtgcccggccaacctctcccactcttctgaccaattatgctttagggtcctgttcacctcagtccccatcagatcatgtggaagacttcaacttaaggtaacgtctcctgagctccatatgcatctactactagcttcagatggactgtctcctgttttgaaggaaagacttgcagtatctgtaacttaargtgaagaaaagtcttttctcattgtttcctagttagtagctgtagtgcactatatctgaatgaggttgaaagatttctgttttaaatagtcatccttaagatctaacaaagcatgaaagaaagatcccgttgtatttttaaaaagggtttatttaaactctgaaaaaattgctaaatttagaagtccacagtgtttaactattataaaagatacaatattgcaggtggagaaactctcaaacattacctactactgtgattgtaacctatttttcaaattctaccacatcttgtttatatccattttaagagcttagtatcaggaacctatttaatatatgactaaaattgtttatgctgtaattaagctcatttcttcttgtgctcttctcctgcagaatacaawcaatcggtggttatagttggcatgttgaaatttattttattactgcccatatgtttttatgttcttattgataaatgtaaacctccctggtattgtaggacttttcttagttcagctaaagactgggttcttgtccatcccaaggccacaaaaatttagcctcacagacagtttaaagggtgagcaaaatagggttttattgggtgaaaagggagaaaaacgggtgggggaaacacctgcctggcgtttgaatcccaggtccacacaggaagacgacgaggcaggctcctccctgcttcaaatcgtgtgaacttcccaaggctccaccccagtgcgcaggctgcttggagtttctccaggaatcccctcccactggctgtctcattcccccctctaaagaagtacatctaactgtggttagattaaggataaggatgaagactgatcttaaccgcttcctgctgacagggggcgctgttttggggaaatggcagaactccctcagaggcygatctaagggttcccggcagaaggggccatcttcagaggctctggttgcatgactgtttggagtttgatggcctgaaggtaagaacagacaaacccaattattagaaaacatgtatcaaagtgaaacaaggggaggggtaaggacagctcaaaaatcctgaggccctttaccagtttgcatggagagagggaggccaaaagcctgactagttaaaatctttacccttttggtggcatgttgggcttctgggtttccttcccctgggcccagtcctaaggcaaccagtttcagctttgggaaattaactctttcctgtttggaaaatgcatctgaggggagtgtcccatagtacagagacacaattaaatatcagtgaagagagaaccaaggaggagaaaggaataaaaagaagatgccttttaaaggagttccaggggttcaggatacattttaaggggtacagactgaagatgaatggctacccatctagaaagaggggagtagccatctctagttcccttctcttcctagcagatacccaggggtaagtgagggagagagagaacagcatcctctttccctcttccatccttgcatccccaagtcctggtgaccttggcaggtctcgccatgcaaagcagcttgtacccatgaagtgggggatggggagggggtggctagagaaaaggaattatctgttctcacctatgtctctttcccacctaatgtcagtagctttggagttccctagacctcatttatgctatggatattaacgtggtctttatccatgaaacaggaagcttggggttggcttaattggcagaaatcagccacactcacctgctcggtgccttttaacctctgttgttatctgcctctggatccttaacatccagttttccttcctagggctttgaaccaaagcttagaattgagtctgggacaaaactgtatctcacgggtgggggtggggttgcatggatgccttatcataagccgaatgcaaggtgaagctgtggaattgagtcctcctccaacaagggagaggaaaggatgtcttgtgagacacccagatgagtgtttgctatagttatgcttgctaagatttgggtgcatggtgcttggctttggttagctcccttggttttactttaccaaaaggaaacctccgagtgatgggcatcctatttattcccatcacctggcaggatttgaaggataattactcagaactagaatatttatcaggatttctacatcacccatccctcatgttgtttctgagctgcagctagagattgctggttggttcataggaacaagcagggttagtttcaaatgtaggcaaaaaattaaaaacaactaatgagtttagaatttagtgaccaatatataagttttgaaacataatttctctctctccagtcctcttttttttttcttttgagacagagtctcactctgtcgcccaggttggagtgcagtggcgtgatcttggctcactgcaagctccacctcccgggttcacgccattcttctgcctcagcatccggggtagctgggactacaggcatctgccaccacgcctggctaatttttttttttttgtatttttagtagaggcggggtttcaccgtgttagccatgatggtctcaatctcctgacctggtgatctgcccgcctcggcctcccaaagtgctgggattataggtgtgaacctccgtgccctgcccagtcttcatttttgttaaaaaaaaaattataggactgaatggtttgcaaaatagaatttagtcttaaacttggcctgattatttgcataaagtgcagcaagaatgattatttctacatacgccttttgggttggctttaatgggattttgttccacaaggagtctcagataagaacttttaaagccaagcccaaccatgggtttgtatcttcaaacacctgtgagttgggtgcttctgtcctcttaaggtcgataaacttggacctcctagaactgttagaacgtgacattctttactgaccacaggtcaggaaccctgtacagggactgcatagatgaggtatgagaccagtttccccactgggcttttattggctctgcaagtcaagatcgtctacttaaagggaagcatacccttctagttaaagccttggtaaaataaccaattcttccaattgcatcctgctgcaaaagaaaaatggattcttattgcactgatgcaaacaactgtaatgcygtaagttaagaatgctcacagatagtttcaaaattctagaggaaccaggcagagacaaacaaacatgctccatatcttgatcacaggattataccttgcttaattcttaaaggctgtaaatcattcaaaataagtttccttgactatgaaaaacagaacaaggatcagcaatatttaaaccaaaagtcaaaaaggttgctttagttttctgagtttagtccatttagttagcccttgttttacttgatatttgtgaacatttcagctcttcatgagtcctgtacattttcctgtattccaatgttacaatatccaaagttatcagaagcctgtatttaagagcacctattacagttttatagcttattataaaccattttttgaaaaggattaaagcaagacaacaattgtctgtgaagagcaaaatgttcagtgagttacagttagaaacacaattgacaaatttggttatcttcatggtttacaataacttaacataaccttaattatgattgatagcatatcgttagacatcaggattttagaaatcccatgcaattttggaacatatgtgaacattattttctaagaagattgaataacattttggcaatcctatgtacctaaacatgtcaaatgatcctatttacctctctttttggacacttcaggggccttccgaagtaattgaaaagcccggtgtcaaaaaagacaattttgaaacttaaatttgattttcggaatccgttaaatatcttccaggtttaaaacacttgatattatgaaatagaattccagattaccatgtcatttatttttccaaaatgatgactcagaaattttaaagcagcaaaaacattttataacctatttagtcaatatgtttacacaaagaacctcttctgaaagattaatttccacagttctttcaccacttctttgaaccttcagctttttcctaatttaactcaaaacaattctttaaccctaggcaaaagtttacatttccaagccttcttataaccttttactaaaaaacacattttactgttcttacacaccctgcatgtaaatctatttctagtagtttcaattaactcctagcaatttttaactttaagataaaacttggtaagttgctttgtgtgctaagtgcagccaaggtttgcattcttagttaagggtgtgattagttccatatgtccacaccttaccagttgtgaagctgamaagtcaaatagatctcaaaacccaaaaagcagtttgtaacctcaaaacacttaacaaaccttgcatctgacctgaattttaccagtggtctttagggctgtttatatttcttaaagattaaagtcatgtgaactgaaggatamcacagcttttatcttccctctaaaaaatgttagatccaagcgcttgtttttctttaggccaaattaattagagctctttttacagatatcacacacagtacacacacagaggaccacccagtcactgggtgcagccctttaagagacagggctaggaaaacatgcagatgtctaatctgagagggctcatcccctcagacaggattgtgaaacaaagccttgccaagtggctactggccatgcccccaggatgtaaagcaagatggaggcttgcaacacaaaccatacagacgtgtaaagcacaccagattggccacagccaaagactagtcccacaaatccttttccacaaccaaaactttacagagagtacaaacagtgatagttggggggcctaacccagtaaaaacatcttctaaaaggaaaaaaaaatctttaagggctaacttgttgatgaggtagagaaggagaaagamcaaaaaagcagtttaaaaattcctggggaagagcctcttattcttgtgcaaatggttcctccaccagggagacaagtttaagcttaattgctgtccaatagagttacaccccttggccaaggaaggggaagactgctgcaacgggaagtggttaggaccagccagccagctgtgcgggatccttaggccatgcatcctagccccagcaaagcagggagctgctgctcagcagtgagtcccgaaaaaggaaggaaaaggccatgaaaaggcccaggatccacagggggtaggggtatggttttccccactgtcagaagtcccaggatgaaaaggcttagaagcaacagtgagaggttttgtgtccccatttcattcaccacttctcgagccccatgttgggcgccaaaaatgatgcaggactttccttagttctgctacagacgggattcttatctgtttcccagctatgaaaatttaggctcacagacagtttaaagggtgagcaaaacagggttctattgggtgagaatggagaaaagtgggcaaactggccagagtctctccactagagcacttcccacctggtgatcaaatcccaggtccacacaggaagcagaggggccaggctcctccctgctgcaaatggtgtgaagttcttgaggctctactccagtgtgcaggctggttggtgtttctccagggaccccctcccacctggctgtctcactacaagtatgatttagtattgcctttaatattcagtatttattttacctgtatgttgtatttcagaattaatgattaatcaagtatacaaatgtcattatgtcactgtcaatatttaaggaatggtattagtcatctaactaacagtaggtctgcttttgaaaaccaacaaaaatgcaagaggcttttgagagtgcaagtaaaaatagaaaataaattagagtagttggactttaaaaggaataatgtactttaaatggactttaaaaggaataatgtacacaaatcaaaataaccaagtaacattattaggaataagtttgtaatctacagtatgttgccacagattccaatttttttatactcagataattatgccattcattagctttaaagaatgcttttgagtcttgttacttaatcgtagactcatgctcgttaattatagaaaatgtaaggtgcagggtttttaaaaaaatataattcattcaggtgcctgaaaagcacttaacatacaggttgtacaaattagctgcatttcacagataattttggaggcaaatattaaaaatgagcatatggatgatccttttacttagacttgggccaggtctgaaagagtttggttcattgaaataatgatatgctccataacacaaagaggactcactgaagatggaaaattttaatctattccctgtaaatgaaagcttagaaaataaaatgacaagaattgaacaagtgtgaagacaatggagctcacctactggagctggaccaccaggtgagatgattttcataagcatcattctaaccaggaaaattgatgctatacagcaataataaaacaatatctaggaaggttttctattgttgttttttgaagaatgttaactactgaaactatgctttcatgcaatgaattagaagacagaaactctgaattctagatcagatttgtaactttttatcttactgttgctgtgagaattgagcaagataatgtatctgaaggtgactgttgcatatactagattcaggaatcctttcaattaagtgctttctctttttggcagctatataacatcttatcccccatgggtgcacagggagtgatcctctgtgtattggactggcktgggtatttgtgtcacttcatgctttggaacattattttgaagacasgatctgcaccttatttactattttaaccacctccttgctgaacacagttctcaaatatccttaaaattatttactgactttaattgaataattgagtttcaaattaaaatggaactttggtctgactttgttgtctccttgtctcctttgtaatgttagatggaagaagctattcagggaaggagtgacttccagctttgaaacaagaactttagaaacttcagaagcatacggaaaaggaaacaagaaaaaygtaatcaagcaagcctcttgaaatgatacaataatataatagcagaattagatccacagaatttatacaattaaatccacagagtttgtaactatccttaagatcaatttattatcactatgtctgcaaggaagtgtgaagagcagaggaaagtgaccaatgccctttatggtctcagttctctaactcattttatgtttttttttttttttttttttttatactttaagttctagggtacaagtgcacaatgtgcagttttcatacataggtatacatgtggcatgttggtttgctgcacccatcaactcgtcatttacattaggtatttctcctaattctatcccttcccgagccccctacccactaacaggccctggtgtgtgatgtttccctccctgtgtcttaagtgttctcattgttcaattcccacctgtgagtgagaacatgtggtgtttggttttctgtctttgtgacagtttgctgagaatgatggtttccagcttcatccatgtccctacaaaggacatgaactcatcattttttatggctgcatagtattccatggtgtatatgtgccacattttcttaatccagtctatcattgttggacatttgggttggttccaagtctttgctattgtgaataataccacagtaaacatatgtgtgcatgtgtctttatagtagcatgatttataatcctttgggtatatacccaggaatgcgatcgctgggtcaaatggtatttctagttctagatccttgaggaattgccacactgtcttccacaatggttgaactaatttacactcccaccaatagtgtaaaagcattcctatttctccacatcctttccagcacctgttgtttcctgacattttaatgattggcattctaattggtatgagatggtatctcattgtggttttgatttgcatttctctggtgaccagtgatgatgagcattttttcatgtgtctgttggctgcatgaatgtcttcttttatgaagtgtctgttcatatcctttgcccactttttgatggggttgtttttttcttgtaaatttgttggagttctttgtagattctggatattagccgtttgtcagatgggtagattgcaaaaattttctcccattcagtaggttgtctgttcactctgatggtattttattttgccgtgcagaagctctttagtttaattagatcccatttgtcaattttggcttttgttgccattgcttttggtgtcttagtcatgaagtccttgcccatgcctatgtcctgaatggtattgcctaggttttcttctagggtttttatggctttaggtgtaacatttaagtctttaatccatctcaaattcagttttgtataaggtgtaaggaagggatccagtttcagctttctgcatatggctagccagttttcccagcaccatttattaataggggatcctttccccatttcctgtttttgtcaggtttgtcaaagatcagatggttgtagatgtgtggtgttatttctgaggactctgttctattccattggtctataaatctgttttggtaccagtaccatgctgttttggttactgtagccttgtagtatagtttgaagtcaggtagcatgatgcctccagctttgtaccttttgcttaggattgtcttaggattgtcttggcaatgcaggctcttttttggttccatatgaactttaaaatagttttttccaattctgtgaagaaagtcattggtagcttgatggggatggcactgaatctataaattaccttgggcaatatggctattttcacaatattgattctttctatccatgagcatggaatgttcttccatttgtttgtgtcctcttttatttcgttgagcagtggtttgcagttcttcttcaagaggtccttcacatcccttgtaagttggattcctaggtattttattctctttgtagcaattgtgaatgggagttcactcatgatttgtctgtttgttattggtgtttaggaatgtttgtgatttttgcacattgattttgtatcctgagactttgctgaagttgctgatcagcttaaggagattttgggctgagttgatggggttttctaaatatacaatcatgtcctctgcaaacagggacaatttgacttcctcttttcctaatttaatacccaaatttctttctcttgcctgattgccctggccagaacttctaacagtatgttgaataggagtggtgagagagggcattcttgtcttgtgctggttttcaaagggaatgcttccagtttttgccaattgagtgtgatattggctatgggtttttcataaatagctcttattattttgtgatacattccatcaatacctagtttattgagagtttttagcatgaagggctgtcgaattttgtcgaaggccttttctgcatctattgagataatcatgtggcttttgtcattggttctgtttacgtgatggattacgtttattgatttgtgtatgttgaaccagcctaggataccagggatgaagctgacctgatagtggtggataagccttttgatgtgctgctggattgagtttgccagtattttattgaggatttttgtatcgatgttcatcagcggtattggtctaaaattctttttttgttgtgtctctgccaggctttggtatcaggatgatgctggctgcataaaatgagttagagaggattccttctttttctgttgattagaatagttacagaaggaatggtaccagctcctctatgtacatctcatagatttcagctgtgaatctaccaggtgctggacttttttttggttggtaggctgttaattattgccttaatttcatagtctgtgattggtctattcagagattcaatttcttcctggtttagtcttgggagggtgtatgtgtccaggaacttatccatttcttctagattttctagtttatttgcgtagaaatgtttacagtattctctgatggtagtttgtattactgtgggatcggtggtgatatcccctttatcagtttttattgcatctatttgattcttctcacttttcttctttattattcttgctagtggtctatcaattttgttgatgttttcaaaaatccagctcctggattcatttattttttgaagaattttttatgtctctatctctttcagttctgctctgatcttagttatttcttgccttccactagcttttgaatttgtttgctcttgcttctctagttcttttaattttgatgttagctgtcaattttagatctttccttctttctcttgcaggcattttagtgctataaattttcctccaaacatggctttagctgtgtcccagagattctggtacattgtctctttgttctcattgatttcaaataacatttttatttcttccttaattttgttatttactcagtagtcatttaggagcaggatttcagtttctatgtagttgcacaattttgagtgagtttctgaatcctgagttctaatttgattgcactctgttctgagagactgtttgttgtgatttctgttcatttgcatttgccaaggagtgctttacttccaattatgtggtcaattttagaagaagtgtgatgtggtgctgagaagaatgcatattctgttgatttgggctggagagttctgtagatgtctattaggtccgcttgatccagagctgtgttcaagtcctggatatccttgttaaccttctgtctcgttgatctgtctaatattgacagtggggtgttaaaatctcccattattcttgtgtgggtgtctaaatctctttgtagatctctaaggacttgctttatgaatctgggtgctcctgtgttgggtgcatatatatttaggatagttagctcttcttgttgaattgatccctttaccattgtgtgatggccttctttgtctcttttgatctttgttggtttcaagtctatttcatcagagactaggattgcaacccctgccttttttttttttactttccatttgaaggtagatcttcctttatccctttattttgagcctatatgtgtctctgtacctgagatgggtctcctgaatacagcacactgatgggtcttgactcttaatccaatttgccagtctgtgtcttttaattggggcatttaacccatttacatttaaggttaatattgttatgtgtgaatttgatcctgtcattatgatgttagctggttattttgcctgttaattgatgcagtttcttcatagcatcaatgatctttacaatttggcatgtttttgcagtggctggtaccaattgtttctttccatgtttagtgcttccttcaggagctcttgcaaggcaggcctggtggtgacagaatctctcagcatttgcttgtctgtaaaggattttatttctccttctcttatgaagcttagtttggctggatgtgaaattctgggttgaaaattattttctttaaggatgttgaatattagcccccactctattctggcttgaagggtttctcctgagagatccactgtttgtctgatgggcttccctttgtgggtaacccaacctttctctctggctgcccttaacattttttccttcatttcaaccttggtgaatctgacaattatgtgtcttgaggttgctctcctcgaggagtatctttgtggtgttctctgtgttttctgaatttgaatgttggcctgctttgctaggttggggaagttgtcctggataatatcctgaagagcgtttttcaacttggatccattctccccatcactttcagatatatctattaaacatagatttggtcttttcacatagtcctgtatttcttggaggttttgttcatttctttttactcttttcttctctaaccttttcttctcacttcatttcattaatttgatcttcaatcactgatactctttcttccacttgatgaaatcaggtattgaagcttatgtatgcatcacgaagttcttgtgccatggtttttagctccatttaaggtcttctctacactgtttatcctagttagccttccatataaccttttatcaaggtttttagcttacttgcaatgggtttggacatgcttctttagctcggagaagtttgttattaccgaccttctgaagcctacttctgtcaacttgtcaaagtctttctctgtccagctttgttccattgctggcaaggagctgagatcctttggaggagaagaggcactctggtttttagaattttcagcttttctgttctagtttctccccatctttgtggttttatctacctttggtctttgatgttggtgacctacaggtggggttttggtgtagatgtcctttttgttgatgttggtactattcctttctgtttgttagttttccttcgaacagtcaggtccctcagctgcaggtctgttgaagtttgctggaagtccactccagaccctgtttgcctgggtatcaccagcagaggctgcagaacagcaactattgcagaacagcaaaaattgctgcctgatcctccctctagaagctttgtcccagaggggcagccacctatatgaggtgtctgtcggcccctactgggaggtatctccccatttggctacacaggtgtcaggaacccacttgaggaggcattctgtccattctgagagctcaaccaccatgctgggagaactacagctgtcttcagagctgtcagacagggacgttgctgccttttgttcaactatgaacaaaaaagaagctgtctgctgccttttcttcagctatgtcctgcccaaagaggtggattctatagaggcagtagtccgtgctgagctgtggtgggctccgcccagcccagtttgagcttcctggccactttgtttacctactcaagcctcagcaattgcggacacccctcccccaaccaggctgctgcctcgcagtttcatctcatattgctgcactggcagtgattaaggtttcgtgggtgtgggacccactgagccaggcataggagagaatc

SEQ ID NO: 97489 - DNA, 15243 bp, Homo sapiens
agtatattttgttattctaatctttttttcacatgattaaaatacatatcttatgaaagtttgctcaaaagtaaatgtcatttaacttctcatcctaattatagaacaaggttgattgactgtgttaaaattaaagcagatttctgaattctctatgaaaatatgaatgaaataggagaaacccagaaattttcatgaatgttaggaaaactaaaaggaaagctcactgacttcctatataccatcaaaattgcaacaccatttccctagaaagagttttagtctggaagatttcctaaagtctaaaacatttgctaatgtgcaaatattttaagacacatatcacagatttctgtgagcaaccattccacatattttccaagcgttatctatcaccattaataaacattcactaagttctttctcagtcaactggtattaggaaagacagataaactattgtccctttccttcaggaaatttgccctaaagataggggattattccatatattacatatattcttcgggtttccatttattcaagttaccagttttctgaataaataactttacaattttatagagaattcctttctaatccttactactttttgtgataagaaccactcccatttaacagatgaaaagactaagacacacaaagattaagcaatttgcctaaaatcagaaagcttggaagtcacaaggttaggtgtggaatgtagttctaccagcctgtagagacacagatgttttaaccattaaaacacacacacacacacgctctctctctctctctcacacacacacaaagtaaggagtacaggcagaaggtagtacactgattcagaggaaaaccaatactacctagagccggaaggatcagaggacattccatggagtgcacggcacttaactgacgtcttgaaagacagaaatgcattatcaggagagataagcagttccaggagaaggcatttttccctgctggttacaaatatggcttggatgtccctcagtcctcttttgtaaaggatccagacagacttcccaacccacaagaaggaacctgacaatattctatgattagaaggaaatcttagcaattcaaagtgaggaaaatattgtttgtttcctatcattactggtcctctcctctcccactattcagcaacaattttgcaaaggaatagggaaaaatctgctcctgaataaaatctaagaagacaatgaactatttttttttttttttttaatttacagcactcactgaagagaaaaatgtctctgggttaggaaactgggccaaagttacagaaataattgtgtcatgggtgtggaactatatttcaatttataagtggaaaaaagtcatcaggagaaatagatgacaagggaataagatgaaccagacaaacccatgaaggaagtaagtcagtaaagcccttagcttgaacagtttactcatgtttggagtaaaaacatttacttataaaattgttccctctcacaataatgccaaagaaagaaaagaaagaaagaaagaaagaaagaaaagaaactgtcatttatccttgattgttcccccaagctataatcacatacgtgtaaaggagtatttcttgtgaaacacttaataccaatttaccaataaaaggggaggaagatgacctttcgcttcagttcctttttcacctcaagaatctagaagaacccacatccttcttcagctatctggctgtctccaattgtgctcactgtattctatcttaactccactcaagtcaggctccaactgcaccactccaccgcaatgactctcacacaggtgacttgtaacctctatgtcactaaatgcagcactcagtgattagacttcatctcacttgtcagatcagctgcaactgacacaccatcactccatcttctctcatgtcttcttcacatggtttctaaagcgccgtgctctcttggttttcctacctctctgattgctctagcttggtttccttttcctgatctttcaatgttatagaatgcttcaaggttcagttcttagtcttttctttaatgacactttccccttagtgatcccatctactctcctgacttcactatccacaggcagatgactcacaattgtgtatttcagtccagccctctttcctgaacttgactcaggtatctaactgcttacttgatgcctccacttgaatgtctaataaagattgcttaacgtatgcaaaactcagcagctaatgccactcacctccacagccatagcccctccccccaccaaaaaatatcctactccacccatagatttccatatttcagctgatggcaactccaatccttcccgttgtttaggcctcaaacctttcagttatgcttaacttctctcttatgcccaccttaaatctaccagcaaaatctgttggttctatcttcaaaatatacctataatttagccacttcttccacctccaccgctaccaccctcatccaagctatcatcatctcttacctggattgctggatagcctcctaattggtccccctgcctctaccacgccctcagagtctattctcaacacagcaggagtgttcctattaaaatctaagacagatcatgtcactcctgtgctcaaagctctgtgatggctctcatctcactcataaagccagtgtccttcatacaagatactatgccacctatgtttgcaataatcctcactattgcccacctctctaacccccctctaactatttttcccttcaacaactctgcttcagccatgctgagctcctgttccttacactatatgtgtatacacatacactatatgtgtatacacatacacacatacacactttatatgtgtaaatttacatagtaatttacttattttttatgtttgttactgcccctccttctaccctgttagaatgtatgcaaaatgtgggttctacagggcaggagtctttgttttgtacaccaaagtatcctaagagactagcccagtgtgaggcacataatcagtgctttaatcaacatcgcttaatgaatgaatttctagtctcagcaaactataaagggctcagccatgtgactgaacttgttccactaagaatcttactacattcctttttcttaaaaaacatgtgggccaggcgcagtggctcacgcctgtaatcccagcactttgggaggccgaggcgggcggatcacgaggtcaggagatcgagaccatcctggctaatgcagcgaaaccctgtctctactaaaaatacaaaacaattagccaggcatggtggcgggtgcctgtagtcccacctactcgggaggctgaagcaggagaatggctgaacctggaaggcggagcttgcagtgaaccgagatcgcgccactgcactccaacctgggcgacagagcgagactctgtctcaaaaacaaacaaacaaacaaacaaacaaacaacaaaaaaacacatgtgccacagtaaatgctgaataaatgcttgttgaatgaatttctaaatggcactgtgttgtaaatggaataaaatctcaccgcaaatatcatgaactcaataaaacaaaacaaaacagaaactgtgtaccatttgttcatccatttatccatctattaattcatctactcaacataaatttgcgtaactataatgtgctctgcattatgtccctgtattagggacataaataaaaggcttagtccctatttttgcatggggcaaagagaaaagaaaccatacaaatacaattcagactattaattgcctttatagagggaagccctgggaacaacaggatcacagaagaaagcacctaactgaccgtggttgtagaggcaggggccatcaggaaagatgtgccccttgaactaaatttttaaggagttagttaaggaaaaacagttggcaggggttgtggaggaaggaggaagaagatgccattttaagcagaggacacagcttgtctgaaagcacagccagtaagcatatacagaaaacactgaactgcaggcagctcagttagctagagtactggaatccaggggatatgttgaagtggagaggtcttttactcatactgcatagtttgatttaaacttgaacttctgtggtagccattacagttgcattctcaagtttgtattttagaaataactgaaagcaagtagtatggtaaacggggccttgagaaagactatatagaaaaggtatgaaatttaaattcagagttagaaatgcaatataaattggtaaagagcatcaggaattttaattcttgactcaaagtaacctgacaattataattatattatttaccttttttccccaagaggactcaaaagaagagagcatcaagggaaagagactcaaagaaattcttaaacacatcctgattcaaatccaaaacctaaatgaagtgaaacaaacaatgaagaaaaccatcctcaatgccattctttactcaacagggagttcacaataatagtccaagagaacatttacagtgccaaaagaaatacccaatccatccatcatcccctcactcccactccctcccaaatatctcatattttccttcccaaaagataccaatactcaacagctacttgtcactcccaagttctgataatcctcttggcatctcgacattaaaacctttctttgtccttaaagcaagggagatggattgccgaatcccaggagcgattacctcaaacaaccattttactctgctggggcacaaaatatctttctcaattgtattctttcacaacacgccttgctagccaagccttaagaggttagtttggtttgggggaccactgtaggcaactggaaaaaaaccagaattatacctggcattgatacagaaccgaacttctgcgggtaaacaaaagcaataggttctctgttctctactttcagtcatgttgccttaaaatttgtaaatgagtattttttacatctccccgagtatttattctagaaattcaaaaaggagaaacagaaatcaggcacaaagaggtcctaggtacaagtaccaaatacttacttctctcttagggcagcacttgaaatctgaaccgctgatgcaaaatcaaagcacagcacactttctatctatatagtacctacataggtatatgcatagttcagtatcatttacaaagcccaagtttctgtttaagaaaatgaagggaaaaatagaagaaaatctaaagtggcaggaaagctaaatatggctccaggaacgcagaaaaaggtccacaagggtgagtgagtgggtgcgtgtgtgtatatgtgtgtgtgtgcgcgctcatgtgcgtttgggtgtacatacacaagacccaattatttgacattatctgcttaaccttattctgttataaaattattttcacaaacaagctacatatagaactaaaagtcagtgttgaagtgatttctaaatatttactgaacttctaaaaataagactaaccctttggaaccaactgtggtttttgatggtttgttccaaaatgtctaatgtagggacatgatagtatgaaactggaagtctaatcaccaattctggaatgttttcaaagggaggttttcctttttcggatcctcttactcaccagtgaattgatttttctatgaagaaaagtttttaaaaagtaaagtttctcaaggattgctcaattcctctgaatttaaatctctacctctggggagagcctctcacagggaaagaagaggtaagcatgatccttctttgaatcttggtgttacatttttcctttaaaaaaatgccacagttttaacttagagttttttaggggaaaggaggggagggaagggtcaaactggttgtctttgtttccctaggaatgacaatctaggaacaaccaaagatactgtataaattaaacatagctctgtttatatatatgtatatatttaaagaaaacaaaaaaatccaaaatttgtgggattggtaatttcaaatttcaaatataaagtcagttaaaaaatatgtaaagcagagcagggtgggacctgttcataaggtggagcaagcatcaggtgctccgaggagtgaggccgggtattcaagggagggatacttcaggctcgtgcagtagaggaagactgagcctggtcttgaaagatggggttgaaaatctgcagagtcctgaggctttcagactgaaaaaggctttcctttctcacctgacaatcacagtctatcatgatttatagacttttcttgatcaactcctctggagatattttcctggagaaacactggagaagtgtggtacactgttctgtttgtgaatacttttttgaggtgcaagaacaagctactgaggcagaaagtgtgcctccagttatccctacccctcaccactgtctcttaagtgtttaccaccacaagatctttttttgtggctgtgatccagatggaggtctcccctctatttgtcagagtttcttcactgagtagtggacacatttcaggactatgttggagtctgttcagaattagtgatgaaggacaatgtgattgtratttatgcggcatcagaagagacgcttggcaatgggtttccaagytgactcgttggctaccgagtcaaatatcctcaaagaaaagataaagcctcccactatccttcgaacagttgtcaacaccatcacaggaagcaccaatgtgggtgacyaacttcccactggataactgtcaatggtrccttggcgaggtactggggtgaaatacaccaacaatgaggcctattttgatgtgattgaagagattgatgccattattgataaatcaggttctacaattgctgctgaaacccaggggatgattgatgctgtatcaagctgattggaatgccagaccttacacttcccttcatgaaccccaggtggttggatgatatcagcttccatccttgtgtttaagtgctggaaatctgagcatatcctttctttcatccctcttgatrgaaatttccgcctgctctcttatcctgtcagtgcaaagaaactggttgcaatcccagtgtatgtcaaatataatatcagtttctgagacagtagttcacttgtatgctttggaataatggtgggacccaagcaggcaatggggaagaccacagagggagtgatagtcaccagccagatgcccaaaggggtcctaaacgtgagcctgactccacgacaaaggatgtacacgttcagcccagtcacagagatgctattttgggatgtgggaaaaacaaatccccacaagctaccaagtttaaggaagaccatgggtcttcacattggagattccaaaccagaaccattgttctgtggaaccactatttccttctatactctttaattttttacctattactaaaaaacaaaacaaaacaaaacaaaacaaaacaaaacaaaacaaaaaccttcctgatatcttcctctaatatgataaaattaacttgtagttaagatgcagcagctggctatttctggacttagggtcatctggatatgtatggagaaaagtacaaaccctttaagggcataaaatacatgaccaaagctagaaagttccaagtttgaacctgaagggagagtctgcagagggaaaagtcatgaacactttttcatttcttatctaaaagtaaaaagtatcggcctgtctcctaggacagtcccctcctgggcccacacattcctttttcyccttagcctgcagtgctgtggaactaatcaagggaggaaagggtcaccagggagaactggacagaactgaaacacagcaaaaccagttctcaaggacaaggtgtgtgatgggggtagagatgcttgatgcttgtgtaactatttttaacatggtttctactgaaaaagaccaacatttgttgcttgcttggctttaattatctaaagctgacgaaagacttctttgttgatttttcaaggtagaaagattagaaagaggctgggtatggtggctcaagcctgtaatcccagcactttgggaggctgaggtgggtggatcaccagaggtcaggagattgagaccagcctggccaacatggtgaaaccccgtctctactaaaaatacaaaaactagtcaggcatggtggcacatgcctgtagtccctactactcaggaggctgaagcaggagtatcacttgaacccgggaggcggaggttgcagggagccaagattgcacccctgcactccagcctgcgtgacagagcgagactctgtctctgaaaaaaaaagaaagaaagattagaaagaaaaattggaagaaaaatgaatgttaggtcaaggaaaggtctgttaaggatctgatctatgcaggagaaggaggaggaaacagaattaaagaagagttacgagacatctttaaatgaaagattggcaagaaaagtaaataaattctgtattaaggagggatgggaagaagagttggtttctttctggtccttctgctcatatataaaaaacacttgtacttctacaaaaggactggagacttcttaaattcgagtccactattgacatgaaaaccctagtagaatcatattttccctcgaagactgtgatgatatcagactagttttcagacactgcctgttgctggcctttagcacttgggtctcatcgtcagtgagaaggtggcctgccttctttccatggtggctgcctaaaatgcttccttccctaacccaactcaattctactcacttccctttacagaattcaccagcctttttcctattacctgatccttccacaggattttctaaaaagtaggagagtttcaatcccataaccgcaaaagtaggagagaagccaatcccataaccgcagtgcagccagaggttgcgtgtcatggtattggagagggccgactcattttccatgaaggtagacatggctgtgagtgatctcacatctgcatttgtccatgcgggggtggtactgaatcccaaccttccggttggaaactcttccatcaatcgccttaagagaatggttaccgtggagggtatggttgctccgtgaagctgcttggtaagtggtcatttcctcatagacttttgttttgtactctactctaccatgtatttacaacagttagctaccagtcccttttcgttctaaaacaaaaaatttcccctaaatctttgaataaaattaatgctatagggaaaaaatacataaagctgtggaaccatgatttccttctatacactttaatttcttgcctattactaaaaaaaaaacttcctggtatgttcctttaatataatactgttttaaggaatgattacctatcatttgattcaaaacagaagtagcagcactagtaaaataaagcaagttgctaaagttagctgggaaatggtcttcaagttaataataaaaaaagtttataataataataataaaaaaaccaaaagggcctaaattcaaaaggaaaaaaaatagacagtaatagggacttgagaaaatggccttggttttctcatctcttcaatgggaatccatagcacctgcctcacagggttgtcatgaggattttaaacactcataaatgtaaagcactaaaaatagtgtctggacccatagtgaatgctcaagaaatattaacacatcattattattattactggcaaaaactcacattatcaggccatttatcacttcctacccaggaaggcaaatggtcataagggaatcacaatctggtgaaaatcttggctgccacgcaatgatagccttatttcacagacagcatactgaagacacagctcaagatttctaaaatctggaaggaagaagtagtcattagagaaggatcagtatttctgatttctagaagggggctatcacctataaaaagaagaataaggcttgttttgcatttgccaaaggtggacttgaattgaatggtggaagttagagggaaatgtctgttcactataagaaaggctaacatcagaaacaatcgcttcataaaaggatagcctgctttgaaggatattgtactgttaactgagtgtgaaagcaggagtttcatccatcaaggatgctaattgcccagcatctttgtaagcacattgtgtacgaacccattcaatcctcaccacagccaccctgctccactgtctatattcctaaccaccacaattcgctgcctacctcccagctctggaatcctgggcaagtaactcaacctgtgtctccatttcctcatttataaaatgaggataatgatagcacttgcctcagatgatagtgatagattaaatgcattgatatatttgcttagcacttagaacagtccctgacacatagcaagtattttattactttttatacaaaggtcatttcaacttttaagaaaatttttttacttggatggcaagttacagaagccacaaagaactctgtcttggctacagtgagcaatctgacacaattttttaccaagtaagtggcactcaaggcttgccttcagccctgattctctaacagccatgaaaaatgtgggcaaaactgctggagtgagagacctacattgagaccagattctctatactttgtcatggctgataaggtaaagccctgaaaaaagtggtctagtccataagcctctgctcccttctcttatcctcaatgcctcagccaatcattcaaactacactttcagcagaacccttaactacttcacacactgggctttacctagtacccacttaaccaattcccaaacctagtcaatccaacccacttccttgtgcctgccatccaactgcaacctggcatccatcatagcctaataagccttctacttgtccttaacttactcctttagattctcagaggcaacattaaacctttactgcactcaagcttccaaatgatctcctgtccctatcctcatgtatcttagattcctcaataattggaaaataggcacaatcagaaacaaattctacttttcatatacctacctccatactcctaaacccctgcaacaacaaatcaattcaacatttatggatatctttgcctagccttttcactctccctcctgtttcagaagaaaaataagtttccagacctcctttccaaggccaactctttcttctgttctctggtgctactcaagaaatgatcatcatcttcttggttcaattgtctggcaaccattcccctgactcccacctctgttagatcttcaaaattgttctactaatctataaacacaccctgaaaaaaaatgttctcagactcactttcctcatttaagtcttgattccttccccaattttattgccaaataaactggtctcttgctacaggtatgtaactggttgaactaataaatgtgaatcactggaaggcaatctgatacaagttattcttgattacaatcaatcttttaagtatgcttaagggtcctaacatccagcagccttggagttaatgatctttaatgatttctcccatttatactgtgtttttaacaagcataataaaggaaaatataccagaggtttattaagtatgacaaactgtactttaaataaatgttgctattgactttaggacttcttgcacaaagtttatagattagcaatactaataccttaaaaatgctttttgaaggataattcttacacgagctaagtaagcccttacagtctacagaataatgatggacgttatgaacaatactatgataacgtaaattgtccacatgcccttagaaccttatctgatttaaaaacttcccatctatatagaagaataagcttacagaaataatgtttccataccttcggggaaaaggatctaaaataggagagaacatgatgtatttaaggaaaagaaaggcaagccagtgagggcgaagcacagaaaacgaggggggaggagggaaggaccaaattcctcagggcctcctagcccagaattaatacattttggcatactcatgagaacaggaagcaaatgaaaagcgttcagctgggagatggaaggatcaggtccgcaattttaaaagaatgactctagttgctgtatggagaatgaatggatagccgaccagagtgagtgtgaggagcacaagtgggagttaggaagttgcttcagaagcctaagagggaaatgctggtagcctggatcagagtggcaatagaggtagaaataaggagatagattctagctgataaaaatcagtaagacttgaggaatgattagatatggggaaaagtaaagaagagaggtgtcaatgacatgttggtttcctgcatttatatacatatatacatggaaatgccagtaacacatcttgtacaatagatatcaagttgttaacagaagttatctgtggaaagggaagatgaattttacataattaaaagcagacttttaaaaccacacagatatgtacaatgtttaaatattttacaatcagcaggtatacattgccttcatacttaaactcacgtgcaatttgcctccctgaaaaggataggaattatcccaaagaacagacacaagaaaagtacatgacatatttaaagaatatcaagtggtctaatgtttgcagaataagaaggaaagatgtatactggaacagagatgaggagaggattgaagctatttcagaatatggccagatcataaaggtccttctatctgaggctaaagaaatcattccttaaagagtaggaaatggggaagcaagtgaagttttcaagcaagagggcgaaaaatatcaagtttaaatttcagaaagattactcaagaggcagtataaagactgaaccaaaaggagacagaagacaggctgggagatcactcaggcaagaacttaaggcaaaatcaggggcaacagatagagaagggaagaaatttgagattcatttcagaagttgacaggacttggtgattaagctaatccaacagagaaaaggaaaagtcaaagatgcttccatagtttctagtttaggaaatcagtgatgacatcaattgagctaatgcaagaacaggtgaagtgagaagattgacaattcctgtgctgaagataatgaagttcaaatacctctggaggcagggcaagttacccaacaagaagtcaggctatttaagtttgaatttcaacaacagggtcgagaatgggagcacatgaacactattactcagaagagagaattttaaacctgtggacacagtcttaccctcgatgcaatttcactccatcttgaggcaactgtcaagagttgaccagttccatttactctcatagttgtaaaaattccacaaaattgttaaagtctctgtaagcgataactttaaacagtcagagcttttgtcttgttctgagtcatttttcccctttcctctttgtatgccattctttctgtcaaactatctagttaaggaagatatgtgaggtataaggatgcataatataaaaaaatttttgctattcttattaaacattttgtcttaattgtaaaggtaaagaaaagaacattcgactattctaactttaggaaaacctaagttaaataatgatttacctatgtgactctccactaattttctcttgcaaatcatcaccccttaattaactgacatccccaaggcagtcaactcaagctgtagctttaaccacagaggttaaacaattcacagtcctgttgttgctgtcagaaacccaagttacactgtacctttgtctaatcaatggtgccctagtttggtgggagatggagaggaagggacctgttggcaaggaaacagctgcttccttcctgaacaagggaaaaccagtaaggtgacagatgggcagagcagaaaagtagccaaaaattgctgtggctcctgtttggcaataatttctggaactgaggcacaactgaatattttaaagtatatcaacaattgagagagtattgtttacctgagtgcgccaaagttcaacaagccttcccacacgtttcccacatttgaaaaacttttaagtttgcagtagtacaaagagcttagccttagcctatgtacagtgggcaaagactgcaaggcactgtcccatttcactttaggattacacccaagcaaatgcactttccggttaaaaaaaaaaaggaaaaaattttattttctctatagtagttatagttgtatgactgactagaattactattaaaatctcattaaaaatgtttttcttaaaagtttacttttatatacttaatttgaaaagatttgttcaaacttttataatttgttctttaatcattccccctcccatccacttcagtacccagaaaactaaatatccaagaattcctgggtaaaacagacaaccactagatagatataactaacgtatttttttaagctgtatagttcttcatcaaatggaaatcggcaaccactgaaaataacattaaaaattagtgtgggcatgaagtatggaattttaaacatcagtttactatgctgattaagtcaacatttatattttcatcagaacttaataatcccataaataaatagagctctcagttatttaaaaaaatcaagggataacatatgtatttagacatattagcagcgtaaagatgtatgcttcaacacacttattggggaaacgtctgaaaatattactacactgaattcaagggtatccaaaggaacctgacatagaagttctctagaataacatcatttcagggaatttcaaaaaagaaaaggggtcaaataggaaatagcctcaaattaattgacaaagttcagtgtttgccccaactagattattctctctctccactgcaaaaagaaagtctcaggatgagtgaatcacttagacgaaagttcatctagtggaataaatggagaagccgcttgggcaggtgacacaggagagtcggtggtagtgctgactttcgctggtgagttacaagaagatccggcactgctgctgtttccatcaagggtatccgaagatacacacacaccaggatctgacagctgtgcaacgtcagaagaaagcatgttggtgatgccctggaaaaatctctttggctgatattcagtttccatttcacattttcttttcaatggtccaagaacacttggtctaatgcaattgatggggctctggcttctccg

SEQ ID NO: 97490 - DNA, 12433 bp, Homo sapiens
  misc_feature (1)...(12433): n = A,T,C or G
ttagtagagacagggtttcacggtgtcagccaggatggtctcgatctcctgacctcgttatccgcccgccttggcctcccaaagtgttgggattacaggcgtgagccaccgcgcccggccaaagacggttcttttccccgcctaaagtagtggtcgcaggtagcgtaggcactgcctgcttgacccagggtggaatagtctgttcctctgtttaattaaaacacaaacgttcttggggactggagggctggacacgtgcctgttgcacccccaagctcatatcactagcagacagatgagcgctacacacacacctttctctcaaacggctctgtctggcctgagaccaactgacaagatgcgtccagacacagagtgtttgcaaacacggnnnnnnnnnnnnnnnnnnnnnnnnnnnnnnnnnnnnnnnnnnnnnnnnnnnnnnnnnnnnnnnnnnnnnnnnnnnnnnnnnnnnnnnnnnnnnnnnnnnnnnnnnnnnnnnnnntgcatctggccgggcgcggcaattcaagcctgtcatcccagcactttgggaggccgaggcgggcagatcacgagatcaggagatcgagaccatcctggctaacacagtaaaaccccgtctctactaaaaatacaaattagccaggcgtggtggcgggcacctgtagtcccagctactcgggaggctgaggcaggagaatggcgtgaaccggggaggtggagcttacagtgagccgagatcgcgccactgcactccagcctgggcgacagagcgagactccatctcaaaaacaaacaaacaaacaacgttgctaggaccaggtgttgctctgggcacctgggatatggtgctggaaaagacagcactccctgcaacgctgaggaatgtgtagatacagggatgagaagtcccagtgatagcttctcgagagagctgtgtgcgcaagacagaagggtggacgtggtgtgtctgaggtcaagaagtgcatgtggccgggggaaggagtaggcagaagagaagcaggagaggtggacatggagctgatcgcactcatgaggctgacccactccagacttttgggacgagaagcaagaggggctgtaagctgggagtgtgatgagtgtggcggcttgaagtgctggtggactgggctaggggttgatgggagagaaggtggcagaaattgaatgcgtgttgccttgtgatatgttagatgtgggcagtctaggaaagctggagagcaccacccccaggcctatagaattgggtatctatggaagagatttaggaatctgaactccttttctctgttttctcttttgtctatcgctcgtgctctctctctctctccttccttccttccctccctccctccctttcttttccttttctttccttttctctttcttttttcctttccttccttccctctttcctatttctcttttattttttgagacgaattcaaaaattctaaaatttttgaatttttaagtagaggcagggtttcttcatgttggccaggctggtcttgaactcctgacctcaggagatccaccagcctcggcctctcaaagtgctgggattacaggcgtgagccaccgcgcccggctgaaatttctcttctttgctgtagaggtcagtagcagtaagtagcggctgataggtgagaatggagattaattgaagcaacgctgttactgattagattttgtctttacacttgagcctggaaggaagaaatggaagcattcgacccaaggaatgttgccccacagatttctggggggagcataggagattggtgtggtgcgtgccctgccctcctccctctctcaacccctgtcagtctctcccctgtttttccctgctggctcttctctcgcnnnnnnnnnnnnnnnnnnnnnnnnnnnnnnnnnnnnnnnnnnnnnnnnnnnnnnnnnnnnnnnnnnnnnnnnnnnnnnnnnnnnnnnnnnnnnnnnnnnnnnnnnnnnnnnnnnnnnnnnnnnnnnnnnnnnnnnnnnnnnnnnnnnnnnnnnnnnnnnnnnnnnnnnnnnnnnnnnnnnnnnnnnnnnnnnnnnnnnnnnnnnnnnnnnnnnnnnnnnnnnnnnnnnnnnnnnnnnnnnnnnnnnnnnnnnnnnnnnnnnnnnnnnnnnnnnnnnnnnnnnnnnnnnnnnnnnnnnnnnnnnnnnnnnnnnctggtcttgaactcctgacctcgtgatccacctgtcttggcctcccaaaatgctgggattataggcgtgagccaccgctcccggcctgtctctcctcctctcttaatccttccttctctcctctcgcccagcttcccctctgcttgccctctctccctatctctattttagtctctctttgtctctctcggtcttgtgatttagggcactttgtgttcagtccctttctagtgattgggattattatccacttaaaatatccacaataggccgggtgcagtggctcatccctgtaatcccagcacgtcgggaggtcgaggctggtggatctcctgaggtcagaagttcaagaccagcctgaccaacatggagaaaccctgtctctactaaaaatacaaaaattagccaggcgtgttgtcacatgcctatagtcgcagctactcagcaggctgaggcaggagaattacttgaacctggggggcggagattgcggtgagctgagatcgcaccattgcactccagcttgggcgacaagagtgaaactttgtctcacaaaaaataaaaaataaaaaaaaaaaatccacaaggaatttcacttccatgtggcagaacagaaaacgaatggatttattgcaaaatacgagtgagaaagtgtgattctctcattcatacccttttatgacacttagttctgaaccgatttgcctcgtgtcttcagttgggatctcaggatctctttcagccaaaaaaatcaaacttccctgttgagtatggcctgtgtcacggtgaccatcctgggctccttccgtttttttgttttttttcaagacagtctcgctccgtcgcccaggctggagtgcagtggcacaatctcggctctccacaacctccgcctcccgggttcaagtgattctcctgcctcagcctcccaagtagctgggattacaggtgtctgccaccacacctggctattttttttttttttaatttttagtagagatggggtttcaccaggttgaccaggctggtctcaagctcctgacctcaggtgatccacctgcctcccaaagtgctgggaatataggcatcaaccaccgcacccagcctcaccaggtaaactttcaagttcaaaagtgcagcttggaattccagagggaaggaggatggggatacgggtacgtgtgaataaagcagcgctgtgtctacgattccactctctgtgctcacgtgaacacattactcagctcccactcagaagtgagaacacgctgcgtttgactttctgtgtctctgtgatttcaattaaagtaacggcctccagggtaacgaaactgcacttctatgccctaaatctataataatacatcaaggtaaaaaaaaaaaaaaatgggccaggtgcagtggctgacgcctgtnnnnnnnnnnnnnnnnnnnnnnnnnnnnnnnnnnnnnnnnnnnnnnnnnnnnnnnnnnnnnnnnnnnnnnnnnnnnnnnnnnnnnnnnnnnnnnnncaggagttccagaccagcccagccaacacggtgaaaccccatctctactaaaaatacaaaaattacctggacatggaggtgcgtgcctgtagtcccagctactcgggaggctgaggcaggagaatcgcttgaacccgggaggcggaggttgcagtgagccgagatcaccccactgcacaccagcctggatgacagagtgagattccatctcaaataaataaataaataaataaaatgtatttcaaaagtgccaatatgacatgaactgctgttaatttgttcacctgtattgttaaaatgggtgaatacggttaccagattgtgatcatgttcaaattccataggccgcagccttcgggatgaagcaaagagtttttgaaaaattacatattctatgtctaaaatggcaccatctgcatttttgaaaaattttagataatattacaaatgcgtaggttggctcatgcctgtaatcccagcactctgggaggccgaggcaggaggatagcttgagcccaggagtttgagaacagcctgggcaacatagcaagaccccatctctacaaagataattaatcaggcttggtggcaggcacctgtagtcccagctactcaggaggctgaggcaggaggattgactgagcccaggcattcgagaccagcctgggcaacatggtgagagcttgtctctagcaaacatacagaaactttaaagtttttaaactagctgggcgtggtggtgggtgcctgtggccccagctactcgggaggctgaggcaggaggatcgcttgaccccaggagttcaaggctgcagggagaaatgatggtgcccctgcactccagcctgagcgacagagtgagaccccatctctaaaagagagaccctctgtctctaaaaagaaaaacagaccgggcgcggtggctcacgcctgtaatcccagcacttcgggaggcccaggcgggcggatcacgagatcaggagatcgagaccatccttgctaacacggtgaaaccccgtctctactaaaaatacaaaaaaaattagccgggcgtggtggcgggcgcctgtggtcccagctactccggaggctgaggcaggagaatggtgtgaacccaggaggcggagcttgcagtgagaggcgattgtgccactgcactccagcctgggcgacagagcgagactccatctcaaaaaaagtaaaacagtaaagagtatagaaaaacatgcatgcatggggggtataggagaggtcccagccctcagccgtagccatggatgtccaggtggtgatgtgttgccctggcccgccccgcaggcctccagcatctccaacagcggcttcccaggggatgctgaagctgcggccggaccggcaagctcgggcaggggtgagcggagctgcatcacccaggcgtcccgtctgggacctcctcccatgcctccttcctgggcacctgcccctcctcactagctcatcctccttcccacctggtggaggacacgcacaccctcctggtggcgtcctcgagccccgtccacccgcccaggatctggggcatcctgtgtttcccgccttgctctcctgcacagcctgactcagagcgggagctcgaccccctaccctccccgctgtacgctgccccagcaaacctcccgagtttgcacccggccgctggatcggcctgcacaggggctgccgcctccgtcccagatagcaggggcttttccctgcaccccacctcactcagctcatgcctctgctcctggtgaaaaacttttcccatcactccgtcccgtcccctctctgcagcaaatgactcttgtccaggctgccagagaccactgaggcactcggtccggaagcccatctgtgccagggtcattgggaggtaaaggcaacaggctttacctctccaggccacccctgcgcctactccagctaagactccaggccacccctgaccctactccagccaagcctccaggtcacccctgcccctactccagccaagcctccaggtcacccctgtccctactccaggggctgagcgcggtggctcacgcctgtaatcccagcactttgggactccgagttgggcggatcacgaagtcaggagatcgagaccatcctggctaacacggtgaaatgccgtctctactaaaaatacaaaaacaaaattagccgagtgtggtggcaggtgcctgtagtcccagctactggggaggctgaggcaggagaatggcgtgaacccgggaggcggagcttgcagtgagccaagatcacgccactgcactccagcctgggtgacagagygagactccgtctcaaaaaaaaaaaaaaaaagcaacagtatgttcccctgggagaacggagggggcggctgtttacagttgccccagggcaggacctgcacactggaccatccagggccagtcaccccacaggcatctcagactccacacatccccgccaaaccccagccctgggtcttctgcattctggggacatggggacaccacgctggtcggkagggtcccaggctcttctcaatctctctcgggcccctcctctcctgctgccgctgccscggtgagactcygaggcctgtaggaagcttcaggtgcctgagcctccagtacagcccttcccctactccasccaagcctccaggccacccctgtccctactgcagccaaatctccaggcygcccctgtcccctactcaaaccaagcctccagaccgcccctgtcctctactccagccaagcctccaggccgcccctgtcctctactccagccaagcctccaggctgcccgtgtcccctactccagccaagcctccaggccacccctgtccctactgcagccaaatctgccaggccgcccctgtcccctactcaaaccaagcctccagaccgccccctgtcctctactccagccaagcctccagaccgcccctgtcctctactccagccaagcctccagaccgcccctgtcctctactccagccaagcctccaggccgcccctgtcctctactccagccaagcctccaggccgcccctgtcctctactccagccaagcctccaggctgcctgtgtcccctactccagccaaagctccaggccgcccctgcccctactccagccaaagctccaggccacccctgtcccctactccacccaagcctccaggaggccctgtcacctactccagccaagcctccaggccagtccttcctttactccagccaaagctccaggccacccctgtcccctactccacccaagcctccaggaggccctgtcacctactccagccaagcctccaggccagtccttcctttactccagccaagcctccaggccacccctgtccctactgcagccaaacctccaggccgccgctgtcccctactcaaaccaagcctccaggccgcccctgctcctcctccagccaagcctccaggccagccctgtcccctgctccagccaagcgtccagatcgcccccgttcctactccagccaaacctccaggccactcctgcccctgtagcaggactagccgcggataaaacccctcagacaccaggtttaggaaggttttggctttattcggccggaagcgttggcggactcacgtctcgagaaccgggctctccgaagacagagttcctggccctttgaaaggcttacaactctaaggggttccacgtgaaagggttctgatagattgagagcacgtgtggttagagtcgggggttaatgttttaacctcaggcctggtcaggggtgccggctggtcttgccactgacttcattcctgttgtttttcaacttttacttcctccttctcttcagagacaggagatagtaaaataaatggcctctctccccaccccgactccagccaagcctccaggccacccctgaccctactccagccaaacctccaggcctcccctgcccctactccagccaagcccccaggtcactcctactccagccaaacctccaggccacccctgcccctactccagctaagactccaggccacccctgaccctactccagccaaaacttcagcccgtcccactcacccaagttatacaaaagctcctgggctttccggccaactctgtgtcccaaacatcccatccccaaaatggcagcttctgactgtgtccagaccatgcaggcctctcctgaaaccgtcctgccagacgctgtctcaaggtggtgaggggttccgtgcaatgtccctgagggcttttaaagccaccctgtctcctgtccatcggccccctcccctcctctccctctgtctttccagatgctccacccatgcagggttgttgtctcttctttgaacagcctggacgcactgccgctaccccacggcctccgcacctgctgttccctctggcagagacggtctttcctgggagcacccacccggtccctcctgcctcggatttcaaagacttccaaaaccaccttcaccccaaaatccagctctccctcccctccccttctgtccacacccccaaatcaccttctaacatcttcatctttttttttctttgttttgagatggagtctccttctgtcgcccaggctggagtgcagcggcgcgatctcggctcactgcaaccgccacctcccgggttcaagcgattctcctgcctcagcctcccaagttgctaggataacaggcatgcactgccacgcccagctaattttttgtatttgtagaagagatggggtttcaccatgttggcaggctggtctcaaactgctgacctcaaatgatccacctgtcttcgcctcccaaactgcccggatgacacatgtgagccaccacacctggcccagatctgatggttttataaatgggaggtcccctgctgcacacgccctctggcctgtcaccaggtaagacatgcctttgcttctccttggctttcctgccatgagtgtgatatgtatttatcagcaacatgaaaatggactaatacaatatgcttgtcagccacgtgtgtgtctttttttggagaagtgtctgttggccgggcgcggtggctcacgcctgtcatcccagcactttgggaggccgaggcgggtggatcacgaggtcaagagatcgagaccatcctggctaacatggtgaaaccccgtctctactaaagatacaaaaaattagccaggtgtggtggtgggcgcctgtagtcccagctactcgggaggctgaggcaggagaatctcttgaacccgggaagcggagcttgcagtgagctgagatcgtgccactgcactccagcctggtgacagagcgagattccatctcaaaaaaaaaaaattacccaaaattacgcagtctcagatatgtctttatcagcagcatgaaaacggactaatacaatatgcttgttggccacgtgtgtgtcatctttggaaaagtgcctgttggctgggttcagtggctcatgcctattatcccagcactttgggaggctgaggcagacggatcacctgaggtcaggagttcgagatcatcctggccaatatagtgaaaccctgtctctacgaaaaatacaaaaattagccaggtatggtggcaggtgcttgtaatcccagctactcgggaggctgaggcagaagaatcgcttgaacctggaaggtggaggttacagtgagccaagattacaccactgcactccagcctggtgacaaagcgagactctgtctcaaaaggaaaaagaagaaaaaagaaaaagtgtccgttcatgtcctttgtaagactccactctctagtaaccgtgttcctgcccttctcaattcctaaggtaatcgccttaactcagatccctgagaaatccccacagcaggcagagatttggtctcctgacagtagctttgggattccattaagcaaatatgattgggggccagccccttctgtctccaggtaaggtgtccccaaggacccttcatcgctctgaacttcaaggatttctctctttttctttcttgctttccttctttctttctttccttctttcttccttcttttctttttcttccttcctttctttcttcctttctttttctttctttctttccttctttttcttccttccttcctccctcccttccttctttctttctttctgtatctctctctctctttctttcctttctttccatttctgtctctctctcttctttcttttctcttctttctttctttctttctttctctctctctctctctcctctcctctttctctctctctgtttctctctttctttctttctttttgatacagacctcactgtgttgcccaggctggagtgcaatggcccaatctcggctcactgcaatctctcccttccaggttcaagtgattctcctgcctcagcctcccaagtagctgggatgacaggcacctgccaccatgcccggctaatttttgtatttttagtagagacggggtttcaccatgttgaccaggctgatcttgaactcctgacctcaagtgatcctcgcacctcagcctcccaaagtgctgggattacagacatgagccaccttacctggctaatttttatatttttagtagagtcggggttacaccgtgttagccaggctggtctcgatctcctgacctcatgtgatctgccccacattgctgggatgacaggctgtgtttatatttttcccctagaaaatcactctggaggctgggagtggtggcttacgcctgtgatcccagcaatttgggaggccgaggtannnnnnnnnnnnnnnnnnnnccaacatggagaaaccccgtatctactaaaaatacaaaattagccgggcgtggtggtgggtgcctgtaatctcaactactgggagcctgagacagaagaatcacttgaacctgggaggcagaggttgcggcgagacatgcatcctcagaaatggggtagagacctggcacggtcacttttttttttttttgagacagattctcgctctgtcgcccaggctggagtgcagtggcgcgatcttggctcactgcaacctcagcctcccgggttcacacccattctcttgcctcagcctcccaagtagctgggactacaggcacccgccaccacgcccagctaattttttgtatttttagtagagactgggtttcactgtgttagccaggattgtctcgatctcctgaccttgtgatccgcctgccccggcctcccaaagtgctgggatgacaggctaccacgcccagccctggcacggtcacattttaattatgtgcaggcatttagattgtccaaataaacgttgcaagatatctaggctgaagtgggaggatctcttgaagtcaggagttcaagaccagcctgggcaacatagtgagacaccccccccccaccccgatctctacaaagaattaaaaaattagtcaggcacattggctcatgcctgtcttcccagcactttgggaggccgaggtgggtggatcaccttaggtcaggagttggagaccagcctggccaacatggtgaaaccctgtctctactacaaatacaaaaattagccaggtgtggtggtgtgtgcctatagtcccagccactcgagaggctgaggcaggagaatcgcttgaacccaggaggcagaggttgcagtgagctgagatggtgccaccgcactccagcctgacgacagagcgagactccatctaaaaaaaaaaaaaaggggtctcactatgttgcccaggctggcctgctggcatcttgatgttgaacttccagcctccagaagtgtgagagaactggtttcttgagccacccagtttgcagaaattcgcacgacccccagaaatgaatgcaggacctgctcaatccataagacgattaatgagtgctaatgatgggtaagcatattggtttgggatcagttctacagctgatgagtcaagggctcgggggggcctgatgcagactattttagggctgcggaggggcgcccagaaagccagggaatccccacacgctttgtgatcccctaatacggttaatgcaaatttctagagtgatccgtctttgtttgagtactgggcaggcagcagggagagtcaggcagcagccgtgagcgggtggctcttccccaccttgccagcaggctctgtgctccttgaagcaagcgctccagaggctccggaagccacggctggattggagacaagatgggatcctcagaggaccaggcctatcgcctccttaatgactacgccaacggcttcatggtgtcccaggtaggatacgctctgtgggacaagggggaatagacttccgttcatcacactcacgttccattgttgtgtcagtcgagaaaaatgatgagtctccatcattttaggaggtttattttccaccgtgaaagacgtacacccacgatgtagcctcaggagttcctgaggacatgtgcccagggtggtctggggacagcttggtttgatacattttacagagacatgagacatcaatcaatgtatgtaagtacattgggccagtcgtggtggctcacacctgtgatcccagcactttgggaggctgaggcgggcggatcacctgaggtcgggagttcgagaccagcctgacccacacagagaaaccccatctctactaaaaatacaaaattagccaggcttggtggtacatgc

SEQ ID NO: 97491 - DNA, 13514 bp, Homo sapiens
tgtgtcgacctcttgaatggggaaactgaggctgcgtaactggtgaacagcagccttgaaactatgactaggatgccccaaggctttctgatgtagacagcaacaatgtctcatttcttcattcattcacgaatcccatacattttattaactgaccatcaaccagttatgctgagcctgtagccttcagagctgggcacctaactccaagtgaccctcaggctagagggcaaggacggtgctccccccagacatttcccactggattcagcaatttgtgtttttcctgctcagttcactaaggacaaagttaatttgcaccactgccagtctgccattcaagagtgatgaacctatgattggtctaacgatcttcatttttctctagcagggacgaggctgccgtggagtctgcagaagagggtgcattgctacagacaggcccatttctttaccttcccgacctctgaagcaagaatgacccaaaatacacgttccaggagccctttcattttgcagcaccgcccgcagcacctgcccggtggtgtcctccatcacttcgcgagtgaatgaggacccacctcaagggggaaaagatctacttcatctgccagagaaacatgtctggaatggaacaagcctgccagtagtcagagagtatatccagggaatggcccctgagcagcacagctcgtggtcaagcctccaggattaacagtcttatgaaacaaacagcatctggtatttagtagagagcagcatcattgtgttatgacggctaccgacaacttccccctccttacacctggctccgggcggggctgcggggctgcgggtcacaggccatctctgatgcagcccaggggaattgcaaatgcctacatgtcccggtttgggtgagtcttggccctatggggagccctggggtccctcctgagcttctcaccttgaaggctctccagtaggaactgagaacatgtgtcagcctctcaagggctcagtgttggtggctggttttataccccctccctctgcctccctcccacccgatcatgagatgccagggcagctgtgttttgcaatgcagagcccaggatgtggaagccaaggaaaccacaacagaagtgtgagcaattaagaaaaagggaactctattgagaaatgatttcatctgaattggtgagaatgaggacgcggcagcagcccagcactgagtcacaggagtggaaaaatccagtaggaggttgtgggggaagatggagagaaaatgccagtgacactttcagcagaatgactgaaagagggaagtgagggcgtccttgagccccactgcttctgtgctggtctcatgcttggagcaccaaccccaggaagactggtccctatgggccatgggtcacgggggaccctgaggctcctgatgaagggtcagcctccttttccctcgcgtgggtgtcctcctccatggccgctacagcgcaggcagagtgaagagtcctgggctgggaatcccctacttccctctgtcactcttccctcttccccatgacaaagcatgacaagggcaagatttgcaagggcaaaggggtggccctccacagtcctgtttcagctccccccagagcagaatgaaagcctccatcctattcctgaccagaaacggtggctggaggctgcttcctgtgttttgggtggcaattagtaagctggcactgcggggaccagagcacctcccagcctgcccttcctgtgggctcctgccacccatcttctgccccagctgagctccccaaggcctggtactcccatctaaaaatggcagcccttccccacagtcctcgctacaatgcctgggaactgctggggccaggccagcagatgactgaggagctcaggacacagcaggccctgagcagggccgggcaggacacacggctcccactgaaccgggccttcatgccagaacacgccagaagcacagcctcctaacttcgccccacctgtggtaagtgtccctcaggctcccagttcttctttcattctggagagtgagctcactgcctatggcatggctccctgcctgtcactcaaccccacccccgcacccaggctccccacagccaccacttctcagccctgaatttgagcccctactccttgcacctgggacagagctggcccagcacagcagatgctaatgagtacttgttacattaggaaacgaatcagttcaacttttcttctttgtcaatgattcaaattcttataacgtacatgcatccttttttgaattagaaacagctaattaaatatattcggatgacaaatcaacatttcttcaatataccaacgttttccaaaagcatttctctagtctggataataagcgcgaaatcatgttcatttctagtctgagctctgccgcatgacacgctcaacatcctaaaactctaagattcatgtctctcatcaggcaggcagagccatggggccagccgggggccactcttacttgggaaaaaaaggaaactcttgtgtcattgtgttatcacagattagataacagtgagatgctggggacacaggggatttgtttcgtgaagaaaatgctgtaagccactgcatgtgtttgggtttttttctgcagtgatagtgggaggaagggagggaagtaggaaaaggaagtggtaagaacatccccagcccggcagcagcagctgaaaggaagtgataccggggccagatgcctggaactcacctctttcctttctttcaagtttgttaacatgacgatggtcgcagacttttgctcccagaccattctccagaagtcgttaaccgtttcctgtttgggacctgtgtgtagaggacaatttcgaagtcaaaaggcatgaagggaagtccctttggggtcccagccccggcaccctggccgttggcccctggacagctgttcactcccttctcaggcttgttggggacacacacgtcatgccctgaagcgttccggaaccggtaggggctgcctgtcctgccactcacccactccagctaggaactcctcagtgggcaagataattgggcccaggttgagttatgacgttcacaggtaagaagcagggttcagatgagggctgggtctacagccaagtgtgggagagctggtgaaagccttgcgagaggcagagactggccagcctcaccctgcattcccaatcccctcctctttgtcaaaatcttactctcagcatggtgctgtccaatacgatatgagctaaagtccctcgggagggggatgtgaacaacagacaaagtgtcactaggagaaagtcctctgcccctatccacttcctgtctgagctgcggctattttgcagtcccgagctaagcgctacgtgctgagggggatgggcggggagataaggaagcccctggccctgctgctgtcctgccgtgggctagctccctgtgggtgtctgctggcaagagagaaacacatgctttcatctgcttcagccaggatcgtcaggtttcctgaggtttccagctgggcacattcctgatggcctctgcgtgtgcacatgtgtgtccttttttcttagagattctgcatttgtaacaacttcccaggtgattttgatggacgctgactttcagagctcattgccctaaagactcctggcctaagagtgaggaagtctgaggaatctggtttcagctccactgatatctaaccgcacgtacaccaggtcctgcagatgacaacctctggtggaacggagtgatgctggattcagtactcaacacacaaggtagccctgtgcaaggtgaagggcacgttttcacagctgaagtatattcttagttatggccttgatctgaaaagctattcaccccactaacccctcgcccaaacttggggtgccatgtagggctcagccagctgagagaaattcaaggttatctgatgcaagtattaacaagctggaatggcagccggggccactgcgtgccctgtgttcacaccatataggtgtgggaataagtgtgtgtttctctgactacacatatccgttgtgtgaatggatatctaacgtgtctgttaggtgtaaacacacacacacaaatccagtataagtccttggtcttgttggcatacagagaaggaaataagagctattcacgttaccaaaaatacgttgagaaattagtaaaaagcttaccttgagctgctatgaatttattcttctctttgtaaccctagaaaaaataacatcagatttatattttttcagaattatctttgctgaaaggatttgttggtgttgctgttaggaaagcagtacatattcaccatggaaaatttgcaaaacacaggaaaaggttaagaaggaaagaaaactcaccagcaattccagaaataacaaatcctacttcatacgtcccctctctagtctgtttttctgccaaacctttcccagactcacccacaagcagacatgcagacatttctgtcctctaattgggtgaacatgtacaatttattttatgttgtatttttaatgggaattttataattgatattaaatgatcttttaaagattaatacaaatcaagttctaatagtccactgcacatggttttaccacaatctgtttaactacccatgctccctgttctatttggtcaggaatatacataatgctgtagtgaacatcctctgtgatcatctctgtctcttgaaatcaaattcccagatgctgatgccagtgtgtaaagtacgggcagttccgtaccctttgtgcttgtggccaaactgcccagaaaggttgtgacaatttacactccgggcaccagacaagaaagtgcttactgctcatgccccagctgggccaggggaacaagaaacctctgcccacttacatctatgtaggaagcattgatgtagtctgaacagggaattccatccagttggctcagaatcaccctagaatggtcatctggaaaaaaaacccaaacaaagccaagatattaggaccaggaatcacagtgctgtctcttccagaaatcacagtgctgtctcttcatctgcagtgtcagctcctgggaagggcaaaagcagcttcacagcgacaccgggggtggcagagatgttcttcctcagcgttcccatggagaacactagtgtcctgagagagaatgcacctgctttggtgaacactgactgtctcagctgtggcatgacgacaagggtaggatttcagcatccaggatgggggctgctgggtcattacatagcaagaatggcagaatgtgccaggcccctggcagtgcaagggctgtattttatgaaccctgcactgggcccagccccagtgttgccaagtgtgggtgcacttaaaagagccccaggacaggagaactgggtccactctcccaggcttcccagggaaatgagcaccagccccatgaggacaagtggatgtgggggtctaggattggggactctgaccctcagtcccaccaccggagtctgccccagagctggaaggcgagcacagtgaggagcgtctggtagatccagcctgttgcacaagcagttttccggggtagaaggctgaccgtggagtgctctgtgtgtggggtgtgtgtgtagtgagtgtggtgtgtgtgtattgtgtgtgtggtgtgtgtggttgtgtatgtgtgtaatgtgtggtgtgtgtgtggtgtgtatggtgcatgtgtgtagtgtgtgtggtgtatgtgtggtgtgcatgtgtgtagtgtgtatgctgtgtgaatgtgtgcatgtgggtttggtgtgtatgtgtagtgtgtgtgtgtgtgtgtagtgtgtggtatgtgtgtggtgtgtatgtgtgtggtatgtgtgtgatatgtttgtgtggagtgtgtggtgtgtgtgtggagtgtgtatgtgtgtgtgttatgtgcggtgggtgtgtagtgtgtgtgttgtgtgtgtgtgtgtgcatgtagtgtgtgtgtacacacacgtcagggctccatcatgacttttgtgggttgtagtcacttctgcctttgcagcttcctccatagaactattaagaaggttatcttaggactgggttggtcgccagtgaaaagatgcactccagaatgggttttgcacgttttgtttgtgatttgaagagaaatgaagacattttcatgggcttctaaaagtgctgtgggcctggccctgctcctcctgtaacctttcccaggaacgtccggctyggccaggctgggaccaggctggttctgaggacgtttatgctgcactgggcacagagtctggcatgtggtagaagcttagggtctccttcctgagtcattactgagtaactctaggtcctctccctgctttctctgcttagtctctgatcagggtgggttgtgtttgtggtgtttgtggcgtttgtgatggggagccgggcrgcccccaggtcatgccttgtttgtctcaccttcacctggaaggctgccaggtgggccacgggctggtggcctgcracctccgatggttgagccagctctgtcgggctgccagcagagaaagggcgggtatagctctgagagacagtcacagcccacacagggtggccagggagtcagaccccaaacttacagtcctgcagacctcactgtgagaccctcctgctcagggactggcaatgcccaggcagaaatagctctgctgaacacatataacactagttgaaaataatttggaatggtttacgctttgaggacagctatagaaaagcacagggtaaaatatagccttctgcttagatttagaatcttgcagtttctaagagcttcctgtctttttattctaaaaagtcacacttcacattcaaaacattatttcctaaaattatcagctgttggcacttttccagaaaagaggcctagcttgccatctttctatagtctttctacaggcaaaagtcaagcctgcctgacatgcaaagcaccttgacctctgaccccagagctccccagggccacatgcctgcccagagccaaggaccatcttatgactctggtaaaagactgggaaaggcagggaaggtgccaggggctggggaagttgggtcccttctctcctctcccccaggtgactctcagtcccaccctaagtgatactaggggctggggaagttgggccccttctctcctctcccccaggtgactctcagtcccaccctaagtgatactatgggctgtcaccctgggggcgggtggagcagccctgagagctccctgcccaatgtcccttcagccttaagwcttcctgatggctaatgccagatgccaccccattgatccttgccaggccacagcgtctccatgccaccattctgtaaacccatctttccacccatgtgagaagtgccaygtcctggtcccccagtcccgggcagctgcgtgggccctggggttcccatggtgtggtgctcctgccaggagcaggggaaagatcttacaggggaatctagaaaagcccattctgaatctgactacactttcaggcttggaggaaatgccaactgactccagcagcacaacctggagaacgcggctcagagaagacttgagaacgtggctcagagaagacttgcagtgggtgggcccggcctcttccaggtgggggactcccaggtgaggccactgctctgccctgggccatcacactttgagaaggggactgggtgtaggtaatgcccacacttggccatgattctgcttccacagaggtcccagctaaatagtcttaattaacaatgtgatgttacctttaagggatgaaggtttagtgattgagagaaatgaggaattcaggaatgtgcttagcactgagcggtttcttaacacatatggttggcaaatcaaggcacaacttaaaaccactcaattaaggtaataaattaagcagtgaaactaatttctaaatatcccaaatttgacacacattattccaaagatctcagacctcctcctgccacggccttcctttcctttgagctgctcaagccatgtaagttgcctcccctctttctgtgatatcttctacccattggcaacaaatcctctccaaagtgtgcagcatctagccatgtctgagccactgtcaaggctcagctgtgtggccaccacatgacctcctgacccatcttcctggtgttgccttggccacccctacacatatgtgttgaatgaaagactatttgatgaatttctcccagttttcattggatcatgggttcacagtgggttttgtgaaaaccacatatcaatcccacgcatgtaaaatgggacagaattatttctaaaaagtgcacagtttggacagaccacagatcggacagatcatagctgctctgacatacagagcagatgaactcaattctagtcctaaaaatgcagcagggagcagcattccggggcccacatgggctgccttcctccatcccaccaaggccctggcagggtgggatggactccctttgtggaccaggcggaggctgcaggttcgggatttaaacctgaacttagtggagccctttgaggatgccattttgttagcctgatgggcaaagcagatgatgggaggggcccaggtgaaggatccccaactgcacgccccgcccccctgctgctgggccagatctttttttttttttgagatggagtttcgctcttgttccccaggctggagtgcaatggcgcgatctcggctcatggcaacctctgtctcccaggttcaagagattctcctgcctcagtctcccacgtagctggaattacaggcgtccaccaccatgcccggctaatattttgtatttttagtagagacggggtttcaccatcttggccaggctggtcttgaactcctgacttcaggtgatccacctgcctcggcctcccagagtgctgggattacagacatgagccacagcacccggcccgggccagctcttacaaaggcggttcagaacctacagggtttgtcttggcaccaagacaggctgtgaaagctgcccccaggtcacgacccatccagctggagcaggtcaccgagacgcacccccgcacacatccgtctgctctctggccctgccacctcctggcacccacgctccccagcccatgcccacttgtactgctggggttaaatcaggtcgattcagagccttcctacaaagctgctgcccacctacaaatttcgtattctattatttttgtcattggtccaggaccccagacaactctagggatttgcagcttgtggtcacaagcactgagtctgagggaagggagctgcccagggccactggcaggcctagactgggtgccaggcctgagttccacaggaggggccctgccagctggcacccatggccacgaagcagcacccttacccgctgggccccaggcagcccaggtcccaacagtaagcacaggcttggcagccagacccacgagcaaccaaggtacccagggcctgtgcagggagatgggcacctaaagaggaacgttctggagtcctaggtgcaaatgctgagcagttagactgatttggggcctctgagcaccaggaatggcctgcagtcacggggagctgcaaggcaaagctgagtttagtgcaaacaccattgatcatgcaaaacataaaataaaatcttactgggaaggatgttgggatatctgtttttttctctgttttcttctttatttgccagttcaaaagttccttgtatgtgtccagatggcaatgactggaagaaaatgtagcgttagtatgaaatgtgatggattcaagcaccatgctcatgtcagtttccctactgagcacaggaattaatgaaaacacgtggagcaaactacctgctgtccatagtccgtctctgcctcagaccttgcaccaggcatggggcagagaatgaaggagacacagaccctggctttccccagggtgctctttcatgtggggtgaacagtggtgtggccaaagtgatggtctcatcagccagatcctatgctgcatgaaggcggagacttgcctttgcatttccatggtatctcagggcccatggaccctggcctagagcaggtgcctatgatttggtaagaactgactacgacagaactgtgaaccgggagatgggggagcgaggacaggcatgcggagggtttacagcgggatgctgtgactttggggctgaaggatgaatagagcggtcctgggaggcaaggggcgggaaacagccttagatacagtcctgatcttgcttaagactccaggtgtgctctgtggaccagtggcttgggcactcccgggagggtgcttgttagaaatgcagatgctctgtccacaccccagacccacagaatcagcacgaacattaccatgatccccagggcttcagtgcacacgtctttgggaagcaccacgctaaccaactcctttgtcccagtcagggaagtcaggtgtgcaaggaatgccgcggggcccctatcccctctgagcagcataaccgagcgtgaactctggtggcctgcattctagttctttctgccgcctgcagccgccatctctgattcctggtcatctccagctgtctcctgcgtctgctcgctgctcaggtgagctccccacaatgcacagtgtgaagagcctcttgaagccctgagtcctgtcctttgacattacacccgaccagcggctggacccggggccactgggattccagtaacatgcatgaatatgcactgagtgtctcagtgcgccaggtacggtggaaggagctgggtcatctgccccagcctttgcaactcacctatcattaggtgatactaggatggtccccgttttatgggtgaggaaactgaaagccaaagcgaggtgttatagatttgtccagggtcacccagcaagcaaggggcaggagcctggagcggcacccagactaccaggaggatgttcacttcttcaaatgtaggagaatgtgaggggtcccgctgcaactacccaggagagcagagcaggcctcactgcgtagctttggatccaagccgtgcaggcctgggcttgctcacaatgcagagcacagcctgacctgccacccacaggtgtcccgagtcttcctctcctgagggcaggaagcttctccaattgcagactcagatctgaccagctggagctcatggtggggcaccgtaggccgccctctttcctctgctttggggccaccaaaccccatggccacaggttgaggcccttccaggccatggggtttgttggtcccaaagcagaggcaagagggtggcctatgtggagggacctgtctggcggcactgtggcaagggtgataggtggttcttggcctcatccccagccaccagcacctacgccgcctgtagttcctgattcttcatcagggctatcttaatactgaccttcttgacctaatctaagcctgacatctgtggtaaaattctagagccttctctttttctacccgcaaaagctttttttggccccagcactgaaaatacacgggaggcatgataccggatggtgggtacatgatactgtgcattcgtcaaaacccacagaatgcgcaacacacaaaccctgacgtgtggacttctgctagtaacaacagagcagtgttggttcatcaattgcagcagttgaaacacacaaatgcaggaagttaataataggagaaactgctcacaggggaggaagggggcatatgggaactctgtactttctgtgcaattattctgtatagctaaaactgctctaaaataaagtctgttaaaagataaattaggccaggtgtggtgactcacacctgtaatcccagcactttggaagtcgaggcgggtggatcacctgaggtcaggagttcaagaccagcctggccaacatggtgaaaccccgtctctactaaaaatacaaaaattagctgggcatggtggtgggcgcctgtaatctcagctacttgggaggctgaggcagtaaaatcgcttgaacctgggaggcggaggttgccgtgagccaagatttcaccactgcactccagcctgggggacagagcgagactctctctcaaaaaataaataaataaataaataaattaaaagaaattgagaaggctccctggagggattggatggcgaggatggaccaagctctgacaccccacggttgcgtgttcctggcagctgcagagatccagaccatggagatggggcgtagccacccagatgcacagagggtcaaagttgaagtggggaggggcatcgggccctgtgcaccgcacacgtatgtatcctggatccaagtgcacagaataaccacccacatggactctgcagccctttctctggctgtcagtctactggggtctcaaatctctgagctgctcaggtggcccaggggaaaggagagcacctggaggggtctgcacacctggatgagccctgcagtgtcttgcttggggcttgctcatagtaactggccaataaatattgtgtgattggctgtcccattatgtaaattgtccaaattgtttgtggtttgtctgtttgaggtgagatttcatttcatttctttccttttttaacatttttatttttgagacagggtctcactctgttacctaggctggagggcagtggcgcgatctcgactcactgcaacctctgcctcccgggttcaagtgattctcccacctcagcctcctgagtagctgggattacaggtgcacaccaccacgcctagctaatttttgtagttttttggtagagatggggtttcaccatgttggacaggctggtctggaactactgggctcaaatgatctgcccaccttggcctctcaaagtgctgagagtacaggcatgagccaccacacccggcctagagatttcatttcaatgaactcatgagccacgttcctttctctctccgctcggtagtgtcgggcaggcagcaggagagtgtacaagaagctaggtgtgggcagttctgcaagaggccccagctgctctatggagctccagggaatggttctggtttgtttgttgtgctggaagctttgcggttgacacctccctctgcacttttacagcacgtatcagtgtgttagtcctaggcacttggcttgacataacttgctaggatggaggtagggacgagcctgtctgaagcgggggattttccttggcccagtggtgctcactttccaggacttactctggggcctggaagcagactttcctaggatggtgttctaccagtgcagggtggagattgcagagtgcggtctcgtaaggattcagttgcatgtccaggttatccaacctcatgtccatgttatcacaatcctatggggggcagggagtatcctcatttcatagatgaggaaacaggcagaggttaattgcccaagctctctgagccggga

SEQ ID NO: 97492 - DNA, 14063 bp, Homo sapiens
gatgcaggagaatggcttgaacccaggaggtggaggttgcagtgagccaagatcacaccagtgcactccagcctgggtgacaaagtgagtgagactccatctcaaaaaacaaacaaacaaacaaaaatgaatgccaggatcccaccttctacttcttgcgtttgatgcatgagaaatcctagtttacacattttattaaatctgggactggttgtaactggcactaatgtagtcttgtgtgaaggtagtggtgcgatggtcattctctacccttgccccacctgagagcctctagagggaaggctgtggtccagtgcactgacctgaaccctcaccacatgcgtcccacacatatggaattgggagcagtcatttagcatctcttagccatttcgctctaatttctttgtttgccatttttgttgactttttccttgggaacctgaatttaaactcatgccacttttttgtcttccttattctagtgggtaggaatttgatcttgaccccaaaagcaatgataggttcctacagttctgtaaagtatccattgcttctgaaaggccttctttccccattgtctttgacaatttagattttccaagtgctaggattttggagaaagtggagccatgagcccaggcaagtggggtagcctgataatgccctcccatgacacatggggctggggatgtaaaaacttcagagtttccatgtcaaataatctcctttgccctgtggccttcggttacaggaatcatttatattacaggcacattttgaaatatcaaaacaaattggacactttttccctattaggaagaaaggcatgttaatttaagtgtggagtgtgacatttggaaatgtaaaaagaggcttttggggagtagttgggggtttgagtggaatatctccctttttgtatatctctcttgtttttattcatcctgtgtcttattcagatagtgattttcattcacctgcctgatcttctggaacagggattttagagaaagccattttctcagcagctccacaagggcgagatttccaaatgggcaaggaaaggctgcagagacacatctagcttggaagtaaatgcaccaagccagccaaattggaattgtcttatagggatccttgtgtgctgtcacagaagagttttcaggaggctttcctttgggcactaatggccaaccactgctgctgagtttctcccagccttctggagggaatgccagccagcgcactctcagctgtgacatgaccctcctaggagctgttcaatgctagcgccgttttgctctgatgcccagcaccctctgcttttagtcactttccttagcgtcctttcgcagtgcttgcatttcagccaaaatcgtgcctcgtgacttttcttttcctagagttttcgcttctcacagtgaagaatctatcagctgtttcctgaatccttctatgtcttttaaggtgttaacattttcaattttgccacattcagcatttttggcctactctgacctgagctcgataaagagcatcagaaattgagtaaagacagaaataagtccctataagcatgagccctggcactgtccacttcctcctcctcccctaccctgacagcactaatctcccttcagctctactcattggaccccctttattctttaggctctctttagtgatttatcttagtttagctatgagaagaatcaagctttttaagggcttcgctgaaaacgtaatgaaagttgtttcaactctttaaattttaagtgaattgtggccatctcaggcccactagttcatgtacctgatacaatttttatttggagccactgtattcacatcttcctgggacaggatttcacataattggggtaggttaatgagtgtggatttggcactccctttctatagagagtggtaaggagctcaggccttggagtcagtcaggtgtggttccaatcctggatctactattaggttggtccgaaagtaattgccatttcggccattaaaagtaaccgcaaatacttttgcaccaacctaatacttagtagctgtgcagtcttgggtaactcgtttcacctttcttgtgtctcaatgtcctcatttgtaaaatgggcacaatagtcccaatcacataggttgaagactaaaccaaagaccccatttcattagcttagccttatccctggcagataccatgaactcatatgtcattataattatgataatttacttaccctttcaattaggggtataagatgctacacagttttcctctaggacagggcccgcaaaccatggcctgcagcttgcctgtgagctaacaatgattttcatatttttaaaaggttgaaaaaaatcaaaagaagagtgccgtttcgtggcatagggaaattatatgaaattcaaatttcagtgtccataaataaagttttattggaacacaactgtgctcactcatttatatattgtctatggctgcttttgctctatcatagcagagttgagtggttgtgatagagattctatggcctagaaagcctaaatatttgccaccttgccgaccacttgccctaagacatttagccatgtctctggaacatcactgtgatagatagttcaggaattatttgcatattatcatcactgttattccaaaactctgactgcgtgtgtttctgtgtggagagtgatttacaaaggaagaaattatacaagtcataacaaaaagaaaaaaaaaaaattacacaggtccatgtaagacaaatgagatgaggcttttgtggcagttttagctaaggactcactttgtgccttcgagggatcagaaagaatttagaagtagtagcaatattggttaggagaatttacagattctcttgttttcttttcctctatcagtaccttctctgcaaggaggagagaatggatgttagtttctccttgtaagatgaattgaattgcttgtgttagtgtactaggactctgggttggttgtgaatgtggtataccaaggcaaagtctcatctgagcaaataccaccataacaccctgttctcccccaaaaggcaatctctgtagagaattataaaatcttagaatatcaagattggaaggagcctggagatctgagggaatgatattgatattaatatctccttgccgatgtagatacaatatcctgtttgaaggcaaaacattgtgtaataaacccagtctactcaatctattcaactaaggtggcctctagtgggtgtctgagtactggaactagatttgaatacttgtgagatattaaatttcatatgctttacaaaacgtgcagccatccgggcacacaaacaaaatgcccacttttggatgtgaaagtgggggcaggagtttttcccatttaggagctaaaagctctggagctctggtcctcagattcatcttgtgtctggcctgtggtcgcagtgagatgccttttcagtagggatgaggtatacttggggctgggagaggggggacatttggaggtctggcctcccaggggtaggtatgtgtttagccgggctatgcagatgaaccaatctgggtgtctctgtcagggaagaggctaggaaagctgctggtgagaggggtcagagactggtttgccccaagggggatgggggaggcagggaggctgtagaggagctgttgggccagatcttgttgagaaaatctctcagacccgagacttctcccctcctctcatttcctatatttgggctttcacacttaagggactggtcttaaggagagatgtactttttaacatttgatttgcccatgttgtgccccgtacttctgcgtaccaccagaagaccacaatgacaaagaccagcgaaggccaaaggtggccatgtgtgtatagaattgacactccaaggtcaccggatctgcaatctaccaaacagtcttgactcacaccctcaggtttcatatttgaacctcctttgcagggctggtcctggctcctttcaccttctagactgcctttcctttcttactgtcctctgagaggcacactgaacatctgtggacagtggcagttggtagctatatatatacatgtatatatatcagaatttcctctttgtacactgtagcagtggacttccattttgatgatattatacagggtataaatctgcctatctcaacaagttgctttaaagaagaatcagtttcaatgtccaaactaccacttcagtaaagtaacagagccaatgccctgtgtctttttcctttatttatttatttattttgacataggttcttgttctgttgctcaggctggagtgtagtggtttgatctcggctcatagcagcctcaacctcccgggctcaagcaatcctcccatctcagcctcccaagtagctgggactataggcacatagctaactaatttttaaaaattttttattttgtagaaatgaggtttcaccatgttgcccaggctggtctcaaacttctgagctcaagcgatcctcctgcctcagcctcccaaagtgctgggattacaggtgtgaaccaccatgcccacccccctttttcttatgaatgggtgaagcaggagaagagcagtgagtatggctagagatgctgacaccatgtagtatagcaacttgtgggcttctgccttcttcctcaagatgaggccaagaagagcactgggacttccagcctctggtgcatgtgtttcctctgggctaggtggtatgtggtgtccaggtatctgcacacttgctcggggcagggttctaagcagtggatggtggcaatggatatggccaacaagagacaatcatggcagtgtcactgagctgtgaactcccacagaatcttttggcctcccaagctcagagaagaagcttaagggagaaaacctgtcaacagtccttttgccatatttattcactggagtcacacttttataacaggcataggctcaaaggtgtaaataaagccaattattttagttcagcattgattttcatatataaattatcaatatagttttgatttagtaataaaaataacagcctggagttttatcccctgccatggccagtgagagctgtttttaagctgtttctttgtacagggaagcatgtgtcaaagtcacacctcctgattaataaaaacaataaccttttagtccttcctatgttccaggcattgtgcagagggctcacaaatactatttcatgtaatgctactcataattctctgaggtagattagtatttgtatacgtatgttatagacggggaagctgaggctcaggaaatcacttacccaagacagcagctggcaattctaagaaaatttttgaaattctaaaatgcatctgaggacctggcactgtggctcatgcctgtaatcccagcactttgagaggccgaggtgggtggatcacttgaggccaggagttcgagactagcctggccaacatggcgaaaccccatctctactaaaaatacaaaaattagccaggaatggtggtgggcacctgtaatcccagttactcaggaggctaaggcacgagaatcgcttgaaccagagaggtggaggctgcagtgagccgagattgtgccactgcactccagcctgggtgacaaagcaagactctgactcaaataataaaataaaataaagcacgtctgctgccttcacaccccattttctgtaccatgcatgtcaacttctatagggcccttctcttgtatgggtgtccattaggtcatatcttgcagatatggcagagctagagacctagaggtaaagcaagatactaggaaaacaagtaaaagggagctattttctgggagactaggaaaaagaagagactaggaaaagtaagtgaagaagctctaactagtagggggccaataaggggcaaacaaaggagagaagctggctgcttagctaaccaagtagagagcctcggatctggaaggaactggacmgaacatctgtaactgggcagggctggccttgggcctgtcttgacttccttgaaatgtctcttttacctggcctccttctcatggctgtcatcaagcagccctgttgatcatgttcctgaggaaggacagaatggggttggggagattaagtttattagcaaggcaatttcctctagggagaccccaaacctggcttggtaactacagtgaaaggagagcgtttgagccccttcccccttctgcttgatctcctctccttcaccaggctttcttcagacctggttccaatcattataaggcagatctaaagccactcttcctgacactgaaactttgctgagcctggaaaaatcacagaggctcagtttggtgtttttgcatgcaaaatacgagaggcagaggtgaaggtgcattcctggtgccctgcggttcccaggcagtatctgagtgcattttcacctgttatcgcttgcctttcaaatattcgttagctcccccagaagtttagccacgagtcatcttctaggggaaatagctgctctgctctgtttgtagaatctcatagtttattttggaatgaagatgtattttcctggaaaagtgttactactttacagtgtccccttcatctgcgaaactgaaaaggcaggcagccttgctgtatgagaagaccacacacttgcggacagaaaaaagatgcatccgggcttctcttcaagtccaagacaattgatgacaaaggaagtatgacacaaacttattgagatctgttattatccttgtgctgcccgggttttagacaaaaacaataagcagattacataagtgagtgtcaccacttttgcataaccaaggtttcatttttctcttctcacttggttagtcttccgtgagctaagcaacatcatggtagttttctgtagtaccacttatggctttccttgttatcatcacctgcctttgacacatgccttcattaatgagttgatatatttaattatatgttatacagatattttatattacaagcaatgttaattgcattcattcagaacagctcccaattaaaatctataaactacttagacctctataaaaatcccaccatttaccttacagcttcacattaatatttaccctggagaggataaacatctcatcctgtatttatctgttagatcatttttgttgtcataaaaaacaaaagccacatgtttaattggatcccttcggtatgaatttttaaaataatagtaggaatccttacttgggaagatggtttcatagggcatcctaaaaccatcctttgttccaaatcctttgaggatgcacacatttaatgttttccttcttactactatgctatgaacttaacagtgctacatgctaaagtacaggcagcagaagttctctgggaaagtggagatccctagcaagtaaggaacccaagagaaggccattctaagctgtagtcccttgttggaccaagggaggaaggaaacagatagcatccacctggcgctgcaattctactggcctgtggggtggtctggctttaggaagctcactgtgtaatccatcagaggacaatcctgccaagtcttcttttcaagtaaaaaatgttaatgtttctttccatactttgtctcataatcaatattcaattttcaaggcagtaaaactaatcaaagaatataaaatgaatccaacacaagagaaaggagggagaatgagtaagctgcaaatgggactgagcaagaaaataggaggatattataactatagaattttttttttttgagacagagtcttgctttgtcacccaggctggagtgcagtgacgcgatctcgactcactgcaacctctgcctcccgggttcaagcaattctcttcttcctgttggtgaatttctcccaggaggcatgagccaagatcctgtttcatgggtttctgggtataccccttgaaacaccagagtcaggagtcaggaacaacacctagtgtattagttggttttcacactgctgtaaataactgcccgagactggataatttataaagaaaagagatttaatggactcaaagttccacagggctggggaggcctcaggaaacttacaattatggctgaaggggaagcaggaacgtcttacatggcagcaggtgagagaagaaagtgaaggaggaacagccaaacacttataaaaccatcagatgtcatgagaattcactcactgtcacaagaacagcatgggagaaaccacccctatgatccaatcacttcccaccaggtttctccctcaacacctggggattacaatttgagatgagatttgggtgggggcacaaaaccaaactctgttacccagttagaaaccggccagtcagcatgtagtccctctggagctcacaattgcagatcatggtatgatggagttctccactgcacggtaggctctggggcttaggcaggcatatggggcagcagtcaacataggggatggtgggagtgaggtgctctacagcagtggtcctcgacttttttagcaccagggaccagtttcatggaaaacaatgtttccatgggcttagggggtgggagatggtttcaggatgcttcaagtgcattacatttattgtgcactttattttgataattattatgttgtaatatataatgaaataattatacaactcactataatgtggaatcagtgggagccctgagcttgttttcctgcaattagatggtcccatctggaggtgatgggagacagtgacagatcatcaggcattagattctcataaagagcacacaacttagatccctcacatgtgcagttcacaatagggtttgcactgccatgagaatctaatgccactactgatctgactggaggcagaacagagctcaggcagtaatgcaagtgatagggaatggctgtaaatacagatgaagcttagctcgctcatctaccgctcacctcctgctgtgtgacccggtccatggcctgagggttggggacccatgctctacagcactgttatggcatgttccagactcttgagaatcggtccttccttgcatctcacctcaccttcaactttattgttcacttttagttcaacctttgccagcaggtaaagaggtaaagagaacaatgtgtcctgtgaagtatttatgagagaagcagataaatcattagatttattgagaacttttgaagtgcactaggcatctcacacacattacttcattgaatcacctccataatcctatgtggttgataattatattatccccacattctggatgaagaaagtggagctcagagaggttatcatgacatacatactgctcacaaaaccattctgtggcagaagtagattcaacagctcaaaaataaaagagggctgggcacagcagctcacacctgtaatcctagcacttttggaggctaaagtgggtggattgcttgatcccaggagtttgagaccagcctgggcaacatagtgagaccctgtttctaccaaaaaatgcaaaaaacaaaaattaggcaggcgtgatggcatgcacctgtagtatagcttcttgggaggctgaggttggaggattgattaagcctggaaggttgaggctgcagtgagcagtgattgtaccactgcactccagcctggatgacagggcaagaccctgtctcaaaataattaaaaaaaaaaaaagtaaaagagaacatgatgatttatggggaaattgacactaaaaatgtcttggatgaaataaagtgacccaggcatcaggatttaggggcttacatgggataacactgttctactccatagcacctcacctgtctaattagtgtctaattagagacatttttaatcagataagtgcatttatgaacattgcaatttttcccaaagtttaaccatcagtttctctgaaaggacttctaaagcctagaaactcacctcttgttaatagtgctgctcttcctcttaaggattctgcccaggagttcaacaccagcctgggcaacataggtagaactttgtaaagtggaataatgctattctaataacttatttagcaaacatttactgagcaattaccctgggtcaggcctccttgcaaggttctggggacatagacatgagggaattctcacccttgaggccatcacagtcagctagggaagaaaagaagtaaacagatcattataaaaccctgagataagtgctactgtgaaggtatgtaactctgtcccctgggtgctttggaagtgtgagagcttgggacattgtagcaggatgttggtagctccatcagatctggagtcttttccaccttgaacttgagatcagcctaaagccaaacacttgacttttaaatgatttgattttaacagaatcaactttttattatgcaaactcaaaagatgtattctgtagagttttactgagccttttttccctttaaaataactaactatatgttttgacatgcttcaggggactttttttgtaaaatagcacaaataggacaatactggaatacatcagtgtgctgtgaagcctgaatgagtaatacacaagtgactgcactttcaaaaatgtaaagaaaagtaacatgctaaaaatcataaactacaaagaggcggcatagcttggtgagacaagcgttgacttgtgaacaggaaaaaaaggatccctgctggctattctgctgagtgaccccaggaggtccctgttcctcttgggacctcagtttcctggttggtggaatgggtattggatgagaatctcaatctgaagatctgcattccctttcaagtcgctaaaatcctggacttctacgataatgctgcatccttctgaggttccaaacaacaatatgcagtaggggccccttttgcttccttccttgcatgtatccaggcagtctcctgagagcatccagcattggggaggaatggggtgtattgaagggaaaagcaggtgccccattgggaatgggacactcccgccccccgccctacctccttctttcaacttgacttccttttttttttttttttgagacaaagtctcattctgttgcccaggctggagtgcagaggcgcgatctgggctcactgcaacctccacctcccaggttcaagcgattctcctgcctcagtctcttgagtagctgggattacaggcatgcactattatgcccagctaattttgtatttttttagtagagactggctttcaccatgttggccaggctggtcttgaactcctgacctcaggtgatccacctgcctcagcctcccaaagtgctgggattacaggcataagccaccgcacccggcctcaacttgactccctttcttgtcactgtttctagatggtcaactagatcaatactcagatcagctcttctttcagaggaacaaatgagaactttcctcttgttctccatctcctccttctcctaatgcacacacatgtgcatacacacactccactgccatcactagagagaaggaattaggtccaaacctctgttcgcactcagagtcttaaagtgacagctttacgtttacaagttaggcattaaatggaattccattctccctgtcaagtttcagacaggggaaagcccagaattccaatagtgatggtgttcttggcaagcgctttttacagggtggtaagctaatcagtctgcagttcggcagtctgaaggcttgagctttcatctgacttggaatatataaagggcttggcattgcagcttccaaccctatgacttagctttgagcttcgcatcttcccatcaacttcgtagctctctccatcaaccaagtacccactacaatcaaggagaaaggatatggcagattaattgaatctttgtgtctttttagcacctgtgggctatggacttcttgaaattggagttacttttattcctttgaattgagcccaataccccgcttcagtcagggtgcttttaccttcccagaatcctcttgctaaggacaagcaggcaggctaatcggggactactgaagttttctggctcaaagaacataatgcagtgtgtttacaaatccacctcttcgccttcaccctaaattttcctttcctttatatgattttagcactttgggtttacattaagctctcagttacttaaagtaggctgaagaaaataagaagtgtagtagtgcttcactccccagtgatgaaatagggggtaattggctccaaaaatcgttgcatgtcttgtccctttcagggactttaactgctctgttgcccttgctccatggattggggctgcatcagtagcctaatgtgaggggaatggttgaaagtaattgtcagagcccagagctccacttgccatggaaagcctattgactttaatagtgaccatctggctgggcacctctgaagatgtctcagttaaggcctatttggtgaatggacctttgcttatttgaaagctacactgctgttccaacctgatcattgcattttatgtgatgggcactggaagtccaaatgaaagtttcttagaaaacactcccattaaatttaccagtccatgtgtgattgccactttcagtgcagtcagagcacagtcattctctttttattgaaagcatatggtaggtacttagagcataccctaggccagactcagttatggtgccatcaagggcagcaagaattaaaaagaggaaaatggtatccaggtggcagtaggaattcggtaggttggatggaaaatattcatagttaacgagctttcataaggagaacagaaacaagttagatgtgatttgcagatccataggcaatcagtctctgctgagcagaggggaaacttggagaagattctcagaagtgtgcctcacccttgacccaaacctttccctgaacatgtgcaataaatattattaagctttgagaatttctttaaaataatatctgtcaatggtaagtgccacatgccaggccctatgctaccagcatcatctcatatcatcctcacatgtatcctgtgaggtggaggatactatcccaatgttacagatgagaaaactgagacttaaacattaagttgttcaaggtcatacagctaagaagtcacagagctgctttgattaaagttctgtctgaggctgggtgcggtagtgcatgcctgtaatccaagcactttgggaggccaaggtgggcggattgcttgagccctggagtttgagaccagcctgggcaacatggcaaaaccctgtccctaccaaaaaattacaaaagttagccaggcatagtggtgcacacctgtagtccaagctacttgggaggctgaggtgggagaattacctgagcctggggagcttgaggctgaagtgagccaagactataccactgcactccagcctgagggacacagtgaaactctgtttcataaaaaaaaaggtctctgtgacttcaaggcctttgttctctatactattaggaagtccagtaagtgaagaaaagtacatgtaaatttcactaaaggatcacagcttcttgtacggaagggctttgagcacgtcggctgtggctcctgtgcagccagccagatctgcctaagcagctctgggagtagggccacacaggaatctgtcacagggaggattccacattccttcagcccctatcagcacagtcaaagaatggtaagaagaatgcagagggtggctttgaaatactcacagccttccatggataaaccatggagacattacactcatttgatagaagccagacacaaaaggccatattattgtatgattccatttatatgaaatatcagaataggcaaatccatagaaacagaaagcagattcgtggttggtaggtgatgggggaaagacttcagcaccatccccttccctctcagtctcagtgaagtggaaggaaggagtagtctcagctagggaaaagaggggaaaagctgaagacgacagatttctatgtctcccagtttaattacctttccc

SEQ ID NO: 97493 - DNA, 45266 bp, Homo sapiens
tgatggaattcaatttttgttaattttacattctcgttaaatgttctattttttctttgctttcatagaggtaattttaatgtcttcctgtttgaaagcttagttttaataatcagaatttgctaaaacttaaaaagctgaagtcttttgatgctccaatgttttaattaaattttgcaactgattttgaacaaaattaaacccaaatagagagtactagtttgcaaaatttcaataccattgtaaaacacttagattggttcacaaaataattattaaaaggctcattttaaaaatcttattgatatttgagaacaaagagaaagtacatactgtaatgctaaagtttttggttgctgtattcaatatcagctttattttttttgatcttgctccgtcacccaggctgtagtgcactggtgcgatctcagctcactgtaacctctgcctcccaggttcaagcaattctcgtgcctcagcctcccaagtagctaggactacaggcatgtgtcaccatgcctggctaatttttgtatttttagtagagatgggatttcaccgtgttgcctagtctggtctcgaactcctggcctcaggtgatcctccagcctcggctgggattataggcatgactcactgcacctggcccaatatcaactttataacaatagttttttttttttttgagattaagtctgactctatcgcccaggctggagtgcaatggcgcgatctcgatgcactgcaacctccacctccctggttcaagtgattctcctgcctctgcctcccgataacaaaagttgtgtagtcagtttttctgaatggatagatagagagagagatggatagatagataggtggacagataaatacagatatttatcttttataactacaataaaaaaatagaaatagagacagtgtctcactatgttgctcacattggtttcaaacttctaagctgaagtgatcctcctgccttggcctcccaaagtgctaggattacaggcatgagccaccacacccagacataaccacaattttttgataactacatatttctattggcagaatatagcaacttgtttgtacacaattatcaattatgtatgtattgcaaccaattccaagtgcgtttatgcctcataagtttcttaatttggtagccaccgttttttccttagtggtatgcttcttttagatagacacacacacatacatatgcatatattattaaagtcaagtttattaatgtaaaatttacacccagtaaaaatcatcccttttaggtacacagttatatgagatattataaatgtatgtagttatgtaatgcccatcactttgaagatttggaatattttcaccactgctaaagtacttgaatcagaatatgtgtagctattttattcataatagctagaaactggatccaacccacatgtccattagtaggtaaatggataaacaaactgtagtgtgacatagtctttcaaagtaacactattcagaaataaaagggaattatggatgcacgtctcaatatggatgaatcacaaaaaaattttgctgaacaaaagaccagacacaaaagagtacatattatatgattatacattgtctagaaaaggtgcagttgatgaagtcaacaactctaaattaaataattaaatgcagccctcaaaaagagaaatgttatgaaaaatatgttaaaacaccatgttagtaaaaaacatattcttcacaaaagcaccagtcacactatataagagacagagggctgagcacagtggctcatgcctgtaatctcagcactttgggagaccgaggtaggtaatcacttgaggtcaggagttcccgaccagcctggccaacatagtgaaactccatctctactaaaaatataaaaattagctgaatatggtggcacatgcctgtagtctcagctacgatcttgtattcaataataaaggcaagttaattgcataagtgcaaaagggctataccaggccgggcacaatggctcacacctgtaatctcagacttgggaggccgaggcgagaggataacctgaggtcaggagttcgagaccagcctaaccaacaaggcaaaaccccatctctactaaaaaacacaaaaattagccaggcgtggtggcaggtgcctataatcccagctactcaggaggccgcggctgtgaggctagagagttgcttgaacccgggaggcaaaggttgcaatgaaccgagtacatgccactgcactccagccagggtgactgagcaagactccatcaaaaaaaagggggaggctataccgttgactcttgaaaagtgtgagttggtgcattgaccccacttgcagttgaaaatccatgtataactcccctgaaactgaactactagtagcctactgttggccagaagccttattgataacataaacagttaattaacacattttttgcatgttatatgtattatacaatgtattcttacaataaagtaagatagagaaaaaaatgaagaaaatcataagaaagagaaaatatgtttactatgtataatattaagtagaagttgatcatcattaaagtcttcaacttggttgtgttcacattgagtaaggagtaggtggaagaggaggggttggtcttgctgtcttagaggtggcagaagtggaagaaaatccatatataattggacctgggaagtttaagcctatgttgctcaatcgtataatgtaaaaacacataatttgtagcaatagacactttcattcctaagattttttagatctgtcataatttgctgataggaatgaaattttctaattttaaatatttttctaatctttcttacattccacttccacataattgtgactacagagttatatcttactgttccattgcatttgtccagaataaaatttcaaattaatttcccccatagctacatgtgaaacggaggtaaattaatagcactgaatcaacacacaaatagtagcacttaagatgaaggaggcaaagataaattctactgtgtcacctggtatggattaaggaataagatttatctgagaaataaaaaatgaagggtcaggctgggcatggtggctcatgcctgtaatcccagcattttgggaggccaaggcagccagatcacttgaggtcaggagttcgagaccagcctggccaacatggtgaaaccgcatctctactaaaaatacaaaaaaattagccgggcgtggtggtgcacacctgtagtgccagttacttgggaggctgaggcaggagaatgacttgagcctaggaggcagaggttgcagtgagccaagatcacaccactgtaccccaggctggacaacagatcaagactgtcaaaaaaaaaagaaggatcagcaaaaagagacatatataaactttaggccccagaaaatcctagatccactccttcctgaagatcttggggcccatgggaaattgtaaccttcctgctagggaataagaaaccaccagcttgtggatagctaagttcattgcatccctatccactgggagagggagctgttaattgtctgagaagcctacagtgagttctctgggtcacttttggacaattcttgaagtgcaatactgaaaaatgaaaaaaaaaaacaaaccctctctctttagcagtgtattacttaaaatgcttaaacactcaaattaaattttagaattgtaaattttagctattaaattaaatagaaaaacaaggccaaagaacacacacacacacatacacacacacacacacacacacacacacacacacacacgatagtattgtattccttttcaatgaaagctgttgtcaaaggcatttgaaccagagtgactccatcttgaataagggctgggtaacatgaggctgagacctactgggcagcattcccaggttaggcattcttagtcaataggatatgtacagttaaggaaacaagttaataatgtttaccgaacagactcaggacttaacagacacagaaaataacaaacttgggaaatgtcctgagtcccatatcttaagaacaaaagcattcttagtttaatatattactgcagaagacagtagttacacaaagattaacaatccgttgttacacgcccttgtaggacagcacatctccccattggtgtgttccccatttttttctttttatattatatataaacaagcctctacctaaggtggatgtgttcctcctcttgctttgtctgctcttgaatgccctgctctgtctatgtagtaaccattcttactattcctttacttcttaataaactcactttcactttactctggactcgccctgaattctctcttgtgtgagatccaagaacactctcttagggtctggatcgagatcccttttcggtaacactgcactgttacttaacactgatgagcttgattcgtttttgtcaaggacaatattttgatgttcttgagaatgacttagggaaatattacttgaggttattaaattcatatttgatttattaatgttacaaattcaaaaacctattccttcttaagcttttaagttatgaatcaaattattaatttataaatctgacaaattttaacagttacttttatgaggactttgatttacatttggtttcatttacaattttagttaaatgtttaaattgtccatttgacaaaatttcccaagaatgtatatgacttataaatctggcaaattaaatatgtatacatattaatattgaatctcaacttattttaggggttaaaataccgtttataaaattaataacattgccttatacctttcaacttgaaattgcaagtctgaataaatgagacattttatattggaatcataaaagtaatctgtaagatattaaatataccaaacttcttaaaacataaaatggtaaaatatatcaacaacaaacaacttattctcaaacctactgcaaaaatattaatactatgatttttgtctgcttcatcatcttactatttctttttttttttttttgagatggagtctcactctgtcgccaggctggagtgcagtggcacgatctcagctcactgcaacctctgcctcccaggttcaaacaattctcctgcctaaggctcccaagtggctgggactataggcgagcaccaccacgcgaagctaatttttgtatttttagtagagacgagttttcatcatgttggccaggatggtctagatctcttgacctcatgatccgctcaccttggcctcccaaagtgctgggattacaggcttgagccactgccctcgacctttactatgtaattcttaatagaattatgctatattttgtcatggaaggactataatttctgtgtatattaaaatgatattctagtgaatatatttgttagaatttggtctatgacttacgtttattataagataccacttaacaatacactgatatcaaggcttttggaaatttggggagggaggtggaccccaactacatttaattactagaagctaccaatatttacaaaaatattatgaaaattgttaactggtaaaattaagttttcttgcaacgctaacgtctcttagctcctatcacagtgtctggcacatcatagattttcaataaatagctgttggataaatcatgcttaaatcagtttctacagattacaagcttgataatttttctgctactgcatactctgggttccccttttctagtttccaataattgcctcattgcctctccagcctcctctaatgctgtttttgctatttctccagtctttatttacacaatcctcacagcttttccagcctcctccaacagtctccttgcatccttccattctctgtccaccagctagtccaaaagccattgctgtgtatttttaagtttttgttatgactgaactccacacccagtagcaatttctgtctgttttctgttgcagaagatcaaactctcccaaaaagtagagattaaacaacaactaaagatggcgaatcatagaaggtaatcaaatcacacaatggctattattcatcgttcttttgattccaatgtatttcattttatgcattaaaagttattctgggagtccgtacacttaactagagggccaacggagtccacagcacaaaaatgactaaggattattattttttttttgagacggagtttcgttcttgttgcccaggctggagtgcaatggcgcgatctcggctcacygcaacctccgcctcccaggttcaagcaattctcctgcctcagcctcccgagtagctgggattacaggcatgcaccaccacgcctggctaattttgtatttttagtagagaccatgttgaggctggtcacgaactcctgacctcaggtgatccgcctgctttggcctcccaaagtgctgggattacaggcgtgagccactgtgcccggccaaaaatgactaagaattcttgacctaggcaatgatgaagagacaggatggaaaaaatcagggccaattaatgaccatgtagagcagaaccagccagaaaacttggtccaataacctcaggattacatatgagaaaactaaatacttacattttaagtcattatttggtggagtatcttttctacaacagtttaccttaagaaatatacaggaagccttgtaaacatagcaataccctgtctctaccaaaaatttgaaaattagctgggcgtggtagcatgcacctgtagtcctaggtaatcaggaggctgaggcaggaggattgcttgagcccagaggtttgaggctgcagtgagctatgatcccaccactgcactccagcctgggtgacagagggagatcctgtctctaaaaaagcctcctgggctcaactgatctacccaccttagtctcatgagtagctgggactacaggtgtgaaccaccacacctggctgatttttatttttttcatagaggcagggtttcaccatgttgcccaggctggtctcgaactcctggcctcaagtgattcacccacctcagcctcccaaagtgctgggattacaggcatgagccactgtacctggcgtaagaaaagttctttaattaaaagaaaaaaagaagtttgctctccattcttagatcatctcagtgtgcttattaagcatccacatacctaaagatacctacagtattggcagaagttcaggacctctttatctggatgttcatttgtaccctttaaaacaaaggaaaaaaagagaagaaattgtatgatgagatctactatttgaacagataataaataggatattctagaattaaaaaatgtcataaatcttgaaaatcatagtgtacactgaagtttaaaataaagtaatctacacttagacccgtcatagtgaaaggaaaaatagattatcttaaaagtaaaaaggccaggccaagtggcttacacctgtaatctcagcactttgggaggccaaggtgggtggatcacctgaggtcgggagttcgagaccagcctgaccaaaatagtgaaaccctgtctctactgaaaatacaaaaaattagctgggcatggtggcgggtgcctgtaatcccagctacttgggaggaggctgaggcaggaaaatcccttgatcctgggaggcggaagtttgcgtgagtcgaggttgcgccatttcactccagcctgggcaacaagagcgaaactctaactcaaaaaaaaaaaaaaaaaaaaaaaaaaagtaaaaarggtattcaatgtagctgaaaaaattttctgtaaatattgatatagaataatctgtaagataatcttttccttaaacttctacaattgtttatttctcctgccatttaatcacatagatatcaaaattgcaaatgtatcatttctctctcgctctctctctctcgcccgagtgcgtgcgtgtttttaactatagagatagggttcccaggctggcctcaaacccctggcctcaagcaattcttctgcctcggtcacccaacgtgttgggactataggtgtgagcctcaatgcctggcctcattttagatttaatagtaaacctatgtcctgtgtatttcttctttttttttttgccggggttgtgggggcgcaggaagacagtctctgtcacccaggctggagtgcagtggtgtgatcatggttcactgcagcctcttgtttctgggctcaagcaatcctcctgccttagcctcctgagtggctaagcctgcaggcacacaccatcacacacagctaattttgaaatttgttgtagagataggatctcactatgttgaccaggctttccatatatttcttaaggtaaactaatgtagaaaagatgtatatttttttcaatcacacatattaatagaacatttacaaaaaaaaaaaaaataagagagcaaagccaaagaaaataggaagaaaaataataaggatagaaaataatgaaagatcatcaaaggagacaataaaaaattaagaaactgatttaatttttaatgaaattttaatcgttaataaaaaagcagtttgtagattactatttttaaaataacaattgtgtaacatttgtaaatatgcaaaatagtactacatagtgttagtatatacatatatggttaaaaaaacaaacatgaatgggaaattaaacatatcagctttaggctggagaaagaggaaggaaaacgatttgggaaggctcaaattctttttttttttttttttttttttttttcagagaaggggtctcactctgtcacccagactggagtgcagtggcaatatctcatttccctgcagcctcttcctcctgggttcaagccattcttgttcctcagcctcctgagtagctgggactacatgtgtgcaccaccatgcctgactaatttttatattttcagtagagatggggtttcaccatgttggccaggctggtctcgaactcctgacttccagtgatctgcctgtctcagcctcccagaatgttgggattacaagcataagccaccatgcccgccggaaggctcaagttccataatgtttcatttcttaggaaaaatggctgaatgataatattggttaaaactgacttatgtgtacatggttagtttttatattattcttgatactcctctacatgttctcattatttcattttttaaaagtttaagacgtttgtctcatgtgactaaagcaaaatgtttgatttagagagggtaatagtggctcctacagagaccataaagccacagttaattatacactagttctaatattgacatttgttttcagttacctctttagcttcattcattaccataccaaaagggtgtgtcttcagagtttgtatccttgggaaccgcatggttgctaggtcgaccaataacagctctaagattcgcatgctgttgtccatgactgttactaagctaaacagagccaaaagaggtaggagaagaactcatatgttctcagaaaattattagcatttcagtctaatgttcagcttacatgtggaacaccacattaaccccttggaagagttcagaaagatccagaatgttgtcactgctttcaaataaattccaactcaaattttagtttatatacttaaaatatagccataggggagtatatgaaaatgagtggtaaatataacaagaattcagaagcagaaaaacatctctgtggagtgagatggctggtgagatttcaagaggaaaatagaacttgaggtgggaaatcaagggtgagaaccattcagataagaaggtggccaggcacggtggctcatgcctattatcccagcactttgggaggccaaggcgggcagatcaccaggtcaagagatcaacgtggtgaaaccccgcctgtactaaaaatacaaaagttagttgggagtggtggtgcgcacctgtagtcccagctactcgagtggctgaaacaggagaatcctttgaacctgggaggcagaggttgcagtgagccaagatcgcctcactgcactccagcctggtgacagagtgagactccgtctcaaaaaaaaaaaaaaaaaaggtaagggtaaacaaagtcaggatttaggatgaggaagtctggccatggagctgacagtatgacagtatgggatttgaatgcctgttgctttattcacttctactaactccaaattattatttttttaagtgcaaacaacactattttacacataggtaattttcctaagaagtagaagtatggcatacagagaataatttagagctaaatttccatgaaatggaaggttagggaggggaaaatccaatgtgaggtgacaattgtgttttgttcttgggaaggataaaattttttttcttttgtagagacaaggtctcctatgttgtacaggctggtcttgaactcctgggctcaagcaatctaccctcctcagcctcctgaagtgctaggattacaggcatgaacccccatgctcggcctcaactaactctttatgtggaaaaaagtacaaatatatttattatttaactctttacgtggaaaaaagtatatttattattctacttgcttctatattattttattatttgagtgccaagggttggggttacctgttcagataacacctttctctatattaatctcaggagacatgctgcctgtccctaccactggctcttggatgaataaagcctacattctctagctcagtagtattctctaatttcacatctcagagaaagagggagtagtgtatcccagagaaaatatttaggatttttttcccttcccagaaggccctgggttcctcatgcaaattgatctacctttgtgccagtagtcagcctcacattcccagaatcacagtgagtgactgactcaatggagtcatagaagatatttgctataccctcattacagggcaaagaaccctgcttgtcttacatttgcataaagaattgggccactctagtgactcttcaagaaataaataataggcygggcgcagtggctcatgcctgtaatcccaacactttggaaggccaaggtgggaggattgctggagcttgggagtttgagaccatcctgggcaacataatgagaccctgtctctacaaaaaaattaaaaaattagtcggcgtggtggtgcgaacctgtggtctcagctactcaggaggctgaggtgggatgatcacttgaacccaggaagttgtggctgcagtgggccatgattgcaccactgcagtccagcttgggcgatagattgagacactgccaaaaaaaaaaaaaaaaaaaaaaggaaaaataataataagcttcttttaatcaatattttaaaatgtcttaccctgctattcatatatgtccatgatactgccttggcaatcaaaacatgttagttcttttcccttctctctttagttaccaccattcctggtattggtcccagttcttctaagaatatttttgatgcaagagctgttttatcttgaatcctacatagcttattttccatttttccattcaaataaaacaacaagagaacaatagagtgaagaaaaaggatgtttaagcctaaatccaagactgaggtacaagaccaagaaaagtggggcagaagatggaaaagaacaagtgaagaatcttggaaacaattcaaaggcacgttggattctttgcttgtaataagaagtgcaagttggtgttacttcttaagatctaatgttaaaatttcttgaatctgatctttatcgtatgcatattttttcatccttggatagttagactttttttatatgtcaagaactcatctatattttttcatctatatttattctacataaatcgataaatcaagatgtaatataaaaataatgttgttgatagaaaactttagttttagaaactttatttttaaaaacagctcaaaattgccttcatcatattactgatttaaatattacaaaaaatattaaacatttacaaaagtattacagaaagactagcataatgaaacctcatacatgtaccacccagatttgaaaattattggaattttgtcatatgggctttagctacccttattttctttctttttgttgctaaagtattttaaagcccctccaggacctcatgtgactttatcctacatacttgtaattctactgatttttaattaaattattgattaagtagttaacagaaaacaggatattacaggaagcatctagtggggtgcagagtctagcaattaatcttttctcatttaatcaaagacagcagcagggctctagtaaaatcaattatgtttagaaatggaaatttttaaaaattcaaaaacaaggaagcattttaagtattcttacagcctttacttctgttttccttcctcttgacatattccccattaacaactggctacttcttatctcttttgcccctcagtgtaaccaggatttatgtaaatcatacgtcttaactcagcaagaaattggcagggtcctaagacatagttccaagtaaattttatttttatagtaaaatcctggcccttctgtctgggagacctttctagtcctttacatgtcagcactaccacttatgctaatattataattgtgtatttatcagtattttaacataatttttcttagttttacctgaaaaaggagactaagaaataaaatgcccaatgctgatgaaggtatatattgtggatattttaatgtatttctggtgggagtatatatatttgaatcaaaaccagtttgacaataatacttgagtaccaagtttcaatatttggtatcttaaattttgttaacttgtttataactaaacaggataaaaaattattaatgcggagatgaccttccctctaccagacagaatgctgactttgtgtgtttcattccagcctctgcctcctttcccccagagaaggctcatcttctgccaggctgtagtgatggacttttgagatgcagaattcaaaattgggaaggggtgaaggtggggagagaaaagctaaattgatctgggataacttaaaaaaaataactgatagagggggatagagagaaagaaagcagctgagaaaaggggaaaggggaatattggattgtggtttataagtaagaggctccagaataatgtggggttgcagagaattgaaaagaagaggaaaatgtgggaaatgttactgaggtatatgaatggaatttattcacaattttagaagagagccaagtaaattattacaagtccttttaaaaatgttttgcctatgtatactcaggctggagttcagtgatgtgatcatagctcactgcagcttccaactcctgggttcaagcaatctttctgccttagccccctgctgacacacattctttgacaacatcctttttttttggagacggagtctcggtcttgctctgtcgcccaggccggagtgcagtgggggcgatcttggcccactgtaaccttcacctcccagggtcaagtgattctcctgcctcagcgtcctgagcagctgtgactacaggcgcacatcaccacgcccagctaattttttgtattttagtagagacggggtttcaccgtgttgcccaggatggtctcgaactcctgagctcaggcaatctgcccgcctcggcctcccaaagtgctaggattacaggtgtgagccagcgcacccagctgacaacatctttttgatggcaacataacattctattcattgaacgtactgcagttaatgtactattcctctataattggatttatattatttcaaattttctactatttaaaaaacactgtgatgaatatacttatgctcacagcttcttaagttttttttcactaggatagattcacagaagtagaattatgatgcggaagttataaatgttttattttgtcaaattattgtttgttgaaatgtatcaacgtacataatcctatcaaaaagatatgacaatatccatcatatgtaccatcaacattgactattttgtatcttagggtcttttttatgtaattttttttcatgtttgatatatttaccagagcatacattggataaaccttcctattctcttaggaaaccagtgactcatcttaaatttactttccacttacttcttgaaaaaaatctttaacagatcatcccttatgtttttaccaagctctctctcttttctatcttctttcctttctgcctatcttcctgctttaccttcctgctttatttctttcctctcattttttggtaaagttgttttgtatttgttttggaataaacttaaaaagaataaaaacaagctctaccctgataatgataatcttgagcacttttagcaatgcaaagagaactcattgactcacaaagtctccctgccccatttcatgtatcttatttgtgcctggcagcaatacaaaaataagatccaatctgttctgtacaaaatgcccttcaaatatctgaagatagctgcctaagtagtctcttctctatgctaaagtgtcatagtgattttaacctttccacaagcaacagcatttttgaatgcttcactaacctgctcaagtttctctggacacactcttaactttctcggaacagcaggatctcagctgtggcattatatatcattcgtacaactacaactgaaaataattgtccattgtagaggaaatgccctttaggaatggattcacacaattacctaatattgctcagttttagtaagcagttcttctttccttgaagagaactacgtactgaatcatggttttctttcatatagtgcttgtgaaaattaatgatatttgggccaggcgcggtggctcatgcctgtaattccaacacttcgggaggctcaggcgggcggatcacctaaggccaagagtttgagaccagcctggccaacatggtgaaaccccgtctctactaaaaatacaaaaaaaaaaaaaaaattagctaggcacggtggtgcattcctgtaattccagctacttgggaggctgaggcaggagaatcacttgaacctaggaggcagaggttgcagtgagctgagactgtgccactgcactccagcgtgggtaacaagggtgaaaccccactttgataaaataaaaaataataaaaaataaagaaagaaaattaatgatatatatatttttttattattatactttaagttttagggtacatgtgcacattgtgcaggttagttacatatgtatacatgtgccatgctggtgcgctgcacaattaatgatatttataaagtaaaacactggctggtataatgttcaataaatgttaattatatattagtaattaattttttttggcagttatccgagtatctgtttaccccttggtctatggatatagattaagaagaatagaaggatggaattgaaatgaaataataaccaaaaaaatgaaaaatattgcaatgacaaaccaggtggacctttctgagggtgtggggttggccttgtctttcttccgtgaatggaatcttgactcccgtatttttagaaaaagaaataaatattttttaagggtatatttcttagttattatttctctccttgctaaatggaggcaatattttaaaaacctcaatagcaccactggtgggaaaaactaactgggatgctgtttaaccgaaggtggaaagagaggagaccaagggttggacattgttgttttgccactgagggccccgagctctcctaggccttttaatcatatcaagtaggatattctagaatcggccagcagctggggctctggaagtcagagatcagagccagggaaggctctgggctcccaaacctgagcctttcctcctagccgcagcctcttaccaagggccagccccagacatctttcccacctgacctgttctccatacagaattcccaaagggttactggccaggaggcacagatacaggttagattttctggttatattcctccacaccctcattaaaagtcttattctgttgtatttattttagtgacattataaattaataacaggccgggcacagtggctcacgcctgtaatcccagcactttgggaggctgaggtgggtgaatcacttgagggcaggagtttgagaccagcttgaccaacatggtgaaaccttgtctcttctaaaaacacaaaaattagccaggcgtgatggtgcatggctgtggtcccagctactcaggaagcttgaggcaagagaataactttaacccaggaggcagaggttgcagtgagccaagatcacaccaccgccctctagcctgggtgacagagtgagaccctgtctcaaaaaaaattaaaaaaaaarttaataacaattctataaatatttgatttgaactgaattcagtgaaaccattacttttcttgatcgagatgtttgttttagtgcaaactaaggatttgttttaaattacaatcattactaaataacagaaataacatttttctgtactcttatcatctgtgtatagaaaagatagtaatgtatcaaaaagaaagaaaatgctttgattcctgtaatgactgcttcctggaaagcagcctcatgtggaacctcttagtctcagcatccggagctctagaaaaggaaaatttcaagtctgatagaattctatgtatatcatttctttggaaccttcagccctcaagatttcaacagcatggcctcagtttcaacatagttatccttagttctcatgtcacagttttgatgctgcctgttgttgaagcagaagaagccagtgatgtaatcgatctcttgtcaggtgtggttctcagcattacaggcatttgtgcttacttgcaggtatttgcactagaaagatatggacacatgtgactttgaagggcctactgaatcaaacctcagcctgaaaacctttgtgctattgaggctaaacctgagctttggtgtctgaaagttttcaagaatcagtaaataggggagttttacattcttcattgtttccatgaaatgagaacaaacagatatatgtatatatatggaaaaagaagagttctttacaacaaataatgcactgaaaaatgcagcctatgatttgtatttgctggtcaaaaaggaggtcaaagaagtaagatggctgaaattttcataatagttcatacttttagaatttcaaagcacataaaatagaaagaaggaagttcttgcccaaaattctaggaaatcaccactgttcacttgtaatcactgcgtcctgaatcatttcagagtcttttctccatatttttattaaatttttgttttgttatctcccaagttgatattgtatttagatatcaaatagtcagccaaaaaggggaactttttatctctgggggaaaaaaaattagaaaaatgtgttcagtgtatctaatactgaaatgcagaaaagatttaaagacattgacatggaaaagagagttaatgtttaaaaaaaactttatattaactgagtaacatcctcctgatgagaagtagtatattaaatataaacccattatgttaaaaaaataaaatcctttaattaccgtttagtttaagtactctttaattgtaagacaattagttcaggctcttttttggtagattaatttacgtgctaggaaacaaaagatgaacaagacaaacataaatgtctagattgttgctaaactgagttttcacttagaactacttctgaaaatatttcatcttcatttgaagaaattgtatctttatatcagacactttttttttttttttgagatggagtcttgctctgttgcctaggctggagtgcagtggcgagatctcagctcactgcaacttccacctccttggttcaaccaattctcctgcctcagcctcccaagcatgtgcctgggattacaggcacatgccactacacccggctaatttttttgtatttttagtagagacagggtttcaccatgttggccagactggtctcgaactcctgacctcaggcgatcagccccccttagtctcccaaagtgctgggattacaggcatgagtcactgcacccggccttatatcagaccctttactcaagtctacagatatgaaaatacctgtagcgaggcttgtaaaactaggataatagccaaattaataccgatgtcactctagtttagaatttaaaaggtatatcattccatataagaatataaaccaaacaatattaagtttgctttttaaatagaatcttttaaaaaaattaatcactgtattactatatttacctcttagaagaatatttccttgcatgcatttgagtatgtgctaagtagaaaattccattgttttgagaaataatgcacaaagacttgcaaagttgaaatgaggactttacaactgtgtctgcaccatatttgaagttaaaaaagaaacacaccaagcaaaaaatttgaggcagtgtctcagtgaattaagacagctcacacacagtagagtatctattttaataacagcataaaagtgtgaaagatttccctgttgcaaaaacatttattagtctatttagttatttcagaatcatcctgcactttgcttagtaagacaaacagttaatgagttacttgaggaagctaaacactcgtgtagaattgcaagccttaggtcgtattccaccagccagctcactatcatgttactgggaaattaagatctcttagaactgttctttgacttcatagtaataaatgcatcacagcctgaagtaaacagagtgatctttaaaaagccaacaatttagatgtttttcataatttttaatacctatgttagagtcagcaatttggtgagcaataaagtcaattatcagctctgccagtaaatctcctgtaaccttatgagaaaaggtcatactaacctagtacattgagcacctcatgctcatgaacatcaatgactttcccaaaatattctagttattcaaaacttaatttcaactctaatgataagaaatacagccatgccccacataacaatgtttggtcaatgacagattgcatatatgatagtggtcccataagattattattccttttaaaaattgtacctttttcatatttagatgcacaaatacctgccattgtgttacaactgcctacatatccagtacaaaaacatgctgttcaggtttgtagcctaggagcattaagctataccatacagcctaggtgtatggtaggatagaccatggaggtttgtgtctatgatgtttgcacagttgtgaaatcacctaccagtgaatttctcagaatatatccgattgttaagcaacgcatgactctatatatgacttattcattaaataactcagtcacttattaactgactactacacgtcaggcattataccaggtagggaatacaaaaacaaataagatatcttcttatttttgaagaacacgtatctagtaatgggaaaaaaataaacagataattataatacaatgtgatatagaagtacattatttataacattcctagaggtggcatttgtactgatctggaaataaaagtataagtttttgtcaagcagcaaactgaaggagggacatccttcagatatcctgctgtctttgttataaattattaagcacaattcacaagtgatatttctagcatgataaaatttaatgaaaatataaaaattttattacactacgtattcattacattgtttttaatgttaatatcaggtgatttacatgtattgtaaattattttcttcttaagtatcgtatgtcataagtaacattaattctttcttggttttaaggttcttaaactctttaatggctctaaatttttccagatgtgatcgagtacactcaggtggtatggccatggactctaaaagtttttaaaagtcttcaaaacttttatgcaaaatatgcataatgagcttaataagcaacttttctaccttagggtataaaggtaaaacttttttctaagtgacttcaactctgttttatcaaatccccctgactcatctcttaatgatacctcaggaaaatcccatagattttcagtcacattcagttatttaaaattcagccyagtttgatgtactttttatttttttattttttttttaattttctgagacagagttttgctcttattgcccaggctggagtgcagtggcgcgatctcggctcactgtaacctccacctcccaggttcaagtgattctcctgcctcagcctcctgggtagctgggattacagatgcccaccaccatgccagctaattttttgtatttttagtagagacgaggtttcactatgttgaccaggctggtcttgaactcctgacctcaggtgatccacccatctcggcctctgaaagtgctgggattacaggggcgtgagccactgtgcccagtgcctagttttacctacttctgtgcacgagtgtcccttccccatcaatgttagccagcttgtggtccgaggaacttgaaawgggaagggaaactccttccttcactcctagttagagctcttcacagataaatatggtggagtctccttcagcacaggtataatgaactatagactatgaacttcattatttgtttatgggaagtcaatgaagccattaagacttttatctaccattatcaaccaaggctttcagtgatgtatgtcttgtgcgaactcagaatataacatttcacaattcgtaggatgtggtagccgctttataaccatacaatactgttcattcaagaaagatttattactttgtgtcagacactgtgtgatgtaagtcaaatgatagmacacacacacacacacacaaatagatttcatttggatgtatcacattttaaaaaggtgaaaacatggtgctagttagtgaaaacaaaatattttatttttattgatgcaaaattaatttaagtgatctaactctctaaatatctgaaggtccccactggtattaatagttcagattgacataaactgaccaatactattaataaaaggaaacgtgtactgagtaggtactctgtgcttttgtgttaagtgatttatacattgtatttaatctagttaataatctgatgagctagttagtaatattattcatattttacaatgtgaaaactgagtgtgagtgatcattacaccagcttaactttacctacctgctaagccagccttaaactcccattcaaaagccagctaagcaagcccaattggctgactggatccatggtgtttgtatagataacaatacacttaaaaattggttaaaagggtaaatttcatgttctgtgctttttaaccacagtctatataataaataaataaataaataaataaataaataaataaataaatgttgtatgacaataatatgtagccaacaaaattatgctttctgtgaattttagtgacatgaaaaaatgcatataatgtgaatgaagaaagcattatacaaaacctgatatacaatatgataaaaatgatgtaagatatacatgtgtgtaaaattatatataagtaaatccataaattcatatgtattttatgtttgtatgttacatatagcaaataaatatgtgtaaatgtatatatacatatatagatatatttttcttttttgagaaggagacttgctctgttgcccagtctggagtgcagtggcacaatctcagcacactgcaacttccacctcctgtgttcaagtgattctcctgcctcagcctcctgagtatctgggattacaggtatgtgccaccacggccaagtaaataaatattttgaaaaaaattgttcaaaccttaatattcctggttattagttttcacatattgattatctgacttttttctctcaaattctttatatctaaatacgttttaaacaatgatgttagccttatgctgatttttgtggtcttgaaaggagttaagaagtgaatatccagtttccttagcattccaagaagctgtccaggaagcccatttcagtctcacctcatggggatccctgaatgtaaatagaaaggattcaaagcatactactacagaaaatcatgaaaccacaaagtaagacagcaagagaggaagaaagaaatacagtctctacaaacaaccagaaaataaattaaaaaatggcattagtaagctgttatctatcaataattactttgaatgttgccacggtttgactgtgccacctgaagttcatatgttggaaacttgacctccaacgtggaggtgttgggaggtgcaggcctatagggaggtatttgggtcatagggctctgtcctaatgaatgagttaatgccattgtcacaggagtgagttccttataaaaggatgagtttggcatcctcttgttctttctatcatccatgtgatgccttctactgtgttaggatgcaagtaggcctttatcagatgccgatcccttgatcttggacttcccagcctccagaaccatgagccaatacatttctgttcattataaattacatagtctgtggtattctgttatagcagtgcaaaataaactaagacaaatgtaagtggattacattctccaataaaagacagagtagttgaatggattaaaaaaaaacaggacccaactatatactgcctagaagagactcacttcacttttcaggacacaaatagactgacagtaaagagatggaaaaagatattccatgcaaatggaaaccaaaagacaacaggggtagctatatttatatcagataaaacagactttaaatttaaaaaactgtaaaaagagacaaagaaggtcattatataattataaaggggccaattcatcaagagaatataacaattgtaaatctatattcacccaacattggagtccctaaatatataaagcaaacatttaaaaatctgaaggaatagatagattgcaatataataataataggggccttcaagtcctactatcaataatgaacagatcatccacataaaaaattaataaggaaacactggacttgcactacactttagatcaagtagacctaagagacatatacagagcatttcatccaacaacaacagaatacacagtcttctcaagaacacacgtaacattctctaggataaattatatgttagaccacaaaacaagtctgaacaaatttaagaggattgaaacatatcaagtaacttctctgaccacgatggtatgaaactaaaaattaaataacagaagttttgaaaattcagaaatatgtggaaattaaataacatgctcctgaacaacaaatgggtcaaagaagaaatcaaatgggaaattaaaaattatcttgagttaaatgaaaatggaaacataatataccaaaacttacaggatgtagcaaaagcaattctaagagggaaatttatagcaataaatgcctatttcaaaaaagaggaagttctcaaataaataatctaatgttatgctacaaggaattaggaaaaagaagaaaaaactgagtccaaggtgagcagaaggaaagaaataacaatgattagagggtaaataaataaaatagagactagaaaaaaattgaaaaatataaacaatactaagagttggcttattaaaaacataaaattgataaaagtgtagttatactaagaaaaaaagagaagaaaactcaaataaaatcagaaatgagagacatgacaactgataccacagaaataaaaataatcataagagattactttgaacaactatatgctaacaaactggataacctagaagaaatggatagattcctcgacatatacaacttaccaagagtgaatcttgaagaaatagaaaatctgcatcgaacaataatgaggaaagagattgaatcagtaataaaaagtctcccatcaaagaaaagcccagcgctacaataaagtttcaggatacaaaatcaatgtacaaaaatcagtagcatttctgcataccattaatgttaaaactgacagccaaatcaggaatgcattcccatttacaatagctacacaaaacaatacctaggaataaatctaaccaaataagtggaagatctctacaaggagaactatgaaacactgctaaacaatatcacagatgacactaatggaaaaacattccatgctcatggattgaaagaatcaatattgttcaagtggccatactgctcaaagcaatctacagatttaatgccattgctatcaaactagcaatatcatttttcacagacatataaaaactattctgaaatgtaaatggatccaaaaaaagcccaatacccaaagcaatcttaagtaaaaagaacacaagtggaggcatcatgttacctgactgcaaactatatgataaggccacagtcaccaaaacagcatggtaccaaaccagacacatagaccaatgaaacagcatagagaacccagaaataaagctgcacactacagccatctaatctttgacaaagttgacaaaaataagcactggggaaatgacaccctattcaataaatggtgctggcatagctggctagccacatgcagaatgaaactagacccctatctttcaacagatgtataaattaactcaagatggattaaagacttctgttttgttttgttttgtttgttttttgagacagagagtcactctgtcatccaggctggggtgcagtgccaggtttataggtcactgcagccttgacctccctgggctcaggtgatcctcctgcctcagcctcccatgtagctgggattacaggcacatgccaccaggcccggctaatattttaattttttgtagagacagagtttcaccatagtgcccacactggtcttgaactgctgggctcaagtgatccacctacttcagcctcccaaaatgctgggattacaagcatgagccactgcaccaggcttgtattaaaaatttaaatataatacctcaaactataagaattctagaagaaaacctaggaaacaccattctagacattggtctttggaaagaatttatgactaggacctcaaaagcacttgcaacaaaaacaaaaattgataagtgggacctagttaaattaaacagcttctgcatagctaaagaaactaacaagagagtaaacaggcaacctacagaatgggagaaaatattcacaaactatgcatccacgtaggtctaatattcagaatctataaggaacttaaacaattcaacaagcaaaaaacaaatgacctcaccaaaaaatgggcaaaagacatgaacaaatacttctcaaagaagatgtacaagtggccaaaaacaagacatacgtctgataagagattaacacccaaaatgtataaggaactcagaaaattcattaagaataaaacaaataacctgattgaaaaatgggtgggccaagcgtggtggcttatgcctttaatcccagcactctgggaggccaaggcaggcagatcacctgaggtcaggagttcaagaccagcctggctaacatggcaaaaccccatctctactaaaaatacaaaaattagccaggcatggtggcgcatgcctgtaatcccagctactcaggaggctgagataggagaattgcttgaacctgggaggtggaggttgcagtgagccaagattgtgccactgcactccagcctgggcaacagactgagactctgtctaaaaaaaaaaaaataagagagagaaaaagaaaagaaaagaaaatgggcaaaaaacttgaataaacatttctcaaaagaagacatacaaatgaccaacagatatatgaaaaaatgctcaacatcactactcattagggaaatgcagtttaataccacaaacaactatcacctcatacttgtcagaatggctattatcaaaaaagataaaagataaattttggtgaggatttgaagaaaagtaaacccttttacactgttgatggggatgtaacttaatatagccattatggaaaactgtatggagattctgcaaaaaactaaaaatacaattaccatataatctagcaatgccacttttggtatataagcaaaggagatgaaatcagtatgttgaagagatgtctgtgctaccatgttcattagagcattatttgcaatagccaagttatgggatcaacctaagtgtacatcaatggataaatggataaagaaaacgtggtatatattcacagtaaaataatattcagcattaaaaaagaggaaattctgtcatttgagacaacatggataaacctggaggacattatgctacgtgtactaagccaggcacagaaaaacacatgaactcacctaatgtggaatgtaaaacaatcaaatacttatatagccaggcgtggtggcatgaatctgttgtcgcagctactcaggaggctgaggcaggagaattgcatgaacccaagaggtagaggctgcagtgagctgagatcgtgccactgcactccagcctgggtgacagagtaagacttcctccctccctccctccctcccttccttccttcctccttccttctctccttccttccttccttccttttctcaaaaaaaaaaaaaaagaagaaaaagaaaaccaaccaaataaacaaaaaaacaattgaacccttataaaagtagagagtagaatggtggctatcaaaggctggggataggggggatgttggttaaaaggtaataagtttctgttaggagaaatatgttttttgagattattgcacagcatgatgaccatagttaataataagtgggagtcgaacaatgagaacatatggacacagggaggggaacatcacacaccagggcctgtcggggtggggggctaggggagggatagcattaggagaaatacctaatgtagatgatgggttgatgggtgcagcaaaccaccatggcacgtttatacctatgtaacaaacctgcatgttgtccacatgtatcccagaacttaaagtataataaataaataaataagtaaataaatataaataaaaaagattttaaaagttgctaagagagtaaattgtgaatgttctcatcacaaaaaatgatatgtatttgaggtgatggatgtgttaattagcttgatttaatcattccacattgtatatatatatgacataatatcactttgtacctcataaatatatacaatgataatttgccaatttacaataaaaatactgatttatgttgtttatgtctaacaatgacttctaccttcccaaatccctttctgggcataaatatagatatatatgtgcatacatatgtattttttaattttagttttttaacttgaaaacacatatgtacggtttgatcaccttattttgtttttcatttcaatggatactttttgtgactacattttaatttattgactgcctaagtttatggggcctgggtaacacaaatttcttgtttcccacttagtatttaggttatttttaaaatttcagtgttcatgtagctcagacctatagaattagctgaaaatacttaagaaaaacaggaaaaccatctgaaaaattccaaaacagacaaaaattattaaagatgcataatgattgagaaattggtaaatggagcatcatgtgtaaaagttaattactgagaatgggttttgaccactttgtcatttagactaatcaccatttggattaaattatttttaacgaaaccatgtggagctaatgttatttgtaattattgctgagtagaaaaaagacactatttgtttctttttacattttaatattttataatttaaaaaatgagcatataccaaagaagaaaaagttcttgcacatctttattcctgagtaacttactctttatgctgcatatgcctatgcaatcttttttttttttttgaaaaaatattttcccccaaactggttattggtggcacaacagaatcccatttatatttgcatattctattatagctgaggtagccttggctaagctgagagattgattttctggagactgctcttcccatttcccctccctgcaggtttttgtttttgtttttgagacacagtgcagtggtgctatcccagcaaactgcaacctctacctcccaggctcaaacaatcctcccacctcagtctcccaagtagctgggactacaggtgcaagccaccatatctggctaatttttgtattttttgtggagacggggttttgccacattgcccaggctggtctcgaactcctgagctcaggtcatccgctcacctcctcggcctcccaaaatgctacgatcataggcatgagccactgcacccagccctgatatttttttaaatgttaaacacagtgcttattttctcttgccctattctgataataaaaaaatttctgatttagcagtagcccgtttttgtatatacttttcttatcaataaatttgaaaatagtattaatatatgcatagtttggatatttgtccccagctaaatctcatgttgaaatataatctccagtgctggaggtgaggcctggtggcaggtgtttggaccatgggaatggatccctcatgaaaagcttaggccatcccattggtgataggtcagttcttgctttaaattcactcgagatctggtcatttaaaagtgtgtggcacctcctcactctactctctttctcactttcacctgctttcaccatgtgatgtgcctggtccccctccaccttccaccatgattgtaagcttggtgaggcctccctagaagctgagcagatgccagcaccatgcttcctgtaaagcctacataactgtgagccaatgaaatctcatttatttataaattacccaagctcaagtatttctttatagtaatgcaagaatggcctaatacaatatattttaaatttccttttgactcagtttttacttagaagaattcatttgcttcataatatttggtccttcttttcaccctcaggttgataattttggttttttatgatttgtcatgtgtactgcttttatcatttattattttgtgataaactcatgagataactaacattaaaggaggcaatttgtatctatctaaatacataagttttgtattccttttatagttaattaggacatcttatattatttaggtttttctaccactctgcctcttccccttccccaccttcctttttattttttccatctgaaggtctgtgtttggacacctcttacatatttgtttcagacatacggttttgggtcaagaaggtgtacctcagtttggcaattaactgtttctaaacactgactcagaggtgtatgagtgggtagaaactcctactgttttttttgtaaaatgtctcatccttgtctcctataagtatattaaaaatcccttggactgatccttaaatagacccatttagtaaatttcagcagcaatagcactgtgaaccagttggatagatttccagtcaattttctaatttataatactggattctaaaccatatggttttaatgtgttgacaaaaagaaagaatcacatcttaccacagttcaaatatattaaatccaatgtttcctcattatcactaatggtctaacactatcataaaagtttactaattggtacagtaggctttattcttttaaagccatcaggattttgcctcactgtactttaaactcttgtggatggttattactggatttcttgacaatctgtcgtctagtggttactggcatcctggtttatcttgccagtttacaattaatagggctacattctgcctgtttttataaacaaacaaacaaacaaacaaacaaacaaaaaacacacacaaaaaaaccacgctagtatttcacttaactctttagcaatcgtcagagtcttcacaaccagaagtcctccaaatccatcaatctccctgtgtctgcaatggttttaggtgacttgcagacattatctcttagcctccagtcactgtatcactcctcattccttgctagcgctgtctttccagatcgtgttactcatagcagctttaaaatatacaatgggaaaaaaaggagagtaacatgagcagacttagtagataacaaaggaccagagaaagtaggtccttgatattctctttactttttccccagcatattcccctctagcctctgataaacttaccccaaggaaagaaaagaaaaacatcattggattaggcagaccccaaagttttaactcagttctagattttgaagttctgggttctgaactaactaaggtttaaacattggaacaatttccctggattaagttaagaatgtcttttacctccttctactatttattaataataacataactcatgcaataatagctattacgtaccattttatttaatccagataaatatttaataatattggccaaaacatatctgagcccttactagcaccaggcattatttcaaagacttgacaatcatttatttaaatcttctctgcatcgctgttgttatcactattttgcaacggttttgcagtgataacaacagagatgaggaaactgaggttaaaagagatgaaataagttgctcaaattcgacagcaggactgtctaactacaaagctcatccttttaatccccttcaccacatctctaaagaggaagaaagtcttaaaaccattgcatcctttggagcaaagccaagtagaatctgaagggggagaaaatgattcttgtgtgtctttcatatactgcagtcacacaagtagtaagcattagccttttgtagtttgtgggtacacataactgttctgaaatcctttcttcaaaatatcaaaatatttgtttaaatattccttatgaagaaccaaataggtataacgatattaaaagtttaacttaggaattggtaattacattcatttgggggaaagttggaatggcagtaaaacaataaaggctgattattcaattcagtgtagagtctgaaaaaaaaattttaaaccataatgcagaacatatttagtctgtcacctgttttatcattcaacaattaattattaagtggctactaaatgccaatcatcacctaagccctggggaaaaatggattaagaaacctccaggatttaagcaagctaagtatctattttttcatctttagagtgatgtatttgttactgagatacatgtatatttgttatatacataaatatatatttataatataaatgcctacatttatatatgcacatatttatatattatatacatacataatataaaatatatatgcacatatttatatattatgtatgtataatatgtaaatatgtataaatatatatttagaatattatatatgtttgcatttgtatatgcaaatatatatgcatatatttgatatttatataattatgatgaagtatttatcagcacttgtgaattttttattactacaacttaaataacattgattactaaaccaactttaccaaaatctgtgaaaagtaatctatcattatcattattattttaaaaaagggtcttgctctctcacccaggctggcatggtgctggctcactgcagcttcaacctcctgggttcaagcaatcctcccagytcagcctcctgtgtagctgggactctaggtttgcaccatggccacattcagctaatttatttatttattttttgtagagacggggtcttactctgttgcccaggctggtctcaaactcctgggctcaagtgatcctcccttgctcagcctttcaaagtgtttggattacagatgtgagccactgtgcccagcctcaatattattttttaataactttcccctactgagttaaaatattgccttttttgcatactacatacccctatatccttgaatctttctttttgtattgagctctttattcctgtgctgacctcacaatttatagcttaaagatgtgatctaacatttgtaaggtacatcctctttcattactcatataatgatgtttacaatttttcttcttatatattttagatgatgaaaattagggacagtttggtatgtttctttgttcaattaaacccacagttgtaatttacaatatgtaaacacagtcttaagactgctaaggatataaaggggaaaatgatagaattccagctcttgagataatcttatgtatgaaatagagttatagtttataactctataatttataatttctgattctagaaatacaaaaagagacaagatagaacaagaaccaagaggcaggttgtacagagttaaatattaggtgctacaactgagcacacatataagtagtaagcctttcttagatgattaatgtggttgctgcagcagttttatagatgaccagatcccttagtctatcttaaatttgaaaagtgcagaatagtggcagcctcatttcgacgtagcatctctaaaaatcttagcccttagcagccttctttttcccttgttttcatgggggggtagggcagagcttgcatgtccttgaagtctggtatcacagatgttttgaattccttaatattcagttcactctacaatgacatgaattaactgattttccatgaggtgtgcgagagtgatttcattttaaacacgtctgcaatttggtggatgatctagctgttagacttgcctacatgatcttgtttcacagaatattttcttctgcaaattctttatgttgttactctgtattgggggaagccgcccccaatatttcaatgtatgttctttctattttccataagtgtcggccggctgagaaatagagacagtataaagagaggaattttgcagctgggccaccaggagtgacatcacatatcggtaggaccgtgatgcccacctgagcctcaaaccagcacatttttattaagggtttcaaaaggggagggggtgtaagaacagggagtaggtacaaaggtcacatgcttcaaaggacaaaaagcasaactactaataagggtctaacaaagatcacatgcttttgagggaacaggacaaaaggcataagcagaactactgataagggtccaacaaagatctcaaggcaaagggcaaaagcagaactactgataagggtctatgttcagcggtgcatatattgtcttgataaacatcttaaacaacagaaaacagggttcragagcagagaaccagcctgaccacaaatttaccagggccacgtttttccccaccctagtaagcctgagggttctgcaggagaccagggcatatctcagtccttatctcaactacacaagacagacattcccagagcagccatttatagacctcccccaaggaaggcattcctttcccagggtattaatattccttgctaggaaaataatttagcgatatctctcttacttgcacgtctgtttataggctctctgcaagaagaaaaatatggctctttttgcccaaccccgcaggcagtcagaccttatggttgtcttcccttgttccctaaaaattgctgttattctgttctttttcaaggtgcactgatttcatattattcaaacacacatgttgtacaatcaatttgtacagttaatacaattatcacagtggtcctgaggtaacatacatcctcggcttatgaagataacaggattaagagattaaagacaggcataagaaattataaaagtattatttgggaactgataaatgtccatattaaaatgaaatcttcacaatttatgttcctctgctgcagctccagctggtccctccatttggggtccctgacttcccgcaacactctggtaactaaatctaatcccattataattaaaacatttatgaccatgtgagaggcatgtgaaccagagtaactccatcttgaataggagctaggtaaaatgaggctgaaacctgctaggctgcattcccagatggttaaggcattctaagtcacaggatgaaataggaggtcggcacaaaatacagatcataaagaccttgctgacaaacaggttgcagtaaaggagccagcctaaacccaccaaaaccaaaatggtgacgagagtgacctctggtcttcctcactgccaccctcccatcagcaccatagcggtttacaaatgccatggcaacatcaggatgttaccctatatggtctaaaaaagggaggcatgaataatccaccctttrtttagcatatcatcaagaaataaccataaaaatgggcaaccagcagccccgctgctctgtctatggagtagctgttctttaattcctttactttcttaataaacttgctttcactttacactgcagactcactctgaattctttcttgcataagatccaagaaccctcttttggggcctgaatccagactcctgtcctgtaacatatttctagtgaccacaggagggactatagtacagaatccctgacccaacagctacctttgggtaagtgttggggtcctgtagaatatttctggtgaatcttgaagggacattactaaacacccccccaacccaaaggaaatagactgcagcactgattggatgattttgggtaagtggtggggtacccagataaagaatgggcttgttcaaggcccaacttgggggagttagagtctctcctaaggcagagtaggttagaggcccctcttcataaaaggcaaggatccttgactggcattgggttagaggcccaacttagaaggggattagaggccttctaagatttaggggattagaagcccctcttgataaaatccctcttggctaagaacaggtttggcactacgggttgttaactgctgttctctttggattaatctgccttgcactcttctttgaggcctgtgggtgatgggattaggcatgtagaggattgtgtgacatgtggagcattttcgtccctaaaaggcgaaacttgaaaactgataggattgctggaaaagatccctgcttgaccggcagcagccactagaacttttcagtgtcgatgcaatgggtgagtctttctctggcctccttgataattttgccttccccaccctgccacaggcaatgcttttctttctctcctttctctttcttatcttctctattattcagggtgaccatcttgcccagagaccacatgttgaaactcctggtcagaggttggattaacctcatgacggggcccaaccaggggcaagtttaagccttttgaatttaatagtgggtgttaagcagagtggctaatgtctacgttttgtcacatgtattttgctctggccagaacagaaaaagataattttcctttgtgttgtggcttggcccctagggctgtgtacagccagctgggtcactagggctgctcagggaaagggaatccagaagcctggcaggccagcaaaaggataagaatttcttaccaatcagatttctagcttctccctckgtgtgtgtgtgtgtgtgtgtgtgtgtgtgtgtgtgtgtaaactggataaagtttctctctggtcagttatgcccttgggaacttgaccttgtaaccatgtggccatgctttctcttttcacaatggtggcctgggtttagggttcaattcctggcctaggggatgatcctttatcttctgtctgtctatgtgtttatatgtgttatgtgtttgatatttacatatgaaacagctttaattagtttaaaaataataagagcttaatattttattagaaaagtaaaaaagtataatgagttttagtcatgtgacttaagtaatctttgggaactaaagatcgttttttgtttttgtttttttttaagatggagtctcgctctgtcaccaggctggagtgcagtggtgcaatctgggctcactgcaacctccgcctcctgggttcaagtgattctcctgcctcagcctcccaagtagctgggactacaggtgcgtgccaccacgcccagctcattttttgtatttttagtagagatggagtttcaccatgttggccaggatggtctcgarctccagaccttgtgatccacccgccttggcctcccaaagtgctgggattacaggcgtgagccactgtgcctggccaagatagtttaaaaaattattggtaaataaagacatttggtctaagttatgcaggtcagatattaaatttagtaaatgctttaaggtcataaactgcttgaaaattgttcaatttatctatcttaaagccattagattctagataaggcctggggacatgtggaattcgccataccccctagctatacaaagaagattattaaaaaaagagattttatatgagaaaggatcttgtatggtaaattcttgtcttaaagtaaaatgactattgatgtttagggcaagtcagaaagcccaagaatgtctcagatggtctgtggaagtcatgaaaggatttgtgaaaggaatttatgcaagaaatgtacaattcaaaggttgttaggcattctaaatgcttcatacaatgccaccatgactcttactgtaaaacttgcctgcttaagtaaggcaaggcctggagacatgtagaatcagccacaccccctagctatgctggagagtcagctcttacatgcacttctgcctggtgtctcttaggctaggatccacacttaatacataattaaaatctcagatttaccaaagttttcaccaaaaatagaaattgcagaacgttaacattataacatgtaattaaaactacaaagaaacaattttacatggaaggtgtgtaaagaaagtaaaatgtgtttttggtgaaagagtataagaagtcatgggaaggtggatttttttctgcctacattaaagtgttaaaggattgtttaagaaagaaaaaaaattctgatggtttatgaaaacttaacctgcaaaaaagattctgtgtggacactggctaaagtaaaaggggtattattcagtttttctgcaaattaaccattggaataaaagcacaacagagtttccttttttttttttttttttttgaggcagagtctcgatctgttgcccaggctggagtgcagtggtgtaatgtaggctcactgcaacctcagcttcccgggttcaagtgattctcctgtgtcagcctcccaagtagctgggtttacaggtgcataccaccatgtccagctaatttttgtatttttaatagagatggggtttcatcatgtaagtcgggctggtctcaaactcctgacctcaggcgatccactcacctcagcctcccaaagtgctgggattacaggcgtgagtcactttgcctggcccaacaggtttttcttaaagcaagaacctccttatgatctgctctttaacaaaaattgtaaagggttgtaaaaggtttatgaaaattttacctatggtcaaactgattaaaattaaatacatttattgataaggtttcattaagaatttggtttgaagtcaataatgcactaatgaaacagtgacatttggcttatttggtataaaagttatataggaagcattatcaaatatgaaatggtgtttggtttcctttgggctgtaaatgtgttattagcatatgttccaaaattatgggaaacttctataattctaatatggcttagtgtatgttatgagtagttatattgttacataaaatcattgtgtgccacagaggtaaccaaaatttctttgtcaatcgtggttttgactgtagctgtcctaagatgtttttgtcatccacagacaatttttgtcttgttttaaccctctttagatggtggtttataatcagctatagaactctaacaggtattcttaaatgcaggtttctgataactttgaaaattgtgacattagaatagaggaaacacctttcagaactgtcagagagctaaagtgttcgtgaatatcaagcaaaacaggagttaactaaataaccagaatcaataaaaaacagaagtaatctttgtgactttttgcttaaaacattgctgatcctttgttttgtttttcagggtcaagaaaacttttcttttgagctatttacagcttgtagcaatcgagtaacctatactgctgtgaataacatttggagcatatttgtttctctacctgatttctctagaatttggagactatttgtgagctttctgaacttacagcaatgtggttatttgcataagtgcaataagaatcagttttcttttgcaacaggacacaattggagaaattggttattttaccaaggctttaactggaatggtgtgctttcctttaaggagtcaaacttgacttttaaagccaataaaagccctttggggaactggcctcataccttgcctacacagtcccttgtacagggtttctgacctgtggtaagtaaagaatgtcactttctcttaggcccagaaggcccaagttttcttgggaccccaagaggaaagaaatttacttaaatcacatattgagggtacaaacccatggcaggacttggctctaaaaaagtcttatctgagattccttatggaacaaagttctatcaaagccagttaaaaagcctatatggtaaataatgattcttgctgcagtttatacaaataatcaggccaagtttaataaagcaaattggtcttaccataatttgtctttagtaaaaatgggaaactggagacagagattatgtttcaataactatggtatacttgctattaaattctagtctcatcagttgtttttgcttctgcaatttaggccaaccctgcttattcctgtaaaccaaccagtgatctctggctgctgcttagaagaaacaagagggatggctaattaaacaggttgaagtaaaggagccagccyaaacccaccaaaaccaaaatggtgacgagagtgacatctggtcgtcctcactgctacactcccaccagcaccacgacagtttacaaattctatgacaatgtcaggaagttaccctatgtggtctaaaaagaggaggcatgaataatccaccccttgtttascatatcatcaagaaataaccataaaaataggcaatctgcagcccccaggctgctctgtctatggagtagctgttctttttttcttttactttcttaataaacttcctttcactttgcactgcagactcgccctgaattctttcttgcatgagatccaagaaccctctcttggggtctgaattcagacccttgtcatgtaacaaccagagcacccccgggtttatatttagtgatcctttcattccctcatacaaatgctcattatgtaacaagtcagaaacagcttttctagtcttttatatgtggtataatcattatgacttaaatacacaatgtgggtgtcataaggcagaattttgtaggtgttttaacagatacataaaagggagaagtaaatttggactaggaaaatccagataagctccatgaagaagactgctggagagttaagctttgaaggatgagtgagggtgtaagaagcagacataggagacaggacattccaggtattggagggtcccaatgccatgtgaagtatgggaaagggactattaaatgtgttggatacttcaaaataatgttacatcttcatagctatgttatattctcttgacgtgtgttgcaagttgctggaatattttactgacaccctgtagctaagatttttttccagactcaaagataactagtgggctggccagtggtctaggaaataatcaggcaggtgatttcagcataatgagttaagtggatacagcccctggctgagggctattcttatgtgacactggcagagtttcagaactacttaggtgggcttaagcatttatttattatcttttatgttctaggcactattgtaggcagtggaaatgtggcaatagacaagctgtggctctgctttcctggcggtaacattccaatacataagagggacactaaaaaggtaaataaaaaatacactgattttagctgatctcatttcacagaggtcagcgcactctcccctctctgagagtgttactatgcttaataaacttttgctgctttgctgaaaaaaaaaagtgaatacattgatttcaaggtaactcacgttgtttcatgatatataaaaaataaaaacaggttgttgtgataagggaagtgatggatggaaatgcccctccagggaacaactttttagtaagatctaaataataggaagacacgtgaaaagaagccagtaggcagaaatcatgaggaagcaaaactaggcaatcagaaacagaagagaggtaaaaacaggtggagagaagacacagagaactcaactaaccagaagggctgttgggtttccagaactattgcttgaattttgacttctagggtccctgttggctcctgaatagatgcataagtagatgcatatgctccattttccatctttattctgttataatatattcctatctatctaacatctaatgatctattgatctaactgtccatccatccaatcattttcatattgtgggacagttaggttgctgccagtttttagcaacacaaggagcaagacagcagtgaacattcttgtacacactttatcaagtacatggtatgggatttttgcatgtacctggaattgaaactgctgggtggtaaaggatgtctacctttaacttgataaaaacctgcaaaattgttttccaaagtttttacaaataaatttacttctccacaagaaatgtacacttggcattatcagacttcaaaattttttccaatctaatggtgtgaaatggtatctcattattttaatttatattatcttaattattagacattacaattagggaggtatagtttcaaaagtttattggctatttgggtttccttttcttcaaactgctatttgtttgccagttattctactgggtggtttaactttcttatttattagtagtatcctgagtataaatactttttgatcatacacattgcaaatatctgatctttttatggcttgtcatttatcttcatggtatttttggtcatgaggtttcaaattttaatgttttcaaatttatcagtccttttccctcatagtgtgtgctttatgagtctgtttaggaatccttctttaacttgcaatcatagagatctgatcctatattttctgacttttttattaatttacatttattagctactactgcaaggcagtatgtggattgacaaaaatacaaatatgaactaaagtccatagtttatattaaggttcactctttgtattgcatagttccgtgagttttgaccaatttataatgtcatgtatccaccattataatatcatacagaatagtttcattgccctaaaaatctcctatgctccattcttcccttcttgtgacttggtccttcatttcttttcatcattcaataatgttccattttatggatgtagcagtttttattgtacattcacctattttcttggttgcttccaatttttgacagttatgaataaaggtgctagaaacattagtgtgcaagtttctgtgtggatgtaagttttcaagtcatctgggtagataccaaggaacatgattgctagattgtatggtaaggctatgtttaactctgtaagaatctgccagactgtcttccaaagtggctgtaccattttgcatcctaccagtgatgatagttcctcctcacatcttcatagcatttggctggttgtgttttggatttcagctgttccaatagatatgtgatggtatctcattgtttagatgttgaatatgttttcacatgcttttgtgccatctgtatatcttcttgatgagatatctgttccgatcatttgcccattttaaaattgggtttttctattgttaagtttaaggagttctctgtatagtttgaatagaagtcttctattgaatatgttttgcaaacattttttccagtctgtggcttgtctttacattatcttaactatcttttgcagagcaaaagtttttaattttaatgaagtacaacttaacagttttctttcatgggttgtgcttttggtgctgcatctgaaaagtatctgccaaacccagagtcacctagatgttctgttatgttgctttctaagaattgtatagttttgtgttttatatttatgtctatgatccattttaaattactttttgtgaaaggtgtaagatctgtgtctggattcttcttcttcttttttttttttttttttgcaagtgtatctccagttgttccagcaccatttattgaaaatttgaattgcctttttcctttgttaaatattaaatattagttgactatatttgtgtggatctatttctggactctattttgttccatagatctatttctctattcttttgagaatactacactgtactacactgtcttttttttttggttttgagacagagtctcactctattacccaggctgaagtgcagtagtgtgatcttggttcattgcaacctccgcctcccaggttcaagtgattctccggcctcagcctcccgagtagctgggattacaggtgcctgccaccacgcccagctgatttttatatttttagtagaaacagggtttcaccatgttggccaggctggtctcaaactactgaccccaagtgattcactcgccttggcttcaatactacactgtcttgattattggaacatatactatttttttttctttttttaggcaaggtctaattctgttgcccaagcttgagtgcagtaacttgatcatggctcactgcagcctcaatctcttgggctcaggcaatcctcctgtctcagcctcggagtagctgtgactacaggtgtgcaccaccacacctggctaattttttttttggagagatgaggtctcactgtgttgcccaggctggccttaaactcctgggctcaagcgaacctcctgcctcagcttcccaaagtgctgggattacaggcatgagccactgcacccagctatactgtcttcaagtctgtctgttttctcactttgtttttctttaatattgtattggctattctggctcttgtggctttgcatgtaaacattagaactggtttgctgatatccacaacataacttgaggtgattagaattgaatcagtagatcaggttgataagaactgatatttcttgcacatttttaaagttttgcttttaacatttaggtttctaatcttccccaaattaatttttatgcataataagagggagggatcaaaatttttttctcatacaaaaagcaattgtatcactacggttcattgatcagtctggactttctcactaatttttaatgctacttttgttatatacaaagttctcatatgtgtgtaggttttgttctgggactttattatgttctagtagtttatttgcccatacctaaaccaatatataatacatcctggtagggttggtcctcccaatatattccctgatcttacctgtccctatcctcctctccccaattacagcgcttttcttggaccttaagttttgatatgaatttcaatgtcattttaacaagttcagtaaaaaaacccttttgagattttaactggaattgcattatatgtactgattagttcagggaaaattgaggcctttacattaatcttttctcatttatgaatatggttcatttctccattaattttatccatggatcctgtacattttcggttacttttgttctcaggtacctaatagtttttttttcttttcttctacttgttaatggactcttatttaccattacaaactagtgcagtttgcaacataattttcaattaaattgttttacagttacatagttttaaaattcttaaaatgtcaactgcttaataaaaaatacaatttatacaaaaatacaagagatactatctgaaatgtgaaagtagtagtatatttatgatttctccccaaagtggaaggaacacacactctaatgtttcttgtagaaaattatgcctaaatctggcagggcgcggtggctcacgcctgtaatcccagcactttgcgaggccgaggtgggtggatcacctgaggtcaggagttcgagaccagcctggccaacatggtgaaacccatctctactaaagatacaaaaatttgctgggcgtggtggcacgcgccggtaatcccagctactcgagaggctgaagcaggagaatcccttaaacccgggaggcggaggttgcagtgggccaagatcgcgccattgcactccagcctgggcgacagagtgaggctccgtctcaaaaacaaaacaaaaaaaaacagaaacaaaaaacaaacaaaaaaaccactaaatttgaaaaatgttaaatcaacttctttgctgtattataaagctccatttccacccctctttttagtttaggaagtttaccgttatcggtgaagtaattattttgttaattacaaaggtaagtaggttctttctgaacaatcaggatgtaaacttaatgctagtgaagtaattaaacattttgaatgttaattaaactcagtccagttaagggttttatttactactaacaaacgtattcaccgtgtgctaagtgctgcagggaatcccagcccgttttcctccatctaaaaggaaaattaggaggtcccaatactttacttgtagattttccagtttctaccattccctgtaaggcactgagacgcaagatttcaaggcccactcggggtaccctggcatggacatcgagtcgttctagcgctgagcttcaaaactattcctttccttccctttcttcttcataccagactctaatctgttctccctagcttcgaattattcactgtatggtcgaacatcttactccacaaataacctctgaagtgttgcagttgtcttacccaaatacctgaactcagcttgtcccgagtactgcgatcccgcgtactgctaatgggaatatagttaacccaactagtatgaggtccccagtacacagcagctccaagatcaaggcgaccgagtaacactgcttgcctagactcaggccaagttcggagagtgatcctggggttattttagaacgtgtcccttgct

SEQ ID NO: 97494 - DNA, 13520 bp, Homo sapiens
gccagtgagatcatggagcaaacacaagcctgggcactgaaatttatactcacaacacagataatccagaatatggatattaatgtttttaattacaaatgaaaacaaaaatatgtaagtcttatggaaacttcttggaccttgtagaatgtatctttggccccattttgagaaatactggcctactgccataagaatttgacttttgatgagattcgatgaggaattcatgctgtacatttgctaaatcatccaatagggggagacattcttcagcttcttaggtttttcattagtatgacttcagtcccttgaggtcacagattttcatccataggatggtttgggaaacttctgttatcatttaaggacctgcaggaagtaagggggtacctttaaggttaatgttgagatgtaatggaatgaagttttcttaatcccaaacgacagcaacaacaggcaagcttctggcttttgagtggactcttcagagtgatcgaactgggtataccaaatatttggaattccatagaaagctggatctgcacattattgtattatatatatataatactatattattatatagatattagttagaaaatacttttgaaaaaagaatacaaatagctttcaaacctaaatgtgcagtttcataataaaagaaatgtgaattgtataatgaggtaacatttttctcttggctcagcagtggtcagaaaatctgaaaatatattgtcgaaattggaaaagcaggaaataaactgcaggagtgaatttggaacagcaggcacactcatgcattgttgataggaattaaactcatacaccctcttcagagggcagtttaacagtatttctcacatttaaagttatatactttttatgcaagagattctactttttggactttatcctataaatataccctatggcattgtttttaaagagaaaaaactgaaaatccagtaaccattttttaactactgtgtataatctaacgtagaacaatgtccaatatattgttaaatgagaaagcaagtactgtagaatatattgttacttgtgtataaaaaaaataagtggtagtggatatatacacatagtagatgcagagaatttcttcggaaggatacagaaggaactgatggcattggttcactctaaggggaactgaggcactctgggtgtgaagagggggagggacattttcattgtatacattaactggatattcgttttctatgtgcatatattaccttttcaaaaaataattcacactaaaacgtaacttgcacactagaaaaactgagttgctgctctccattagaattggagctagaggcaacgtggtgataaaagtttgtggactttgaaactggacagattctaggttttaaagttaggcctggcacttaccaattatataatttactctctccagcctgtgatatcatttgaagaggaggagaatacctgtttcatggcttaagatgacatgtgaaagaatttgtcagttaatgctagtgtcctttttctatacaaggaagtactagaacttggaagacctctgtagacctctgtattagaataaatgtcaatgtgctctgtcacaacccaaaggaatattgaggagtgacctctgacaagttcgacagatacagataaaataatatttttgttgtgtactacaaggtaatttatattaagaacactcagaaaataagtcccacatactgtagtttgttttttttaacagagaatagagaaaaggaagaaatagggagaaagagtgatgtaagctacagagtaaggcttgaagagagaactggagacttaattctgatttctgtatcaaatatgtggagaaacgtagccccccgtcttgctcctgcggtgaactatcccacagcacttggaatccagttgttggcgctcttttggtgtacattctttccttatgtgggtaggcaagtgctctttccatttgctatcttaagaatgtgtgtataaaaaataataccctcacagacatatagtgcgtgctggggtatgtttgggaggtgtctccagtttggtatttgtagtcacattcctgtctttctttgtcttgccaaatagcagtcaagcctgcaataaattccaaggactctaagtgccaaatctcacttaaaattggattttatggaagtgtctaactaaaaaatctgatgactaatctaagttaaagttagagctgggaccattttaggactttgctgggaaaatggatgctgagtttacgatgactctctggttaggggggcagcatttatgctcccgaggatttgctttccaggtgatggattgatttcagataggattattcagtggaggagacaaaaatttccttggggagaaaaatgtttcttttcctgtttctgtttgaattactaatattaaaactaaatattgttcaaatttatagattatttaaactaatgattagttttctgatttcttctcataaagcgtggtaagcagaattttggcagtaatgaatgacaaccagttctttctaaaacatgaataaacccaagaacttactaaagaaagcagtttttcaccaacacttaattccatgtgatgtctgtttgtaacatgtttagggtctgaggagatatcttactcaaaaatgaaggtatttttcaacaagcattgctattccacaaacattgactgctttatgaaagcctgcagcagctatttcttagaaggtgaattcttttctcagagtgtgtgggtaaatatgttaaggattaaaccaaaagaatttcaggttctagctgatgtgacaagcaataaccagtgcagatgtttaggacacaaaagattttagacaatttttgttaggaatttgctatgatagacttaagcctattccataaataatagatgctgtaaaggttatttaagcattaatgtaaagttctcttatcttgcagcatacattcagtaaaataagcagcttattttggtaatctttgtcacactctccccccttttctctgcaggtggatcacacaataataatgtacttgattggaccagatggtgagtttctagattattttggccagaacaagaggaagggagaaatagctgcttcaattgccacacacatgaggccatacagaaaaaagagctagccaaagcagtgttgctggatgcagtattctcttgctaagaggaaggaaactgtctcgcataggagcctatataaatataaacatatatacgtgcactctacagaatggccttcataccatgagaacatttctgttttggatggggatgttacccttgcgttcaaccaaaattgattcttggaactgtaaagattacaacccaaagtctcccaggaagctgtggggagaccagaggatcaagctgaagtgaagccagtgaagagcccacctgtggaaggacatggcggggcgaggcacagccagtgcattcctgcctgcgaacaggccctcccagcagctttgccgcctctccatcgtcttgggcccttgctcaaatagctgtgggactgaatttcacagaaaagaatataatttccatagtgctcttgcttgcctcttcttgagttctttgctcttctgagttcttggtggctaataacagtcagattagggtctctgccattcagagttgatgcttgaaaactttagttttccttattaatgaatatcactatcagatttgactaatgaagaggaaatctattgtttgggggaaaaaaaacatcagtttgatttctctaggggttcttttatgtgatttttagctaagtggtgtgccaggttttcagtgacataccaaatggaaataagaggatattgatcacgagtgtgatgctgagtacctttctgcatatactggattgtactttgtgtaaagtaaacatactcagttttgctgttcagacaagcgtgatctttttcatgggtgatgagtgggtacatagatggctgcacacagttctcaggaaagagacccacaggctccagcgggcaggtgggtgggacgcttgctgaagtgcagttccccagacccagagctgaattcactgaatctgcagtatgatgcagagacctgcttccatgacagataccccaggtgactcggatgctggcggactgggaccatcccttaagaaagtgttttttggggaaataacttgcctggcacaatggctaatgcctataatcccaaaactttgggaggccagggcctgaggattgctagaggttaggtattcaagacaagcctgggcaacatagtgagaccccccccccccgcccccatctctacagaagatttttttggcatggtggcacatgcctgtagtcctggctactcaggagactgaaatggagtatcacttgagcccaggaattcaaggcttcagtgagctataatcacaccactgcattccagcctgggcaacagagtgagaccctctagatatatctatgtagagatacagaaattaaaatgaatttaaaaataaataaatttgacccttcttttggtgtgtcagccattgaagaaaatgattattgagtgatagaatgaatcttggcttttgtttctaaatttaactgccctagaatcctgggtttggcctttttctgccagaagctgctgccctaggggcaaagttctccaaaagtttttcagtaaatcctaagatgcaacaaatataatgcctagatagacaacagattctttttacatgatatgtttctacacgcacatgatagaggtcttttggtttttaaattctcaatacttaaacctaaatatatcaaagtaaaagtatgtgaaaaaaaactatgctagttataggttgaataatgtcccccaaaatttatacattgaagccctaatctcagtacttcagaatgtgactgtaattggagatagggtctttagagagatagttaaattaaaatgaggctgctaggttggccctaattctatatgactggtgttcttaaaataatagattagctgggcacagtggcttatgcctgtaatcccagcactttgggaggccgaggcgtgcagatcacctaaggtcaggagttcgagaccagcctggccaacatggtgaaacgtcgtctctctcctaaaaatacaaaaattagccgggcatggtagcgggtgcctgtaatctcagttactccggaggctgaggcaggagaatcgcttgaacccaggaggcagaggtggcagtgaggcaagattgcgccatcgtactccagcctgggcgacagagcaagactccgtctcaaaaagaataggagacacagtgagacgaccatgagaagccagagagaaaacagccatcttacaagccaagagagaagttgtgagaaaaaaaaaaaaaaacaaaccctgctgactccttgatttttgccttccaagctccagaactgtgaggaaataaatgtctgttgttttagccaccaaacctggtaaggcagtcctagcaagctaatacaatagcctgttccttaataaacaactgcaagatttagtttatagaaaccagctcggaagcagttggtttagaatgactttcctaggaatctggtcaagaaaggaacttactaaaagactattctcatttaacaaaagagatattaagtatctcaaaggccaaatctttaaaaagattatctgttttaagccacaaaacatttgtgtggatccctttgcagcaagtttgctcttagataagattcagtcttcgttctcagctgttgcaggttaaggcttgtgaaatgatccaaaaagggaacagcagcttttggagaaaacttttatttgttcttcattctagtgtcaagtttaaaggcttgaagtcagaatgttagaagtggggaaggggaccttagaggtgacgtcttccagatgttcctgtttatgcacaaggggacagtctcggagaattaaggcgcaaaactcgggtcccaatttctaggtaggttcctgtttgttctgctgctatcgtgcgcttatggtgactgtgtgaatccaaccaaaacggaggttccgtatgccagtggggcaacgtttttcagctgcaaatcttgggaaatcaaaagcaaggctgttttttttttcttttcttttttgagacagagtttcactcttgttgcccaggctggagtgcaatggcgcaatctcagctcactgcaacctccacctcccaggttcaagcaattctcctgcctcagcctcccaagtagctgggattacaagcatgtgccaccacacccggctaattttgtatttttagtagagactgggtttctctatgttggtcagactggtctcaaactcccgacctcaggtgatccgccgcctcggcctcccaaagtgctgggattacaggtgtgagccaccacrcccggcctcaaggctgtgtttcagtgaaatatcccttgcaaatctttacctgggtgggttacagtgttttcactagactcttcaatagaattaatattttaagaaatgccacttgtttatttgaaaagtataagaatcctatcaatgcagtaggcatgaatgtattcatgtgtctggctgttcatgaagcagctgatatcttaagtgtaagaggtgagatttactgactaccagtaaaatatgcgagttgggaggctaatgattttaaattgtaaatgcgtctgcataagatcctttaaaatagcttttattgttcttaaatttatgtttaaaagaaattgacattaatattttcaaatcatccataatctcccaaaccttttttggttttctgtttagtaccatttaaatctttgtgtatgtgtatatgagctacctttaaaagagcagtcacccatgcgagcatttgttacccaattagtttgtacttttttttggtttttattttgttgttgttrtttgtttctttttgagatggagtctcgctcttctcacgcaggctggaatgcaataatggcataatcttggctcactgcaacctccgcctcccaggttcaagcgattctccagcctgagtctcccgagtagctgggattacaggcgcccaccagcacacccagctaaatttttgtatttttagtagagacgggtttctccatgttggtcaggctggtctcgaactctcaacctcaggtgatccgcccgccttggcctcccaaagtgctgggattrcacgcrtgagccactgcgcccggcctagtttgtgctttttacttaccagttaggggttatattactgtgtaacaaaatggacggttatttctattcattaacaagattcaagtaatagcctctttagccacatattccttaataacacctttagaccttataggggtaattattttctatatacttttccaatgtatttgaaagtttgttggctcttcttccgtaattatactatatcctcagtaaagaaagtttggcatacagaaaagttgaaggaagaaaattttcaatcactgttgttccactaccaagaaataatacttggaggtatttcctttcaatcttcaacatgaggatgctaatgtccccctcataaggggccttaaagtcactgactctgtgcactatttcatgagaacattgatgtgggtatttaaccgaaagaaaacttgagttttctttttttcctttttattgtgaaaatttggaaacttattcaaaaagtagaatagttaactaattgatgtacccatcagcaagcttcagtgattaccaccatttaattttgtctgcacccccccacccactgccaccccagcccattcccagcatgtgcctctgaaagagaccaactttgtcctttaaaaacaaccacagttggctgggcacggtggctcatgcctgtaatcccagtactttgggaagcaaaggcgggtggatcacctgaggttgagagttcgagactggcctgaccaacatggagaaacccgtctctactaaaaataccaaagttagccgggcgtggtggcgggtgcctgtaatcccagctactcgggaggctgaggtaggagaatcgtgtgaatctgggaggcggaggttgcagtgagccgagatcacgccactgcactccagcctgggcaacaagagttgtctcaaaaaacaaaaaagaaagaaagaaaaaaacaaccacagtttcatcagcacagcaaaaaggtttttgtttttgctcttggattttgtcgtttggtttttgcttaatatcaaatatccagtcagtgtaaactcgtttataatttggtcctttgatttcaaggagctatgatgcagttcgttgtggggatgtgttgtctccatgtcatacatgtgactttgtccatgtttgcacccagttcaaggaagacacaaccctagggaaagacaaccctccccgccaagcctctcttcccattcttaaacatagggtggcgttattcaggttggaccagtttaaaaagactaacgcatttgtcctcgttgttgggtgttttttttctttaaatttgtaaaacaggaataattgtgttaggatgaagtatgatactaggagaacagggaaaactaacccatcgtgttaaaagtcagaatagtgcttaactctggcaggaggtgagatggttagtaattcagaagggggtgccaggagagcttccagagccattgaaatgttcagtagcttgatctgggtgatgatttacatacataaaaacatattaaactttgaacttaagatttatgccttttactgtttgcaccctataactccaaaagaaaagtagaggggaaaaagagtccctgcaaaaggcagtcttgaaagaaagcaagtctgtgatgtggagaatgcattggacagctctcagcaatttgctgtagcttgggcagagagataaaagctaatgccagcatcaggttgcccaggcgagagaaggcctgaaagaagacagcgtggagaaagtgtcagcaagcttcagcaacagcaggaggcagatggtaggagagtgggcctcaggtgtggtgtggcagagcagagtagccacacttaggccccagagacagtgtcttctcaccctcagttgaaggggcaggaaatcaatcgctctagtcacccccaagctggaggacggacctaaagttgccacagctttgagaggcaaagaagtttgctcagtggcttttagagacttctagggccctgggaccctgacactgaggaggagcaaactgaaggggagagtgggcacattccttgttggctgctgtggtgagcagcagctggtcgttgtcagtcaagctccggaccactctgatgatgctcactgcattttgatggagtaagccagggacattaccactgtgtttgagccatctgaagtattcctgggtgggtctgcagttggcagcccgtgatcctttttccattcaaggatgatgcaaaggtaaggggccaaggctgagctctgtagatgcctgtgagagcctcctggtctcaagaggtcataccaagggccttggccaccaaggtttcgtgaggaccttgaggtggtttcgccatcacaatgtcagacgtgtcacacaccatctggtatgtcctcactgtatagaggaagaagggcccaagtggtgaattatctacaagtttgtagcaaagctaatactcagactccctctacagccttgctactcagtgtagtctgtggtccggcagtgtcacaccactggggtacttagcagaaatgcagcttctcaggctccactccagctctcctcaatcacagtctgtttttttgtttgtttgtttgtttgttttgagatggagtttcgctcttgttgcctaggctggagagcagtggtgcgatcttggctcactgcaacctccacctccctggttcaagtgattctgctgcctcagcctcccaagtagctgggattacaggcgcccgccaccatgcccggtggcgtgcatggtaatttttgtatttttagtagaaacaggatctcgccatgttggccaggctggtcttgaactcctgacctcaggtgatccacccgccttggcctcccaaagtactggggattacagatgtgagccaccacgcctggcccacagtctgtattttaacaagatccccacctcagtcttaggcacatggattctcctcaacccccaataccacagagtctattaatttttacccaatagggaaggggaaaaagtcaagaaagaataatgaattaagtaatctttccccctccaggaagctctttatttaatttcgctcccatgaaacacaatttgaagagtctctcaaataaacaaattccattttctgataattatttaattgccccacttttgaaatttttgtcaaagacgactgtcactccctgtcagaacttctattcagcacagtataccaagcgtttctccatcgagttgttataatatgatcaaaaagcagggagagatgctgcttggttaccctgtggggccttatcggggctcagtgcagtctttccatgtaggcattctcaaatactcaattgaaacctgattgaggatcatttgatctctgttggccctagtgcagtaggctgctgagaaccactgatgcaatagactgagagactaactgcctgcttccctgtcagcccaggctctgctaaggccgtcttagttacagaagaaagtggggcagagagccctgcaaggattacattccattcctaacggagacaggcaagcgttcagtgcccgaagcagggcaggcctttgtatggctcacttttccctgtaccagcctcagccccgtacattcagaaagccctgtcgggaacgtgcgggatcacagcacaagacagtcattcactgattgattgacgacgtcaacattgcggaatacctatgttaagctgagtacgagggatataaaaagtaggccctggagagtgcctctgggatgcacataaccagacaagataaagaaaaggcagatcacgagatcaagagatcgagatcatcctggccaacatggtgaaaccccatctctactaaaattacaaaaatcagctagacgtggtggcgggcgcctgtagtcccagctactcaggaggctgaggcaggagaatcgcttgaacccgggaggcagagattgcactgagctgaggtcatgccactgcactccagcctggcaacagggcaagactccatctcaaaaaaaaaaaaaaagaaaaaaaagaaaaattagggcagcttttagacatgaggccccaaagtgccaactagtgcacctaaacttcaactctcttttgagtgttttatgtatctactcagcatccagttgtaaatatgcaaaaatcaatgcctactgtatttaaaaattactaaattcacaataaccacacagaatctataataaatagaatcaatgtaataatgactcagatccaggggaagaaaattataaaattttggaaaaaatgatgagctattaattaagaaaatagtttgttccttggtgagaagactcaatgtaaatatgtcagttttctcctgacttaagtcttcaacacaggcctaataatattgcagtggcaaatgattgccaggggcaggaggggatttggggaagtggtaaaaatgatctgtgtcttggtagtggtcgctgcacaactgcatacatctgtgaaaactcactgaactgcgcactttaaaagggtgaattgtaatatacatacctcaataaaccttacttaaaaattacagtgtcttttttttttgtagctcaacagaaagattctgagatttggaaaaataaatgtgaaaaataagaccaaggaggaaagacctgccttatcaatagtaatctatattgctgagccataatactttttttaaagtgtagtacttatgtagcatttaacagaaagatccagttggaaataaaagtatggaatagatccatattatgtaaaacgttactatgtaacaaagatagtatgatgatcaagattattaaaaatattggaacagtgattaatgaaatgaaacaagttaggttcttagtctgtgtcctcctttaaaatgaacatgagttttacaatacccactgcctcctccctttctttctctggaggttcagaatgagcctgtttttgtaaccaccaaagtcagactaaaatagtagggatggtttttgtaagcatgacagcaaaggcagaaagcataaagtaaaccattactaggcttgatcaaaaatatataacaaagagttactatcaccgatatataagcagtgtttacaaattcataaggaaataaaagatgaacaccctggctgggcgcgggtgttcccaccctgggattacaggtgctcacgcctgtaatcccagcacattgggaggctgaggcgggcggatcacaaggtcaggagatcgagaccatcctggctaacacagtgaaaccctgtctctactaaaaatacaaaaaattagccgggcgtggtggccggtgcctatagtcccagctactcaggaggctgaggcaggagaatggcatgaacccgggaggcggagcttgcagtgagccgagatcacaccactgcactccagcctgggcgacaagagctagactctgtctcaaaaaaaaaaaaaaaaaaaaaaaatgaccctgagaaaaagcagggcaaaggacacaaacagcttcagaaaagaggaatacaaatagttaataatttaattcaaacagtggaatttttgtctcagtttgacaaaacactaaaagaatgatgttacccattgaggatgggggtaaaatggactctcacatggaaagcgatggaatgtgaagtgtggcagtctttctgggtagcaatttgttgatatacagcaagccagctattccatctttatgcatttattaacagaatcatagatatgcacaagaatttgttcactgcagtatttttgtaataatcatggaaatagtaaataatggaaaacaacctagatgcccaactctagggcatccataagatacagcagaggccgggcatggtggctcacgcctgtaatcccagcactttaggagccaaggcgggcggatcacctgaggtcaggagttcgagaccagtttggccaacatggtgaaactccgtctctactaaaagtacaaaaaaaattagctgggcgtggtggtgcgtgcctgtagtcccagctactcagggaggctgaggcaggagaatcacttgaatccaggggctggaggttgcagtgagccaagatcgcgccactgcactccagcctgggtgacagaggaagactccatctcaaaaaacaagcagacaaaaacaattacagcagataaaacagtggtacattcataagtggggtaccgtagaaccattaaaatagagctattgattaatatttaatgatctgaaaagatatcc

SEQ ID NO: 97495 - DNA, 14835 bp, Homo sapiens
tgacccggcagtgaagaaacctttgttgttccatcttaggttgttgggattgtggagtttgtcagtattgtagcagcagcctcttctgtcctgactgagacagaatcagacctggtttttaaccctggttgatcagttatgaactgtggctacagacacataactaatagtctctgtgcctcagatcttccatgaggataccacccccatgtcattcatgggggttgttgtgagaattaaaggagaaaatgcgtgtgaaatgcttggcacacagaaaggactcagaaaagtctgcctgccgtctttccttaatatatactatgtcaccttatacccattttatagattaagaaactgaggttcaaagaagtcaggttttccccattggtcacacagctaagaaatcactgcagagtcaaggatgaagggtgggagagggaggccaagtagaaacaccaaggtgtggaggtctgggcaggcaggagccggtggtgccacgtggccctgtgaagccgtgggcagctggtcagacactcacccttgcttggggctttgacattttccaactggacacagacttcttctcaatctattttgttagctggatgacagagatataatctcctcatctggaaggtgttgtccttgttactatctaagatcaagttcttttaagttctggccttacacgtgggtgtgtggcttttcccttgaggttttcagcttgtgtctggttcccaaccaaaccccatgttgaatctggtggaaggtgggtccgttgcgccctctggtggccaccatcaccaggcgctcttggccaaggtcctaatgaataaacctggccgttgggccggaccagctctgtcgccgtgagccagccatgggcactcatcttcaaagtgcttttctctggagcaacaccgtcccctgtccccacacccctggggagtatggcgcacttgcaatctttacccgggactcaggaaccccagcccttgcgatttaagttctggctacatccctaaccccctggtaagtcacttaacctccttgagtgaagctcagtttcctctttaaattcccctctcgagagaccaatgcctcttggcaggattgttgcaggattaaacgagcttaatggaggtaaagcactcagcccccgttgccagcgtgtgaaaaggaaccagccgcggtcattaaaagctcctttatttcatgggtgttgcagctgtctggctgcccgcccgtccccccactaactctcacactctggtggcagagaccttctcttgcccatctctgtatctctagtccccatggccctcagtgcgtatttgccaagtgaaatatatacataaagcacattcgcttatcacagtcctgtgaggcagacacccccggaatcactgttcccggtttgcagagagggtctatccgtggaccccggtctttgactgctggggcctgtgactgtccatgggtgtccatgacccagtcatggcgccctctaacgcatcctctctaacttcaacccggccctccaccctagccaccagctgcctgtactcacagtcattttctccgacggttcacagtccatgggaaaacgttcctccattgttctctcctcctgccttcgcctcagctcagcattttatctccccaactctaggggaaaaggaagctatcagacggcaatgacctcagcttcgtgccgctaaagctgtctgcccctgcctggatccccaccccggcccctcaccatcctcttgtgatggaggcgggggtccctccaagccccttccctctcgagggccctgctccacactcctccttctctctgctgcatcttcctctctctactggctccttctggacagcatttaagtctgctgcagtctctgctgctagacaaagcatccttcctcaaatatgtgaccttctcctttaaccctgcacccacccctcatggcccttccctgtttctctcctggtacactgctggagtgccctactcactccttatacatgggtctttgtagctattactctattccagcctagtttccacctccatcccaaagagagcttgctcttacccaggccatacatggtgccccttcacctctctggggacaggcgtcaccagggcaaggcctcagtctccttgaagtgaccttgctatagcctcagaggcaccacgaagccagagacctgtggcctccctggctgcttcttctaacctcctttcctgtattttgctccttggaccatctcattcaactccctgcaggccacatgcagacccagggcttcgtgatctatagcctgatgaggcccagatttctgtctccaagtgggtggggtcttagggcctcaatcccattaccctcagtatgggctctgagctaatggagggattgattcaggaaccacctgcagctgtgttctgagtcaagctgaattggggcatgtggcttagaattgcagcaaaatgtccctgctcgttatctcatccagttgaactgactttctatacccaaacacaacctcctctttgcggcagccccatcagcctggaaggtgagccacatggagccacgtgggggcccagaaaacaggaagcctctgcttttcacagctgagctgagaggtgactgagctgagggccccagggtctgatcagtcagctgagtcttttccacctgcaggaggtgcaggtccaagggaatcagaggagggcagagctgccgtattcggggggcttagggctggggagagggagaaaatggttccctgcaccaagctccctcctcgaccaccatctgcagcccgctactccatgtcccctgcttggcagacatgggtcattagtctaccccttacagcaacctttcagggcaggtgttattattacttctatattttgaggggggaaactgaggctcaaagaggccaagtcccttgcctgcctgaggtcccttaccctgtgaaatggtggcagtgttagtgtgggcatgtgagtcagcttaggctaccattaaaaaaataccatagatcactgatttaaatagaaatgtattttctcacagttctggaggttggaaatctgggatcagggagccagcgtggtggggttctcgtgaggcccctcctcctggctgctgatggctgcctttcactgcagcctcacatggtaaagaagtctctggggtctcttctagggcactaacctgatcataagagcccccagtcacttcatcaaaccttaattacctcccaaaggccccatctccaaataccaccccaacagggtcttagggtttcaacatatgcatgggtgggggtggcacaattcagtctctagcagtaggactggagtcaagcacttgcaagatattggggggatacgggcacgtaacagctgcatctctgagaagcaggtaacctggaatttgctgaactatgaggacctcaagtttcagctgaaaatgaccaggagagctttgactctgacacgtggatgaagcttcaccttgttctccaggaatggttgggcccagcacaggcatcagagggagggagggggcagggcagatagatacattgttaccatcattgctatagggaatgtcatcagggtaatatcccacaggtgtttgaaaatgacccccagaatccttgaatgaagcaatggaaacagcagaggctggctcttccccagcaggcgaggaaggcctggagaatcatagatatttcctctccaggtcccctagggcatcagcttcctggacatgcctcagatagcctctgtcccctagtaggggaggagactctgagggcacacagacaatttccttttgtggcatgcagacattcagtgaatcctgtgtgaataaaccacctgccagaggcattgggaggacaagcggggaggctcctatgactggacattggaggacagggccacccccaccccctaccctgctaggtgacactgtggtcaggcaggacggctgcccctggaaggtgctcactcacagtcaggggcaaagtggcagcctctgagggtcacccctggtcactgtgggccatcgacaaaagaaaagaaagaaaagaaaaacgagggggcatgggtgggaaacaccagccatggctgaatgtagagaatgacccaacagggtcgccacactctcctttcaatccctgtgcacattaaatatcctgggaaagcgaagaggaaatcggaaagttccacttaggaacttctttttagtcccttcgctttttgttgacggccaagcatgtgtttggagcagcctcgcggttattcctaggacttcccagcgttcccaggccaaatcctgggaggatctgcattttggggaggggtcgggggggtgcagaagcagatgggccttggctctggtcccagcttccaggcaggtgccggggtgtcttggaggaatgcctttaggccctcagggctgtccaaggagggccctgacaatttctttccctggccatgggctctagcctgagaccagggtgcgatgtgcaggacagggcggccaggcgctggagccctacagagctggcctggaaaagcgggcggcggggccgactgcagcatagcaccacctcgtggccgctggtccacattgcagctgtgatgtgaggccaaccaggagcgaatttgggggaggctgtgtctcctatagaacggatggctgggtgggagcgcgtgttagcgccagatgacggcagggccctgtagggagaggacagagaagtgatagggcaaggaggaaagggaactctagagttgaagaaacaacttaaagatacacgggcaacatgaaggcccgtggcagggggcaggagcaggacagaggcatggggggagggaaacagaccgggctccccgacagagccttgctgttcatttcagtcttgcacacagctccttctcctctcccgtgtctgatgtactaataactaacatttgttgttgtaagccttttgcgtgtgttaactcattttatcctctatgtgtatttatatagaggtattatatcattccaaacttatccatcaggagattaggcagcgaggttaagtaacttgctcggactcacacagctaataggtaggacccagggcggcctggctccagagcccctgtgtgaatctctgccccatccttcctctgggggctgccctcagaaggtccccatagacagtgtctcaaataactcaacgtctttgctaagcacagagtgacagggaggcggcagggcagacaggaggcccgggactggagagaggcgcctggctgtgaacccacctccgccctcagccatgcagcagcccgcagggctgttctgagttaaagatcacgcccatggaggtattgtgtgccatacaaactgggaggcctggttactgtgtataccaattttatcttacaggctcgcaacattgggtttctgaatctgtttttttttttttttaaagggagattagtgccaactttggaccaaactcttgtccatccctgggtgtgcccgtctctgtcgggggaggacagacactagcccagcccaatcaggccctggccaaggtgaattcactcagcaaacgttcaagcaggtggtgcatgtctactgggcctctggagatgcttttgtttttactcccacatcccctctgaaggccagtgttgtcgcgcccatttaatacatgagacacgcagctgaggttcagagaacttaggtgactcgccagtcacacggcaggtaatgggactcctgggcttgagaagaggcctctccaaggcctacgctggggctctcctctgtatcctgaattctggccattcggtagtggcgacgccaacccaggaggccctctgagttggagtgttgaaggaggcgcaaatgcatgacccttgtagaaaagcaacaaacacacccaaacaataaaatagctctttgtttattcactttgatttggatcattggaaatattaamcaataaataaaacagagcgggggctgaggaaagcaggatcttgctgaagtcattcgaatgcatcccaaccagtgctcagctgcgtaacgacatggagagaggcaggggggaatagaaagcaaatttwaaaacaccaacacccaaacacacaagactgcacacaagaaaaagtgctcaagaaactttggctttgaagggaattcagtgaagggaagcgattgtgcaggaggaagggaagaaacccaygatcaccctaaggggcggggggctggagggcgaggccctgasacaggctagggttaaagctgacgtcccacagctcaggacgtacaaccgatggcagttttgtactaggaagaagctgagtgatgaggctgggtgatgggatcgcttgacgggctgggagggaggacaggaggtgtaaaggtggctcaccttcccctaggaaattcagtgctcttttggtaagaaaaaatagtcggtaatgccctgatcctgacaagctgtgagatgctgtcttgcctgtctctgccttttcttctaagttttcctccttttctttgcacaggtgtcaggtagcaccccaggggtgcaggagctggtgttttcatgacaaacaaaaatggggaggttgactctatctcaaaactagctagcccagtccacagggcaggataatcctgatggcgtgtagccacatttgctgcaaaccagatgtctgcgatggatataatgatacccccggggctcttctcaggggtgaggacaggtgctggttcctgatggtgcatggctggtgtccagtcatctttagctgggcagtggcccctcgaggctcgggcttccctgcacaaggtatttttgatccttgccagcggagggagagagagttatcttggtttcctttcacttgttttcrggctgcttcaaagcaaacatyccagttccaaatgttctttgtggtttgaatcctggcagaggccagggtcacatccaagtgggactggcctctagcaccaccttctggccacagcagagaatgggattccatcaaagcctctcaaccagccgtttccctaaagaatcacccagatcttaactgccctctccaccttctttttttttyccctcctattttacattctattttctcatatccagcttttctctctaagcctaaccaaatgctttggtgaatgatgcttggaaaagctggagttttaaaaggcattcatccatttatgaactttcttccagcccaggatccctgcagagaaccagaggttacaaatctgccctcctttctcccctaaaaggtggctgaggggaggagaggtgcatgtagctccagctatagcaaatcagtgccctgactcactggggakacccagggggttgggatgttgctgacacctcatgggccacctcatcagcccatctttgtagcttcaggttcagctctgggtgctgcaggcagggacccctctgctccctgcctgaatgcagggccagtctccaaggaactctgtctgcagagtagaaagagctgtgggctgggawtcaggggcctgagggagcccctgccactgcctgcccagaaccagtgctcctcattctcctgctgacagcatgcatgtgccttttggctaacacacactcttgtctaattcccagccaccttcaccccagggatgagttccagttggtttaagccaractggtgcatttaattctggctgcaacaactggattctgttaagtgcccattgctaagccaatgagctatctgctgggctgtgggaaagagaaatgcagtctcctgcacgggagggtgtgagaaggccacccaggcagcctgcagctagagctcggcgctgagagagcacaggagagtcagacacctccattctggttacactttttccagatgctgaatggagactcgctgggaaagcccgcctccagacaatttcaacatagcgccggtaacaccctagttttgctcaaactctgacttgtgctatctgtcccagacagttcacgactgcccgtcacttccstccttcacactgcaccaggaaaaggccacacctccctacacagcagcagccttttaggaaatgtgctcwacaggaaaagtggtttttctgattaaacatcaggaactagagtcaacaatcgctgtcctctcccgtgcctgtcacgctccactccccacccagctgcaatgtggccttgattttctcatcagtaaaatgggaaagctggatttggaggctggaagagatctcacagcttgaccaccctagtaggagggagggagaccagacggaggccaggcaaccgacccaggcagcatctggctcagacgcagacacatctkcatgytgagggacctrttcttacacagcaaaacccagagaagtcgactgctcagcctgagcctgtcatccctatatagactcagcttttaggagaagagggagagttgaggagatagcatcgctctctgtatcagtgtctgatgatctggagtctgcccctggggtcactcagtcactcaacaaacatttgttgagctcttaacgtcatatatgggtgtgagctctgcccttcgaggctgtatgttctgaatgatgactcagtgatttaccagcctttctcagaaaaaagaaaagtctttaaagttttggaggattttaaagctgaaacaggttttcggtttgtttaacacattccccattctgaacctttgagaatctaataaaagctatggtcctttctccagaaaaatgctcatatgcagagattcagggaaaaaaccaaacttggcacgcaacttccggggactcttgtgaatggcctgaagccacctgtgacccatgactgatgtccccaagttcctccctccccgtgtgcagagggggctcccccgagcctgggagcacaggccccatgcctccgtcacactccaccaggaaaaagtcacgcctcctcaaagcagcagcgaccttttcagggatattttcaacaagaaagtggtttttctgcttaaacattagtaactggagccaacaatcaccgtcccccacattcctgtcactctccactccacacccagcagcaataaggtttcacggagttttggagactcctagcctgagaataaatccaagtccacaatgaggaagaaggaaggttgggttgggacgggaggatgctgaggacattccacaaaccatccaagccctagatacccccaatatcccacgtccgaggactcctacaaacctcccttaagcacccccacctaatttcccagctactgggtgaggcaagcttcattaaaacaccaggaccaccaacagagccagggtgcaaacaatgtcagttgaataaaaaaaagaaatcaataaataatcaggaaggctaatgaggaaaagagagtagctggggagtaagaagatgaggtatgtggcagttaccattcctgggatgtccttgacccagacccccagtgacagccccaagatggccagcagggacttgaccctgagctcaggcccttggggaaaatgctgctggcagcctcctgtgtggctttggaggttacgggcaccatattgaacagtctgagaatgagaatgtacgttccattctgacgcactgctgggtggtgttgagtatcctcagagcttcgttgcaattcaggtgctggctcaggaaaccagaaaagatgttcccagctacggagcaagcagggccgctggtgggggtcccttttcccaagtaagggcttttgtttcatttcagccaatgcatgcttttctttcccaaatacaaaggcacatggaagtggtcagatccgctctcgccacgattagaaccatgagactgactactcaaaggaacaactgcttgggaagaggcatctgcaggagtcagaaacacggtgccaagtttggggttttttttcttttctttttttttttttttcagagacagggtctcactctgttgcccaggctggagtgcagtggtgtgatcacagcccactgcagcctcgaactcctaggcacaagagatcctccctcctcagcctccctagtagctggggctacaagtgtgtgccaccgtgcctggctaatttttttaaatcttttatttttgtagagacaggagtctcactatgttgcccaggctggtcttgaactcctgggctcaagtgatcctcccgcctcggcctcccaaagtgttcagattacaggtgtgagccacggcacctggcctcaagtttctgtgaaaatctttggggtaggagcctctggtggctcataaatgagctttgggaagatgacagggttatcacgccaagcaagaggccaggcttcgtgcaaagaagggcagcatctcgccccgagcgccaacaccgcctggcacgtctctgtgctggaggtaatcgccactcaagtctctgcccatcttcctgggaaactgtcctgtctctcagaatataggcatcttccacattcattccccaagcttgccccaggagccaaaatgattttagtgtgtggaggttgaacctttcccagcgtctccccagctctagggcagcagtggggggacgttgtccccactcaagacaggttccaagacatgctctgccacgctggcagagcttagtgaccttgctgagtagatgctgccaacggctgggtgcaagaggctgtgagcggtgcccaggcacacacctgaggctgcccctccaagctccgggatggaacggctccagcaagatgctggggctggaaatgcagaggtgtgacagtgcgtccatcctcagcccttcactgcgtcatctccccttgaagatccggattttattgatggaggccaaggtggccgtcacgttagactcaaagtctgcatcgtgcacccccgtcttgcgaaaagcccccgcggatgggttgttctcccagtagtggtgccagttccctttgctgtctgccccgaagccgtacaagtccacctgtgggagcaaagcaaagatgagaaccagacagcagggctgctggtggcacctctgagaaaggaagcctgtaggcgttcctggaatcccacaggaccataaacagcatttccaaggactctgactaacccttcattaaaaacccttctctacgttcctggaactctcagagtcttggtgaagcaaatgcaagttaagtaaaactcaagtctaattccagaagcaccctgagagattactgcatctgggtggtctcaggggcccgggtcttacctctgcagcaagtgcaacctattctcccaggattgaggagctacagagggaaggaataggaaggagggcgtggaatggaagagagtggaaggagagcagggctttggggccaagcaaactgccccaaatcccagctctgccactccgtggtgccctgggcatgtgaagtcacttctttgagcctcactttcctcatctggaaaatgggtccaagaatcatgattgcagtgaggcagagggcagggctgatccctttcttctctgtggccaacattcatctggtccaggcgccctcagggccactagaccaggcctttcacatacatgacaaaccctgtgcatttattctgagcccagcaccctgctggctgtactgaagttcaggcagagcttgatcagatgccagctgggcagctgcagggggaagcagccttggagcttatagcttcttggagtcactgactgagtggtccttgttggaaatggggctaaattcagggctcccgcagcacagaggagggaggagctatgccctgagaggtcagaggaagctcttcagaggaggtggcatgtgagttgggtcttggaaaatgagtacaagatgaccagaaggaattgcatggaggggcttccagggagaggacgtgctatctgggctgcagcgtggaagatagattggaggggtggggacaaagaggggacggggacagcaccatgccacatgtggctttctcaggaaatgcaacatggacatgggcctgctccagggcaagaacgttagggccaaatcggtgggacgatgggagaaagggctcttgagcagaacctcaagcaagggtctgggaccagctggctggaggtgggtggggtggggaaatgacaggggcacccatgtttctacctgggaacaccagggtggggctgagcctggggacctgccttgcaatgcctctgaccctttctgagattcccaccaggcaccaggcagggtggggctggggctgggctgaatgagacaagaagggacacgtgagggccctgcctgaacccaacatcagggaggaagtgggggctgtgtggcctgccctcctgcccctcttcctggggtggcagcaaacctctcagagcataagtggaaacccgaacacagcctagcggacagcgaaggacatgggaaggcaaatgcatgcttctcgagatcacgggttctcaacctcggtagacagtggaacccctgggtacctggctcccattaattctggtaaaattgggccaaggtgtggcttgggtgctggaacttagacccacagatgattctaaggagcaagtgggattgagaactgtggccttagacaactctcgctatgagaatccgcttctgtatccggaatctgctgcgagatccgagcttccaccaccacggtcctgggcacttacacagaatgtgccagaactattgctcccgagaactttctcatagagcactgttactcactaaaacaccctgggagacacatgttgcaagtcctgtcgtagagacagggaatccgagcttccggaagaggcaggctaggtctacctgccctccccctccctggcctctcttgggaacacaggacggtgagcttcgaggcagccctgtgggcagggggagggtggcatacctcatcgcagacatgcattgagaagatgaccgagaggatgccggtagatgggtatcgcccgtgcccttgcagccagttgtcaaagacatacttgatgaaggctgggtggtagatcaggatctgcggggatgggaagacacggcccttagtgagttctggggggcaaaggacatggagcgcctgtcagatgtacatactgttgtggccatggaggcacagccatgagcctaatagatacgcctgcacttgtgggcttccatgctcgtaggaaagatggacactcatccacatcactaagagacagaggtgctgagctaataagtgctatggagagcaatgatgcagaggagggccctacaggaccgtgtgaggaggatcactgagctgacacacagaaaaatccaaggaggccagggagtgagatgggaggctgctcaggagaagggggctccagggaacagtgtgaggtgggactggacactgtcagtgagtgaagacatatgcaccaagccacctgatgatggctggaatcatcgccaatccttaaaatgacctcatgtcccaggtttccctctcctcatgctgcagataagaaaactgaagcccagagaggctaagtgatctgcccaatgtcacacagccagcagtggctgagctgggaggaggccgatatcaggcctggccttgattccaccacccaaagcctgccttgagcacaacgaaagggaattctcaggcaggagagggcgtgcacgtccagaaagccaaactccagcccctaggaatggactggaagggtggattctgtgggtctctggtaaaccattcacctctcagtgtggcctcctaccatctctaggaggctgtcccttccaccaaccccaccctatagagacacataagtggcttcttccctgaggcagcacaacccaatgcaaagggcaagatgctggaggcacggggagtcttcaattctagccttatccagaactagctgtgtgtctctgggcaagtttcctgacctctccgagcctatctaagtttgatagagtatgcaaaaggccagtgtggtgggtacctcacttccctccttcttctgccctttgcccatctcttggccagccccatgccaggggcctgctggggaagatggagacatggaaagagatggagaagcaggaggtgcagcctggctttgagagtaattcacaaaccgcagcaagcacaggggtccccggagaatgtgttaaaaccagaatgcggggcagccagggtttctgattcagtaggttcgagatgggcctgaggatgtccatctgtgacaaactcccgggtgatgctgctggcccgggggaccccactttgagaatctctcccagtgtttgacctcttcccccagggggatagctaagtgggagatgctacctccagcggcctggggatctgggggctgtcttgcaactcaatgccgtaccttagagcagagccttagatgaggaagcctgaacttagaacagaggggccggggcctccactcaccttatcctgtttcactctgatctttgcaggaaccgggatgtaggtgctgcagttggagaaagagaagctggttaatggggcaggggacaggcccaggaacctgggcatgcagctctgggggtagtggctagataatgaagcaggcatagcctctcctgccccccatagcttccctcagggacccccacctccctaccccagccgggtttctgcccacagcaagccccaatagacaccagaggacggcctttcctaatttgaggacattctgctgggttttggccccattcccca

SEQ ID NO: 97496 - DNA, 12461 bp, Homo sapiens
ttcagggaagtcattccagaccctctaaacttactcatattccttcttgatggtctcataactttgtatacactttctttctagaattgactcaaattgagtgattattgggttaatatctatttcccctactagaccccaaattccatgaaaacaaagaccatgactctttgtccatcattatatcagtagctctcaatgcagcctggtcacatagtaaatttttgaatgaataaatgaataatgattaaatgatatacagagaatctacagctgtcttaaaaacactgggctgccttgagacatcctactgattaaagagaaccaagtatgttatggcttgtttcttgagagggctgtcaactagctcgggaacaactctgatataaattatgtagtggcaatctgagtgacccataaagggcaaatatttgatgaaagacaaaaataaagtagtaaatggaataaaatataattctttaaaaaagtgttgttatataatttgtaagcttctttgggccttaatgtaaaagagaaagggaaagggctctgtgtctgaattcaagctctgccaattataagtgccacttataaatatgacctcatttaaatgccttcatctcctgaagactattcaatatttacaaaatgaagataagtatgctcattaaagttaatgtgtagattaaggaaatcaagttacgtaaaccacttagaatagagttgagcaaacagtggcacttactaattcctacattcagcaaatattgcttaaaaacctactagtggcaggcattgtgctagaaactgaggatttgctgttgctgttgtttttggaactgaggatgtaatgacactgataacatctgtggtcgttgctgttttttcctacagaacaataatggaataatggtgggctattttttttctttttaaaaaaacactgtgctatttcatagccatcagattggcaaaaatgtaggagtataaccatgtcgtgttttgctacagatagaatatagaaaaagaaaatctcatataccatagtttctgaatatgaaattgtacaatcaatgcttcagttgctgtaccggtgtaacaaattaatccaaaacttggtaacataaaacaatcatttattatgctcccagtgggtcagaaattcagataaatcacagcgggggcagcttgactctgtttcaatgactgggaccgcaactggaagactcaaaggctgggagctgcaatcatttgagggttcactcacccacatgttgggtggttgacgctggctgaaactttaactaggcctgttgactgaaatatctatagaaggcctctccaggtagcatagaagttctcacagtgtggagattgggtccaagggtgagtgtcccacgacagagagggtaagccaaagcagaagctgtagcacctttgatgatctagtcttgaaggtcaggcagtgtcactttcactgcattctagtcattagaagtgagttctcaagactaactcatactcaaggaatgggaacatagagcctattttagacagaggggagccaatgttacaatgtaaaaagaacatgtagaatgggatgtgttggcatggacattttgtttttgtttttgagacagaatcttgctctatcacccaggttggagtgcagtggtgcaatctcggctcactgcagcctccacctcccaggttcaagcgattctcctgcctcagcctcccaagtagcagggactacaggtgtgtgccaacatgcccggcaaatttttgtatttttagtagagatggggtttcaccatgttagccatggtctcaaactcctgacctcaagtgatccgcccacctcagcctcccaaagtgctggaattacaggtgtgagccactgtgcctggctgtgtggacattttggaaaatacaattggccacaactagtttgaagaaaatatggcaatatttggtaaaattggacatgaatatggcttagcaattccacatctgggcatatattagtgaaaatttaccacatgtgcacacggagaaatgtacaaagatactcattgcaacattgcttgttagagtgaaaatttggaaacatcctaaatatccaccagaagacagataaataaatggtggtatactaatacagaggggaaaataatgaatcaataaaaataaaggaacaacaaatacacattttaatattgatgagtcttggaaacactgttgggtgaaaaaaactagttgcagaatgatacgtaccttatgatagtatttatacaaatgtattaaaattgcacactgaaacactatattttgcttatgaatgtattatacttaaagagtataaaaaaaggactgaatataccccaaatgtatgatttcatctgagaagagtttttttttgttttattgtttttttttttttgcgacggagtctcgttctgtcgcccaggctggagtgcagtggcgcgatctcggctcactgcaagctccgcctcccgggttcacgccattctcctgcctcagcctcccgagtagctgggaatacaggcgcccgccatcacacctggcttattttttgtatttttagtagagacggggtttcaccgtgttagccaggatggtctcgatctcctgacctcatgatctacccgcctcggcctcccaaagtgctgggattacaggcgtgagccaccgcgcccggctgagaagagttaagaagaattaccagaaaggaataaaatggaccccaatgtttttatattttatttattttaaaattttaagcaaatgaaacacttaatatttatttcttttgcatgccactagtatattgtatttatctggattgtttaatttttgaaaagtaaataatcccattaaaaatgaagtgaactcatgagagagagcaagggaaaaacttgacgaaatccatcaagtatgaagagcccccaaagacttcccatccccacgagcttctgcttctcctccttgcgaagctctttggcttgctattgccatccctacacctgggtttttgtggggttttttgcaatcttgactcaaatgtggacaaacactttcttgtttttattagcactgtctagataaaatggcattttcaaaaataactttacaaattaaaaagatgacttgaagaaatattcacagtatcaaaagaatcaataaaatcagttttagattgtataatttcttttcagacgaaattaattaaaatatccacctaactcactaagtacagctgtaaaagtggtttaatgtttttactggtcccacatcctcctgtcttaaaataaactttcctctattcctcaagagtacattgttattcaatttctgtttccacactgtgtggttaaagaaaaagtattgaattgtctatctagccccttttctctgggaactatgacatctctaaccagggctaactcacctggaaccagtcctggccccaagacaacactacagacatgagtcctgaagctccttagggcttcctgtgctggaaggaagggttgagggtgggagaaagccccaaaggagagaaagagaataggatcccatgcggatctcaggccaggcactaccagcctgggctgactgcagccactgatgagagacttagaaaatgttgagaagggtattccaagatgcaacggggtgcctgaggaacaggcgaggccagagaccccatttggccagccttaagggcagttctctctaagcctctcttctgcatggtccacaagaaaggctcctggaagctattttttgcaatgtgattctgtccgatggtcatgtctgatctatggatgggatcagtcagaatcccttcaaaaataaataatatttcagagaaaattagaaagtgagatggaaagggatgactgtctacttactgtgtgaaaaagaaaagcagaggaaatgagtacattgcagaaaaagactgaaacagggcacagaaaggaatattaagaattcattacggtcgggcgcggtggctcactcctggaatcccagcactttggaaggtcgaggcgggcggatcacgaggtcaggagatcgagacgatcctggccaacatggtgaaacccggtccctactaaaaatacaaaaaattagccgggcgtggtggcgggcgcctgtagtcccagctactggggaggctgaggcaggagaatggcgggaacccgggaggcggagcttgcagtgagcccagatcgcgccactgcactccagcctgggcgacagagcgagactccgtctcaaaaaaaaaaaaaaaaaaaaaaaaaaaaaaaaaaatcattactttcctgaggccccagttcaaaattctcagcctgccaggtgtcgtccttcctactgaattccagccacctgcctcagccacagccaaaggacaagatccattgaatagtctagaagaccaggaatcaacacactttgttctataaaggaccagacagtaaatatttcacttttgtggaacacatagggtctgtgtcacttcctctccttcttcttcctcttcttccccttccttcccctccctcacgtctctactccttccttcttcctgttcttccccccctcctcttcctcctcctttttcttctccccctaaaaaagtaaaaatcggccaagcacggtggctcacgcctgtaatcccagcactttgggaggccgaggcgggtggatcacgaagtcaggagatcaagaccacggtgaaaccccgtctctactaaaaatacagaaaattagccgggcgtggtggcgggcgcctgtagtcccagatactcgggaggctgaggcaggagaatggcgtgaacccggcaggcagagcttgcagtgaactgagatcgcgccactgcactccaacctgggcgacagaatgagactccgtctcaaaaaacaaacaaacaaacaaacaaacaaacaaacaaacaaattagctgggcgtggtggcgggtaatcccagctactcaggcggctgaggcaggagaatcgcttgaatccaggaggtggaggttgcagtgagccgagatccagccattgcactccagcctgggcggcagagccaaactccatctcaaaaaaaaaaataaaagtaaaaaccacactactccaggcagtataaaataggcgcggcaggccagaggtctgcagatgtagtttgcttacccctgcatcaacagttgttaccaatatttgctgcccattacaattacatggggatctttaacaaacatccattagagcccaggtctcacccccagatattcatttaattgttcattaaatgttcataaaatttatttagtagatcccgtcattggtatttttctaaaagctcccaggtgaatctaatatgaagccagagttgagagctgctagaacatctgctgaattcacttctaagctttgcctgctttgggatcattctgtatattctagggatatatctaagtgaacttcttagcaattatgtattgaacttctgcaatacataactgcatgtagaaaagaaaataaatctatgagagattccatcccagtctattccacttgtttagaactaataccttctaaaagtttgggcataatagattgttgaaaagttaccctcattgttgccttttccttgatcagcaacaaaaagtgactctaattgttgttggggataggtttgtcatgggagggtggggaagattagatattgttgctgcaaatctcttcaaaagatggcactcattatatttttgtttttaaccatttgttacaaaatatttgcagtattttagacctcacaatttatttcactaattttaagtaacatttcatgttccctaatgtttctgacagttgaaaaatttttgcagcacagatgtattcaatccatgagatacctttactatataaataacaatagcatgagcaattgagttgtttggttttactagattacctttaagaatctctggcaatttccaggtaatgttcatataaatccattcaacccctttcctttcagatgctgctactttcgtatacttgttcataccaaacgtgagcacagattctccctgccattccaccacactttacatgaagactctragacaataaaatgtaaatgcaacatggcttaaagctgaatacaactgaaagctgctttgagttagagcactcaagtcccactgtaggattccctctataaggtacccaccttcttaggtgccatattgccctgacctgctaatctcttcccaatgggagggcccttgatcagtcatcaccctggaatccaggctcctgaaacctcatattccattctttgttcctaagatatgacataaatgtgtagcgtaaagraaggtgagctgagttagcatatctattaaactaatagtctggcttggaaagaatcatttgcagcacaggtaatgaagacactacaatatgtagccttttcaaaaaaacttcattgtctttggctgctacttgaagactcatcactgtacaaagcacttgggatttacactggcccactagcccaatgactctagaggttgacaaggaaactgaagttccttctgtgaaatggcttagttcaggttctgttccaaaaccccaatacttctgtggtatttcagtatttacataggactagaatgtttttagtttcctagtgcttttttctctttctttctttcctttttttttttttttttttgagacgggagtttcgctctgtcacccaggctggagtgcagtggtgcaatctcggctcactacagcctctgcctcccaggttcaagcgattctcttgcctcaggctcctgattagctgggattacaggctcctgccatcatgtctggctaattttttgtatttttagtagagatggggtttcaccacattggccaggctggtctcaaactcttggcctcaagtcgtctgcctgcctcggcctcccaaagtgctgggattactggtgtgagccactgcattgggtctcctggtgcttttctctttttctttttttgtttttgagatgggagtctcactctgttgcccaggctggagtgcagtgacacaatatttgctcactgcaacttctacctcctgggttcaagcgattctcctgcctcagcctcccgagtagctgggattacaggcactgccaccacgcccagctactttttttgtatctttagtagagatagcgtttcaccatgttggccaggctggtcttgaactcctgacctcagacgatccacctgcctcagcctcctaaagtgctgggattacaggcgtgagccaccacgacaagcctagtgcttttttcttgatctatgctttctatttatccatttcaataaataatggaggattgaccctaaggttactacaatggattattatccctattactactactatcaccttatatttaaaacattatctgattaaaaacggaaacaaatagaaaagacataggatccttcagttgccagtgacagaatctatgtgtgagttatcatcaactgtctttgaggtatcagtactacctccaattaagcatagacaatggtttccaggggaatatataaagtcatgagcagagtttgaagaaatgctccaaagtcccaaacgctgtcctttcttgtgggcaaggaagtggggccccagggaggcctcaaaagttttctagggacttaaagtcaaaacagtgttcctctgagtaccggtcaacaatgctttgaaagcggatctcaaacacacactcattagaatgcagcaggaagtggttttattgctgtgaacacagggcaataaagcttggcaaaagttgcagggttagaaatctgaatctttctttgctgtcttccctattcccttctctcgaaaagtacagaactacaaagcagaaaataatcttatttctttttgtctcaactctggtctggcatcctaggcactcgaattctccaaacacctttcttctttcttctacgggaacaagaaaatcaacaaaagaaaagaaaacgtggatgcaattgtaacagaagctatgtcaaatgaaaggaaatgcagtggatgccttagagaatactatctaagtgtacaggaaccaacttgtaggggggatcgctcttctgaggggggtcacaggcaacaatgaagaatttgtactgggcagcagcactatagcggcactggggatactttcctgaagtgagtctgcagtcagtcatgttgacaggctttgagctctggtggcagttgtgccgacgatttttgcagacaatgctgagcaaatcacagacagcagccacattctggaaagagtcatgcagaaaggtattttgatgcttacagtgctgggtataattgttgatgccactcattgccctgttgcattggagaggacttggctgtatatgctgaatttcaaaccagtgagccttggtgagacgcttaggccaagcatgaagtggacacactggtccccatagaaccagcagcagtaaaagaagaggaaagcatagcaccatcttttctgtgtagaaagagagaagatagttatagtaggagaagcaataagagcaaaatttttaatcataactatttagatttttattttgccttttaagattttacagctccctttaaaatcttctttctcacatagtctcacaattctatgaagaacctgaagcccaggaaacagaaatatgacctctcctttgattggcatatcccattttctttcacaagtactcatgcatttgatggctgtcatatcagaaagtttcttccctcttccctcctgaaatatttaccctctatctgaccactacctcccagccgtctttactgctctactcgctccagccctgaggctttctttcttacctggtctcagtgttggggctcctgctgagaacagaggctgtgattagtccaaagctcagaagctgttgtctgcctttcttctctaacccttcgagccctgtgtgtatagggaaggggaagaaatattctgagctttcagaaggagaatcctagggtttggcagattaacttcttgtgcagagtctggattaaactcttagactttcacacctgttctttaaaacagtatcattatcacatgtatacaggaaggctaaaccaacttaaagaaacaacatgactgaaaactcacagttttgaggaactgatcacttcctgatatggaatgagtgcttcctgcctcatctgaggcttcagtgttttttttttgaagctttatgattcctgtttcttaagagaaaatatgtcacataaatatgatataatgcctgccacatacttggtaatgttgtaagttcctacaacagatgtgaatacattattcatttatgcatatacttattgggccaggtactaggctacacaaattcaggagctcatgaattttttttttttttttttttgagacggagtcttgctctgtcgcccaggctggagtgcagtggtgcgatctttgctcactgcaagctccacctcctgggttcatgccattctcctgcctcagcctcccgagtagctgggactacaggtgcctgccatcacgcccagctaatttttttgtatttttagtagagacggggtttcactgtgttagccaggatggtctctatctcctgacctcgtgatctgccaggagctcatgatttaatgaaagagattagagacaggcaggtaagtatatagacaagtagattatattaatataaatagcacttacagtgtgatggaggacactgcaggaggctacgggaagatagtagaggggaaggattgttggagggcacaacacctgaactgaattttgaggaataattagaagttaggtgaagagagtgttaagcgcctcccaaagacagaattgtgtatgaaaagacctgtaagcctgaagaagaaggccgaatttaggatatttgcctcttgaatctgttcttaccttttcactggtactgcaacacccttattcagaaactcattgtcttatggagggctcacataaaagcctcccacatggactccttgccttgtttttttctccttccaatccattctacatattacttccagattagtctttttttgaacaagatataatagtacaacactcttgccccatgcttttatggctccaaatgtctgcagaataaacataatgtctgtttatagcaaggttgcaggatacaaggttaatatacaaaagtcagttgctttcttatataccagcaatgaacaattgcaatttgatatttaaaacacaataccatttatattgcaccaaagaaagtgaaatacttaggtgtaaatctaatacattatgtaaaaattggtatgaggaaaaatttaaaactctaatgaaagaaattgaggaagcacagatattccatgtacatgagtaggaatactcaatatgttaagatgtcatttcctctcaacttgatctatagattcagcacaatctcaatcaatatcccagcacattattttgtggatagtgacaaactgactctgaagtttatataaaagtaaaagattcaggttggacacggtggctcacgcctgtaatcccagcactttgggaggccgaggcaggctgatcacgaggtcaagagatcaagaccatcctggctaacacagtgaaaccccgtttctactaaaaatacaaaaaattagccaggcctggtggcgggcgcctatagtaccagctacttgggaggctgaggcacgagaatcgcttgaacccgggaggtggagcttgcagtgagccgagatcgcaccactgcactccagcctgggtgacagagcgagactctgtctcaaaaaaaaaaaagattcagaatagtcaacacaatgcagaaaaagaagaacaaagtcagaaaactgacgtgacccaacttcaaaacttactataaagctacagcaattaagacagtgtgttattggtgaaaaatagacaaataggtcaatggaaccaagtagaaagcccagaggtagacccacacaaatacagtgaactaatctgtgacaaaggatcaattttcaattgagaaaagttagtcttttcaacaaatggtagtagaactgaatgtacacatgcaaaaaataaatcttttcataggttagacttcatacattttcatagacctgtactttatatctttcacaatttttttttgagatggagtttcgcttttgttgcccaggctggagtgcaatggcatgatcttagctcaccacaacctctgccgctcaggttcaagtgattctcctgcctcagcctccggagtagttgggattacaggcatgcaccactacacccagctaattttgtatttttagtagagacagggtttcaccatgttggtgaggctggcctcgaactcctgacctcaggtgatccacccacctcggcctcccaaagtgctgggattacaggcgtgagccaccgcgcctggcacaaatgttaattcaaaatggaccatagacctaatgcaaaatacaaaactacaaaaattctagaaaataacatagaagaaaatctaggcagccttgagtttggcaatgattttttagatataataccaaaagcacaatccatgaaagaaaaatattgataagtggaacttcattaaaattgaaaacttctgctctgcaacagatactattaagagaataaaaagataagccagagactgagagaagatatttgcaaaagatatatctgataaaagaacattatccaaaatatacaaagaactcaaaaaacctcaaccataagaaaaccaacaacctagttgaaaaatgggcaaaacatctgaatggtatggggcaaagacaatttttcctctccctctgaaggttcaaaacttctgaaatgaactgacaatagacagattaacaggagaaaaaggcatacaaatttattactgtgcataatcatgggaaccatacaaattatgagactcaaagaaagactaaatagttgaaattcatgtattctcttcataggggagaggaacatggggaaaatggaggcaattttgaggagttttaaatattttttagggaactggccccaaatagcagacaatagtttgtaaatgagtctctttggaagctgaatggaagggtgacgagttatgggaaggtgaagggtggaactgcactatgatcaaaggttgccttattatacagataaagtctcttaggtactcttttggagctgctcttggaagaatagatgaaaggtctatctgagtgtggtgtgaagagacttctagtctcttctttttttcaggtggctaatatttcctggttatctgatgagatttttagaaaggggggtctt

SEQ ID NO: 97497 - DNA, 12452 bp, Homo sapiens
ctcttcctatttttaatctcttcacctcagaactagacatatggagagctttaaaggcaagctggaaggcacattgtatcaattctaccttgtgctatacgtaggagagatccaaaatttggatgcttctggagactcttagacatcttttcattgttgtccatttttaaagttgatgattgctggaaacattcacacgcttaaaagcaatggtgtgagttattaatgggtaaactaagaagtgttataggcaatgacttgaaatggtttttaaattgtatggattgttaagaattgttgaaaaaaaattttttttttttggacagcttcaaggagatgttagcaatttcagatatactagccagtttaggtatgactttggaagtgcagaaacagaaggatactgttagaaaatcctaacattggtctccgtgcatgtgttcacacctggtctcactgcctttccttcccacagacctgagtgtgaaagactgagagttgaggagttactttgtggatcttgtccaaatttagtgaaatgtggaagtcaaccagaccaatgatggaattaaatgtaaattccaagagggctttcacagtccacagggttcaaatgacttgggtaacagaagttattcttagcttacctgttatgtgacagtgatttacctgtccatttccaacccaaaagcctgtcagaaagcattctttagagaaaaccactttacatttgttgttaaactcctgatcgctactcttaagaatatacatgtatgtattcataggaacattttttctcaatatttgtatgattcgcttactgttattgtgctgagtgagctcctgtgtgcttcagacaaaaataaatgagactttgtgtttacgttattttttgttgtgagttctctctgtttggttttgttgtgaattctatcaatctgctggaagaggaattgattttacaatgtttttcttcttttagcatgaatttaaaaaaatagaatagaatactcagctgtgagccaacatgtatctaacatcctataatagtcactatacatagcttttaaaaattaagctcgaatgttcagccttttagaagcagattgctattgcttttgatttcagcatagtgtatattttatatattttaagacattacccagagtgagtaatgcactctatatgaagaatcagttcacacagacatatgtgcatgtgtatttaaaacaaaagtttcacagaaaaatactttctctatttgtgatgccctgggctattttctatactattttagtctatgtcattttattttattctctacttttttatggtgctgatgattccccagttggtttcttgagcttctaaggaatcacctgcaattcagaagcaatattccagtatcttttgatctatgtttgaatctaagtttggccattgccttgctgggtggcagatatgttactttaagtgtccatttctaactctgtgatatggagataatatgagtgcctgccttacagtcatgaagattaaataaaaggatacatagacagcacttaagctagcagctggaacacagtgagtgctcactatctggtagctattatcctaaaaattaatatagaccaaataaaaatagaaataattttataaatatttttatcagtatatattttagaatctaaatcaagtgatattacggatcctcctttacacagaaacactttgcatctgatttttcaacagtattatatattctttttttatttgtaatatgaaacataaagacagtagtagattaggtctataaattcatcccaatgtctgagcagcttacagaacaagtcttcggattgcactggtgacccagctcatcccctctttctctcttgtagttctcagaataactgtagaatgtgctggaaatggaacattctcagataaggaggaactggccagatcaaactaagctgtgttcccatccctcctgaaacaggatcttatggtgctttagcccaggacgtcaagtatcccctaggtatgaaacccagagtggagcatgctttgaaggtccctcagctacatgcagactagactgcatgtagctgactctaactgccctgggaaactatcctgagctttgacagacctgccatgaatcttaagcttttattgtcccttgctgcctatctgtgaggaataaagttgcttcacttactttgctgtgtgattgttctgtctcaccagactcatgcgagaggtagaaactgcagtcccaagatgcagtgggcatgatgaaactgcttcccacaaattactgagcactttatttttctcctaaagatcaatttagtataaaatatccagaaaagaaatttcacatgcttaatttagcaataatgtatgtccagtttgcacattgtagacactgggtattacaacagataatatataaacgtgcaaattattgcatggtactaaattcaggatttaaattaaaaaaaagatttggatataagagttagtgggtgcagcacaccagcatgtcacatgtatacatatgtaactaacctgcacattgtgcacatgtaccctaaaacttaaagtatagtaataataaaaaaaaagataaatacctcccagtagcaaaacaggacttgtgttatggtgttctaagactccatgaagaggccacttagttactggaactactggaacagaactcacaggtaacgctcaccaatggcagcaggtgttttgttttgttttcatcttattttaaaacaggataaaagggagatgttctctgtctttgatatgacagtattttaaagtgtaattaattttttaaactaattcagacttatcacttttatctccagccctgccctaacctactaccacatcattgtaagactacattgcatttatcatacttaaaaaattgttcatgcgtctataatagttgaatctaaattttggagcaggagtatagatagagagataaaagcattttctctgtagcaaaaactttgttgggaaattcttcaatggtaactaaaaaaagtaaaaaataaatgttttctctccagtacaaaatgcaattaaaaaaaaaacaaaaaaacaaaacagatcacacagaatttcatactccacttgggccctcctctattgcctggcttctgtagagaggaagcaaacatttgttccctgtctgtagaaggagaacccaaagtcataagcagtcaaatcaaactgcagaaataacggccctggaagatggttatttggtcagatgacatccactcacttgaaaactgaacttgtagcttcactgtgaaattaacttctgtccttttagtctgggccagtctccagatcagacttttggttaactgctgtcaaataaaacccataagtggataatccaagcgagaattctgtttgtgtgtgtgtttcagatttctaaatttggtgccctggaacacttgagagacttcaaatggccttggtgatttttgtttttgtttttcttccacaaaagttggtttcatccacacctgagttaaggaacaagtgaaggatggctttgtgtttgtaaagcgctttgaaaaccttgactgaagcacagcaacagataaaggcaagaaaggcttaatttatcaaagtattgcagaacagatgagccctcaaattggagctttgcccaggaaggttatccgggaaagaattcagtgttagacagcatcttttgttgaatagtactgctccctacagagcagggctaactcataggcagtgcagctaaagttgacaacatatgagttcttggcagctgtatttatactcacttaaacctgctttcaattacatgcaaattaacgggtgggtggatgcaaattgaggggcagtttgtttagaattttctagcaaaggggtagtaacttccaggtcatcctcatagcttttgtaaattgtcatggtgctggtgggagtgtcttatgctaatgagcaatgagggcatctatggattgctttggtagccatctgctggttcctaccagtttcttcactttatcctgtttagaccagatcctgttttggtcagcaaggttgtgaccagaaaacaaggtttagaccagatcctgttttggtcagcaaggttgtgcctgtctcctacctcaaaaggttactcaaaaagataaattaaggggctcagaaatacaagtgcacacacttctttcaattcatgaactttcttagtggaactatgaaagatgaattggcaacttacgtattttggactaatttatataaccacaacaaaccctccagcatcataaacgtgtcctggcataatgcaatggcatgctatccatcccgtaaaatctcatggtagtgactcagaaacgtgggggtaaaagagaagctatggagtttaggttgtttgtttatttattaaagctgggtaataggctttttatgtcatccaggacaattttgcaatctcttatggatgtattatttattgtaacttatgggggaaactcatgatgagactcacattccctagaaaattttcacattccctagaaaattattgcccagactaaataagaagtcagtataaatgcatataaaatactcatttaatgttgtttgtagtactgtagaccatttaacatggcataatttaatccaaaagaaattataattaatcagtcagtttgctctgaaatatacttggctgttctcttatgctttttatgtctttgtaaatttcatacttaaaaaaggttaattagttggttttttgaaagatttaaaaatggttaattagttggttttttgaaagatagaaatctgtacctgcagaaaacaaaataatggcctattaagtcatatttaatttactaatcatgaagttgtaaattttaatcaacattcatttaagcaacatttcataataaataccaggtatgggtcagttctgaggattaaaaataacattcatctctttgaagaactcacagtctgggatgggaggtgagaggaaacacatagacaatatgttatgtttatgacagatgtatagagagctaagggtgtttaagggggaaactggttctgttgggtacatagtccgcagagaatacatagggctaagtgtggtggtgaatctttcacagaagtgacatctaagcctggaagaagagtaggaatttattttccatgtgaaaactcaaaaaggtatttcgagtagagcgttcagcatgagcaatagcagctcatcataaagacttgacttctggaaaagtaagataagaatgaagtggatgaatccagtcttcgtaagaatcaccatgggtgttggttcaaaatgaaggtttccaggcccttgtccctatacattctgattcagtaggtttgtcctggggcccaagaatttgcattaccaacaaataccttggtatggtcaggcagtgggtgtagtgaggagagtcatcctgggtatgacaaggaccaggtataatcaggtgtgtaagctaatgaagagaaggcaccaggctcactgagtgcagaaactgtgggtctcacgtacattggtggttttcctattcactggcagataactgttgttgtttcccaggctgatcttgatatcctggtctcaagtgatcctcccacctcagcattctaaagtgctaggattacagacatgagctactgcacccagccaattggaggccttgccccagcaggtggggaaggaaatgccagccaagttcccaccacatgcagaaacctgagagggtgaaccctacccatcaacacctggagaccttttcctgactctgggacccgcgacagacagagtagcccctgcatgggtgactccctgattcccacgaggccccagggctgccgtggctcctgctgctccacatattgtggggcaccttgatagccgaggttgccttaagttacctccagctttgtttctgtcacctgcaaatcaaagagcccagcctaaaatcctctgtagccttcttatttcccccacggtgagtacattctttagagataggatataaactttgaaatgaccattttctttttaaatgaatgataaacsattgttccttcattaggcatgtggccactctctaccctctcgcaagccttgccagagatgccatcctccacttccactgggcacctggagcctgaacctggaatcttccaagaccccagatcagcctctgctgacagttctcttgtaaagatactgaggataggattacagrtagtggctcaygcctgtaatcccaacactttgggaggctgaggcgggtggatcacttgagctcatgagttcaagaccagcctgggcarcatggcaaaactctgtctctacaaaaaatacaaaataatacaaaaataagctggatgtggttgtgtgcacctgtagtcccagctactcaggaggctgaggtgggaggatggcttgagcctgagaggtgaaggttgcattgagccgagattacaccactgcactccagcctgggtgacagagccagacctagtctcgaaaaaaaaaaaaaaaagatactgaggatgagtcagtcatgacagaatcctagtgacatactaagagagggagatgttgtttaatgaaataaatggaggccaggtacggtgactcatgcctataatcctggcagcttgggaggctgaggtgggaaaatcacttgaggccaggagtttgagaccagcctgggcaacataatgagacccttatctctacaaaaaaataaaaaatgtagctgggcatggtggtgcacacttgtagtctcagctgcttgggaggctgaggtgtgaggatcacttgggcctgagaggttgtggctgcagtgagctgtgatcatgccactgcactccagcctgggcaacagagcaagaccctgcctcaaaaagaaaaaaaaagagaaaatagaagaaaagaaataaatggtggtagattcagtcaaaaatgacctgttttctctgcagaggcagtcacacttctgaagatgacttcgtggactggagaccaattgcagggcacccttgggagccatgagctggacgggacagggcaacatgatataaagagtctgggccacttaagttaccactgggggagagtcttcccctgattcaggaatacatggattggaatggggcagctggccccaaagaaaatctgtgaaatgttaagacattgctaattcagttattgaaatccagggctgttagtttatgcccttgttgaggtctttcagggctctgtccctgcccacctggactgaccaaacacaaacgggtggaggacctttcagtggacagaggtcctgtgacctttgtaggtgggatcaaactttccctgctgccaaaggaagcttggactcggaagaaagagcctcacccatgggtgtggacacaggtcttctgctgcagtgtgccccaccattactacctgacatgcttgtgggcacagaatgggtaatgacatggcactgctttagcttctaggcttcttgcagggccagccagggattgggatggtcagagctcatgaatgatctcctctggctgcaatcagcattttccactggctcaaatgtactgtacaaataataactcttttttttttttttttgagacagagtctcactctgtcacccaggctggagtgcagtggtacgatctcggctcactgcaacctctgcctcccaggtttaagcgattcttctgcctcagcctcccaagtagctgggactacaggcgtgcaccatcacgcctggctattttttgtatttttagtagagatggggtttcaccatattggccaggctggtcttgaattcctgaccttgtgatcctcccacctcggcctcccaaagtgctgggattacaggcgtgagccaccgtgcctggccactttctatttttgcagtgagcaaatcaaaatcagagagcgctgtctttctacgatgtggctcccaacccactgatggcctgtcctggatgccaggcacttgtttgggttggaagcggactgctccacagctgcaggcttttttgtggttagttgtggcccacaggatactggcagctggaggcagagcagtggtgccttttgaagccatggaagacctgctgattgccagcaaaatgtcttcccagccagttgttcctggagccgctgtgcagggctctggagatggtgtgtgaatgcttgagacacggcctaagtctctttgaatctctctgggagattctgatatatgctgccccaattattatagcaaagagccaacatacttggaggagaaaaaaaaagctagtcaaaagattttctgctcaggttgaagaatatcttaaagtcagtgtaatcgattagactgattatactagttgatcaagcagccactcctctgaagttacaaagagaatttggcaggacttaataaatatttgaacaggttcaagtttttacttgaggttgtcatacacattctccacaaagaacagaaaagtgagccccagattttcatttcatggagctatgatggcttcacctcaaagatagacacagtcactcaaagatgtatcaaaatcctgtcactcccaagtgaccaatgccaaaaacgccatagagaaagtaaaacaacttcaggaggaaatcatggatggtctgggtgaaaacacttatttttaggaaagacaagttgctttcccaagaagcttctggatggaaggaaagagcatggaactgaaggtacaggaaaaaaattcctgacaactcaaacacatgaacgaaataatttgtaaatgataaagcctgttaaaatatccaaaactgcactaaatataagttttccttctgtctttagaatagattacatggatgatggtgatttgaaattagaccccccacccaaaaaaaaaaaaaaaaatggagatcacctagactgacagaagtctatttgaagaaactcattgacgctgttcacttataaaggcttaaaggagaaaaacaaggacaaatacatgtgcaaatatcatgtatttttaaattttttattatttaagttctgaggtacatgtgcagaatgtgcagttttgttacataggtaattttccaaggcttaattattctgtttaggaggttctttgttagacatttctaatttttatgcaatcaaaaaagtcttaatttatggaaaaaaatttgcatgacctaaattgccagtcggcagccttggctgaactgtcccttacaagggtgatagccatttctccacactggccatactctgcttttggatttcctgccttttcctcatgctcatactggaaaacggcagtatgttttactctgacatcccatccctcaccatcacagatgattggccaagtataagaagtactgatccgagctagaccagtgcaattctctcttcctggaatttggattcaggacccaaataagctgagagggtttgctggaggcactgggcacatataacatttgaattcctcatttacatgtggctgtttggagccatcagtgggccagatgagaaagcagattcaacctgcaggtagaagcacagtattttggggggagaaattcttaattctaaaacatgtctgatccaagggtttcagataagaattgtgaatttgtactaccccagttttacaattgggtcaactgaggctcagagaggttaagccactgcaaaactaggacatgagagagctaaggttcgttcagaccccatgctcctttggcatgacactagctccaagaggattattaatgaactagacactggcatttggattcaggacccaaataagctgagagagtttgctggagtcactggacacatacgacatttgaattcaggggccaaggttcccatttgcctgtggctgtttggagccaccaatgggccagatgagaaatcagattcaaactccaggtagaagcaggagaaatggaagagacttcaaggccccagagaaaaacagaagctgggttggcctcttaataacattttttttgccttcagttaaggctctcaaagggctgggtctcataagatttattttattaaataataattctagctacttgggaggctgaggcaggagaatcgcttgaacccgggaggcggaggttgccgtgagctgagattgcgccactgcacttcagcctggcgacagggcgagactccatctcaaaaataattttaaaaaagaataaaaattcttcttcttcctcctcctcctcttcttcttcttcctccccttcttcttcttcttcttcctcctcttcttcttcttttcttcttccttcttctcctccttctctttcttttcttcttcttcctcttctttctacttctccttccttccctccccctccccctcctcctccttcttcctcctcctcctcttccttctcctcctccttcttctttttgctaatcatacaacccttgactaaagatctacttgccattaaaacggaattttgttattccctatgaccatagcaaacaggcagctgatttcttgaattgggtgggaatgaaggtggggtcttcttgccactatgcaacacgacaagtttgagttataattcttcagtgaagaggtgaaacaaaaccctgttactataatcagttggtctgactatccaattagtattttttatgtttctacttaacacttgtgaaataaccatctgcctttaaataactgccacctcctgccagcctctcagctacgtactaatagtagctgaatgtccctttacagtttatgagaggacaggatgagtgacttatgccactggactctgcagtccgtgataggatggtatcacttcctctgagttatgacatctcagccaggtacagcccccacactgggaaggaccagaatttcctgctttcctctcctacctttctggactggactaaagcttgttctattatccaaagccaaattgattggataagattctgcccacagtgacaaactattgactagatttttttttccacatttttttcctcaatggcttcccaaaattcttttaacccttcaatctcagccaggtttcacattggtattaacatgtgaaaccaatcctgtatgaggtaccagtgccatatcctcagtgtcatgcctaaacaaagacatttccatttttacaaagtattctcggagatgcaaagtcacaacttgaaatgaatgatgggatttcaggtatgatttagaaaaagcactgactttccaacttattaaactttcctcaaactaatctgcaacttttctgtctctataactagtacttcagtggcctttctgaaactgctcaattctaatgagttctaaagcagaaaataaggtatgactacttgttcttcctttctcatttttattttcatagcatttgagagtacaaatatagttgagaatcatccggccgggcgtggtggctcatgcctgtaatcccagcactttgggaggccgaggtgagcggatcacgaggtcaggagatcgagaccatcctggctaacacagtgaaaccccgtctctactaaaaatacaaaaaaaatagccgggtgtggtggcgggtgcctgtagtcccagctacttgggagactgaggcaggagaatggtgtgaatccaggaggcggagcttgcagtgagccgagatcgctccactgcactccagcctgggagacacagcgagacaccatctcaaaaaaaaaaaaaaaaatccttaaatatttagttcaagtttcaacattgtaagtagaaactcactattgtgtacttcagcactatttaaaatagcaaaaaacaaaaaagagaaataaccttggtgcccagcaataggggattggaaaatacattatgatatagtcaaagaatagaatcccatttaacattgaaaagcaaaacatctatttacttaataaatagatttgggacaatcaggtaatcttctggcaagaaaaatttggactccttttctcatacgtcacactagaataaatataattcaaactaattctaattcaatctgatttaatcaaagcttcaggtataaaatatgaaataataatgatactaaaaagaaaacatgggagaatcctttttctactctcatatggggaaggcaagactcaaaactcacatgccatataagatagatcgatatagttgactacccaaacacttgataggttgataaatttggctatacaaacaaaaaaatttttgcatgacaaaagtcaacacagtgacagtagctggagtgggggatgatcttgtgaactttgaggccactctgatgaccttggatcttactccag

SEQ ID NO: 97498 - DNA, 17208 bp, Homo sapiens
cagcgacaggttcgggcgaccgtcctctgcttctttcaccctccagcccgcctggccagccgcgtctgtgccgccagcctctgactcgagcattatggggagccaggagcccgaaacggccgaggctgcagctcccgggggccccttctcccctggaaaaggcctctcggcgggtcctggccgtggtgctagaagatgtcatggctgttcacatggtgagccccctgaaccaagagactctctattcccccatgactttcctcactaccaaactcgggccagatccctactgaggataactgaagtccaaatccatcattgttgtactcagccctcaggcagcctccctcatggtagagtcctgcttggctcccacttactccaacctagaattgggcagtgcccattccacccaccaacgattttgggctggaaccacatccctgtaactctgagaaactcttctgcttctttttttctatcttttttttttttttagagacagggtcttgctatgttgcacaagctggtctcaaactggcatcaagcgatcttcccatctctgcctcccaaagtattgggattacaggcgtgagccacggcgctgggccgaaactcttctgctttcttcccagcccagcctccttaggaagcaggctgaggtctttgactccactgcacagataagaaaaactggcccaaaaaaggcagtgacccaccctagctcaccctgtctttttcatttctctaaacagcgtggatgagattacccaggtcctacacctgcagtttaggactcttaatatctggcccctaattcagtccaattcatctcttctcttgggatccgagtgaattctagccccaatctctgttatgtttgtggctcagggcactgtgaggcacagggaaaccttgtcccgtccagcctcattctatcaccttgctcttgacacctctttctcttccaggtccccgtggtgccctcaaagcagacctccataccacagcaccacagctaccatcaggatcctgtccacaggcagccgcctgcctcgccaccccggcaggccgggtggtcctcgcaggccaggtgagcatggcaggatgggggtaagccgagggcccagctgagccattttaatcttcctgttccctcgctaggcctcccgaccctctgtgtttgtgtcgcgagcccttgagccgcatccaccggacctcttccaccctgaggcggcgatcaaggacaacccctggcccagaggagggcccttcacaaaaggtggaccgggccccccagcccaccctggtggtgatgctggaagacatcgccagtcctagaccccccgctgaggtatgggaactgagggtacggatgtcaagggttctgctgggttccagcagggatagaagggtaggaggcctgagtcttaggtgggtttttcttggggtgaggaggatggcattttaggcggcagacactgcctgagcaaagactatataaaaacgtctttggcgtgaacccaagcagctatccgggaactgaaagagtcaggatgtggggcactaagggggctttcctgcctccccacaaacatcccctatttttatccagggcttcattgatgagacccccaacttcatcatcccagcacaaaggtgagagggctggagtagggattatcaaaggatccaggcaacagccatcatccaggtagccagagctaggggcatcgggactgactgatccaatccttccttgtggcatcttaaaaagccttaaggggccgggcacgcccatgcctaatgccagcactttaggaggccaaggcaggagaatcgcttgagcccaggagtttgaggccagcctgggcaaccacatcactgtgaccatatctctacaaaacgttttgtttatttatttgtttgtttttgagatggagtttttgctctgttgcccaggctggagtgcaatggtgcgatctcagctcactgcaacctctgcttcctgggttcaagtgattctcctgcctcagcctcccgagtagctgggattacaggcatccgccacaatgcccggctagtttttgtatgtttagtagagacgaggtttcaccacgttggccaggctcttgaactcctgacctcaggtgatccacccacctcggcctcccaaagtgctgggattacaggcgagagccaccatgctcagacaagatattgttttaaattagttggatgtggtggtccatgcatgtagttctagccacttgggaggctgaggtgggaggactgcctgagcctgggagttcaaggctgcagtgagctgagattgtgcccctgcactccagcctgggccacagagcaaggctctgtctcaaaaaaaaaaaaaaagaagaagccttaagggataggggagttgctggctcaggtgggatacctggaagttcccctagcctttaccttgcccttcaccccagagctgagcccatgaggatagttcgccagccaacgcctccacctggggacctagaacccccattccagccatctgctctgcctgcagaccctctggagagcccaccaacaggtaaggacttgggtagagatcggatgagacttgggtgtctgggacatcctagttgagcttggaagtgtcaggtacagagttggggatagggcttaagccacctcccagggcagggcttggtatataaagatgggatgttgatgtcagaggcttgaagttcaattcttaaatgcagaacttagtgttttaagggtgggctaattcccctgtgcacaaagttgagcatgtggggaggggctgagacactgcagccaaggaatatccacctgtgaccctctcctttcctcagccccagatcctgctctggagctcccatccaccccaccaccgtccagccttttacgcccccgcctcagtccctggggcttggccccgctcttccgttccgtccgctccaagctggagagctttgctgacatcttcctcacgcccaacaaaaccccacagcccccacccccgtcccccccaatgaagctggagttgaagatcgccatctcagaggccgagcagtctggggctgctgagggcactgcgtctgtcagcccccggcccccaatccgccagtggcgaactcaggaccacaataccccagcacttctccctaagccctctctgggccgaagctactcctgccctgatctggggccccctggcccaggtacctgcacctggccacctgctccaccccaaccaagccgaccacggccgcggcggcacactgtgggtggtggggaaatggcccgagccccgccaccccctcggccctgtctccggaaagaggtcttccctctcggaggagtgggagcctccccttctctcaccacatcttgctcgtccacggcatccacttccttctccgaaccagcagaacccaggtagtgctctcaaaaaacccccttgaagcctggctgcagcctggtcccagcctccttccctgagtatccagtgggcaggagacgggggataatgcagtgaatcctgtttgtccctgagccttgaccttcttggcaggttgggttcaaccaaagggaaggagccaagagcctcaaaggaccaggtgctttcagaacctgagaccaaggtaggcattcagatcgggtagaagagactagtgggggcctgagcccatgtcactctttcaccctctgccccatttttgcagaccatgggaaaggtttctcgattcagaatacgcagaacaccagcccgtcctcagctaaaccttacaccaatgggactgcctcgaccaatcaggtgaggggctcactgggcattgagccatcttggccaaacagatgcaggcttatgtcccctgaagtatagctttgtctcccctcagggagcacagtccagcctgaaagattcaattcggtgtggggatggtttgtgctcaaaattgcctgtctgccttatgtagcactcctggccctgacatgtcccagaaactgaaatacagaccaggccttacctgtcccttcaggccccactggcccaaggtttctcagtggcctctgctctttgctcacaggttgaacaagaaggagttcagcttggaagaaatttacaccaacaagaattaccaatcacccacaaccaggaggtgagacacttggaaggctagagggtggcagagggaaatctggagctgtggagcaccctgataaaaccagctcctctccctgccttgttcaggacctttgagaccatctttgaggaaccccgggagcgcaatgggactctgattttcaccagctcaaggaagctccggcgggctgtggaatttcgggacagcagccttcctcgatcacgaagaccgtcccgtggggtccgggctgcagggggcaggactgttcctcccaatgtggcccccagccctgatgtgggccccctgctccagcagcggctggaggagctagatgccttgctcctggaggaagaaacagtagatcgggagcagccccactggacctaggtgccccatctgttggtcatccatcctgaagggacaggaaacctcccaggcagttatttttttttctctatatttctagtaaagttttcgatatgtttctgattcttttgtatctctagctgagtttaagattgatttggctgatgtttctacgttgacccccaaaggtctgggaactggggctggtgctagagatggtgacaggggttgggtacagagtacagggagggggtgaagtggtcacttgagatagatagatagatagatagatagatagatagatagatagatagatgatagatatagatggagttccgctcatgtcactcaggctggagtacaatggcacgatcttggctcactgcaacctctgtctccctcattcaagcgattctcctgcctcagcctcccaagtatctgggattacaggcgtgcgctaccacacccgctaatttttgtatttttagtagaaactgggcttcaccatgttggccaggatggtcttgaacatctgacctcaggaaatccgcctgctttggcctccctaagtgctgggattacaggcatgagccaccatgcccggcctagagatactctcttgcttagaggattctcctgtgtggagggacacttctgaatcagtgccagatgatactgtgaccctagaccgtggtctgggttctcccaattcatttatatcaaggagactgaaaggcctatagtgggtcaaggccttgaagatcaagatggccctgaattcctgctaacatgcaggccaggacctgctgctggattcaagagctacggctaggccaggtgcggtggcttacgcctgtaatcccagcgctttgggaggccgaggcaggtggatcacaggagcctaggagttcgagaccagcttggccaacatggtgaaaccccgtctccactaaaaatacaaatattagctgggtgtcttggtgtgtacctgtaatcccagctactcaggaggctgagccaggagaattcacttgaacccgagaggcagaggttgtaatgagctgagatcgcaccactgcactccagcttagggaacacagccagactctgtcccccccaaaaaaacaaaacaaaacaaagagctaagagtaatgggccataatgaagcactcacgacgactgtcataggtgcttgacctgcacatgtccctgcgacagggaattagtcattttatggacgagaaagcaaggcaggcatgtcagcgcgctgtccacttttaaaacggtaacccgggcaaccgaaggccagaaatggctgtctctttttttttaagccagtcacattgagcagtggggtgcatctttcataactgagaggcatcacagggcagtggctgacatagacgtggctaggagactaccagcccgtctgtgcgcgcattcctttccgtcccagtaaaatggggctgacagcatctccttcrtggaattattaccaaacgcagtcacaaacgcggagaagcgctcatgcaggtgcaaggcgttttcgaattgctagcactcgggaccgctgccagcagccgcgcctggaagggacgcggctgcctgttagtgcggccggcgcaggcgcaggcacagcacgcggccgctcgggccaccccgggccgcggaacgactcgcaagcagccagcctgacggcggcgccgccacgcgcgtgcgcgagacgccaggctgtctgtgggccgcgccgagcggcggaaaggcggcgatgacttaactggctgtggaacggaacctcttgcagccgcgcgccccccggcggccaaccgcccccaacgcctcaggccccgcgtctccgcccctcgcctcgacgccatcaggagaccggccaataaacaaacagcaggaagaggcggggccctgtagtaaccgccccaaacacctacttctaaccagtcgagtcacaagactggggggaagggcggagccaatccgacgtaacccaatccaagatttgagggcggttacatgcacccactccctcgggtttggctccgcccctcaccttgacgtagccctcccagcctatcaacgactgcgcccgttgggggtgaggggaagggggcggagcgtgggaggaggccgagagaggaaggaggcgtaggctgaggaggaagagggaggaggggtagggaagtcctggcggagaagcgccctaagactccaaaggagacaacaggagtttgtgctggagctcccccgctgcccatcggccgttccggatcccctaaggcccaagtcggacagagacggaggaaaggaggaagagacttttatgtcggcggacaggggagctgtacccgtcaccgttgcctcacatccggggctttggagggctggcctcgctgccccgccccgcctcgcgcctttcatggcgaccggaggcggaggctggaggagctgggcycggaggaggcccctttaaatctccttaaaggggtggccactgaactcggcggactgcaacgccagccttaaaggggaagccgccgagcagacgctgacaaattgagaactgtgccgttgggagaactggggcgagtggggtttttctttacgtcctcctcccccacacacaagaagtcttttaaattcaacttaaaggggaagtggccgcttgtggaggactagaaactaactccgagcccttaaagggacggcctgctgttagaaggaccctggactccttaaaggggtggcctctttgagccggaggacttgagacacttttaaaggggaggtctgcgtttcggggcgagctttcggccccttttaaaggggtggcccttcctcttcctcggggagacttgcatcgacccctggcagggggtggccaccgcactaggccgccggacactgtcgggtcgtcttaaaggggccgggagctggacaacttggggcctcgccttaaagggacggccgccccgttttcgccgtcgcggccccgccgagcccgcagggggggccctcgggcttgtcgccccgggggcggcgccggctccccgggccgtggccttggggcaagctcggggccagcagatccggctttaaaggagaagccgtggccctctcgtcactgtgcagccgccagcgccgcgcctgcgaccccgggcctgcggacaggccgcttcgggccccgccgcctccggatgcggcgctgagggcggtcgccatggagacggcagcggccgcggccccgggtccgggctgggcagcagarggggagcgccgacggcggcgctgctcgcgccgagaccgagaccgggagcagcggcgccgccgaggtccaggcggcgacgcgccccgggccctgttggccgccccgcgcggctcctcgtcctcgtcgtcgccgccgccgcccgccaggccttggtcgtcagcttcgtctggagagcggcctgggggcccgagacgccggcggccccgtccgagacctcgacccccgcgaccccgagctcggaagcggcctgccggctcgggcagccgcggggaggaagaggaggaggaggaggaggaggggggcgcagacgacggcgaagccgaggaggagcctgaggaggaggaagaggaggaggaggacttgatcgatggcttcgccatcgccagcttcgccaccctcgaggccttgcaggtggggcctaatggggctaggagactttgggggtttccgaggggcagcaaggagggggcagtgcccctagtgggtggagttgaggggggaatgctggcaccccaaaccagagcaaccggctcctctggccaggcctctgccccgccctggggtgggaggaggtagagctcgtctctggggacccggtttcccggcccgaggggtacttcggcaacctggtcacccctagagggrttgggagcttgcccttttccatctatctcagccccacctcctcctycacagaaggatgcatctcttcagcccccagagcgactggaacatcggctgaagcattctgggaagcggaaaagggggggctccagtggggccaccggggagccaggggacagctctgatcgagagcctggccggccccctggggatcgggcccgaaaatggcccaataagcggagaagaaaagaggtgaggttgtcccttaaaactctttaggcagaatgtatttcccacagccccgtttttcatcagcaacgccactgccccttgtaaacagagaccccagtttctaagggcaaagaggcaagcagggcaaatttgagcccttactcatccgggtctgacgaaggcctgtctacagtcaggtgcacctccttttgcctggttctgtgtctacttcaaacgttttgataattcagagaggcgtcaaaggaatatagttgggtcgtaaattaattgtggttcctgcccttcctcgaggtggtggcagtccagcagaaaagaaatagccagcaagcaaacmcctagaccttaatttgagaagctacagaagacaaagatggggagagatgctacagaaacccacatgaggaagccgcttgtgctgcctgggggatgggaggagagttgtggttggggaaagccccctaggatgtcttagtcaggtcctgaagtatagtcagaagtttgctaagaaaagacacggggaaaagttgttttgggcaagagcatgaagacgtgaggacccggcgtatttagagaatggtgagarcactgggacccgggtgggcagtggcgggagaagcagctggaaggagaggctgagagtagatccyggaggcccatgagcgccctgctgggagctgcgactttcccagctgcctcagcagccgcctccctcacctctggactctggtcttcctcaggcgtcctcccgtcactctctggaagctggatacatagtaagtgctatccacctgtcctggcccctccctgctccaccctgggcctcttccctctcgtgacacctctgtctttccttctccccagtgtgacgcggaaagtgatctggacgagagggtgagtggggctagagcttgggtgggcagtgtcactgcttgtaaaagggactgcagcataaaggycttctgcgtgcagcagacagccttcccttgagtgagaaacatggcttaggttgagtcaggattaggtttttgggaggaacgggggtggattgggagggtaaatggcgtcattttttcttttggtgactaggggttagctgaccaaggaatggagggtccatgctttggcatactatcctttccaaagcccttgagctacttctggttctccacggaaacccagagtggctgtggcactgagatgggccttcttcccatcttagaatgaagatctagattcaagtctgagcagagaccgcagatagagtagtgaggacactaaatcattgtagtcagtgtagggactcagcccataaaggtgtatttgagtttatccttaggggcgatttgcttgttgtgagatagtatgtcctagaagttaatgcgctacccattgggcccatgtaagtaactcaatttgcactccctgatgtgtgtcttgtttttgtttcaaaagttggctggataggactgtggtgaaccagagggttcttgtcaatttccgtcatccatctckatctgtctaggctgattgttgctacgagaacagggggcccattcttgaggcaatctgcaagcctgagttttaatgaggaatctccggattcttaaatatctgcagttggtttaaaacttttaccaacgctggtggaccaaataaatctgtaagcgagggaggcctgtgggccagcagctagtgacctctgacgttttggtttggtttgcctgcttctctgctgcttcaacgctgcctccatttagtcctcttggcctatcggattcttggggtcagctgctccactctgctttttctccaagctcagccccctagagcccagtctttgayggatctcagctaaactgaaggaacagacttgccactaccaccagttcctagcagcctccagaggctatttggccttcctgggtggaggcctggcccacccacaacctaactctatcccttgcccttcttccccaggtctccgatgatgacctcgacccatcctttactgtctcaaccagcaaaggttggtcccaaggtctggggctggaggcacgggagggcagtggggtgagcatgagcctcaactgagcatgtctgccatcctgccccacagcctcgggccmccacggcgccttcaatgggaactgtgaagcaaaactctccgtggtccctaaagtgtcgggcctggagcggagccaagaacagcccccggggcccgacccgctgctagtgcctttccccccaaaggaaccaccgcctccaccggtccctcggcctcctgtctcaccccctgcacccctgccggccactcccagtctgccacccccaccccagccccagctgcagcttcgggtctcacccttcggcctccgcacttctccatatggcagcagcctggacctcagcactggcaggtgagtggtcttgggggattgatgcggtccggaagggcctggtcagtttggtggyggggacacaggatggtacctgtggggtatgacttgaaaaaggattctgagactgaaaagtttgagaaaaacaaatggaaagagatgactgcaggacttatttgagtccgttacacattcccatgcaggggaatccaggctgtgctgtttcccagttgtgtttgctggtgagaacgttttttcaggcaggcaagtctgctcggaatagtgttctttggaacatactttgggaaatgctgacatgatggttaagagcgctggctttggtgtcagacccagattcaaattcttgctctgacgcttcctggctgtgtgatttttgacaagtcacttaacccctctgagcctcgatttcctctttctgtcaaatggaatgatcatagtactttcatcttaaagctgttgtgaggattaactacgagtgaatgcagtgtttcccaaagtgtgtacattcagcgtcagtgatatatgggatgatttcaggtcttacgtgagtaaactttaaaaaatagtcctgagttagcttttgtgaactttagaaagctgagtgtcatgcctcagccccttgatttcacacgcgattgcttagggggaggctaagttaaaaaaaaaaaaaaggaaattgagttcttaaaagaagccattgatgcagttcagatggttactttgctgggcagcagtggggaaggtggcgtggaatgttggagacttggattagcttttaaagcaggtgccagcacttggcctacagcaggtgcttgccacagggtaagaactattgacacttactattgatgctctattttgtcaccgtcattgtcattgttattattgagaaaactaaggctcagagaggggcagtgacttgctcaaggtcaccccgggcattcatggcaagatgggcctagaattcaggtctcctgactcccaggccaggccagtgtggtgctgcttccactgttgtagggtgggaccccaggtggcttgttctaattaagcgtcaacatgaatgatctgttctgtgctgtggttgagtcagaaagggaaagtcatctggccagagatggcagaggcagctgcgtggatgcagagacctagacagggagaaataggggttgctgggtgtgggaggcgcctcagtctgagaacggattccctcggtggggggcggtcctggggctgggttctgccacctcccgtgttggagaaccagggtcacggtatcacccaggcttctgaccccctcccgtcagagctggcacctcccaacccctcactcatctccccacttctctccccagctcttcacggccgccccccaaggccccggcccctcccgtggctcagcctcccccctcatcatcctcttcgtcctcctcctcctcatctgcctcctcctcgtccgcgcagctcacccaccggcccccgacgccctcactgcccctgcctttgtccaccacacagctttccccctcccgggctgcggccccccccaccaccccaccacccctccttgttctcccctggccccaccctgcccccacccccacccctgctgcaggtgccagggcaccctggggcctcagccgctaacgccctttctggtgagtttggggtcctggccggggggtggggggccatcaccccgggctcgggcccagttggctttggggcacctgagcctcagcagacagcagggcttgaggagggagtggctcgaggccagagggaaggcagtcacctgggcccaaggaggctgatgtggcgacagcattaaagccttctcccgtcccctcccacagagcaggacctgatcggccaggacctgaactctcgctacctgaatgcccagggtggccctgaggtggtgggggcagggggctcggcccggcccctggccttccagttccaccagcacaaccaccagcaccagcacacccaccagcacacccaccagcacttcaccccttatcccccgggcctgctgccaccccacggcccccacatggtgagctcctcattgggctggcgatgaggctcggaggcctctggggagggcatggcttctgggggaaggcccgggtccctggctggcagcttactcttcccttctcttccctagtttgagaaatatccaggaaagatggaaggccttttccgacataatgtgagtgtgtgtgtgcgtgtgcgtatggggtgtgtggtgtgggcgtggatgcatccatgcttgtgaccctgactgctggggtccagtcttcagcacaaaagcaagagccttgagcctgggacagctccctggggggctttagggtggaggcccgtggactgacgggcaggctggacttgggctgcgcctccacccccacctgtactagtcccccttctctccacagccgtacacggccttccctcccgcagtgcccgggctgcctccgggcctcccgccggccgtctcctttggctccctgcagggggccttccagcccaaggtgagctcccaatccagacaccaccaccgcctaccatcttgacaaacccagacacgccgggtccaagcacccttctcccattccccaaagtcgtgcccatcctcctgccctgccctgctgcacccagttttctccaaagccatgatccctccctgcccagtgtcccagcttggttctggatccctttgtgcttggtgccagctctcctgtctgatccctccactcccctttcccagagcacgaaccctgagctgccaccacgactggggccggtgccgagcgggctctcccagaaggggacacaggtgagggggccagggcaggtcctgggggagctggaaggtgtgttgcggggagaacagaactgacttgaggagagtgaactgctgattcctcccttgaattcacaatcgggtgttcctgggtgtctaatagagagggaatttctgtaaatagctggctttcccaggcatgaggaatgagagtttcatgagcttgtcccagaaataggatgattaggacaatggtttttgtagtggttttcaaactttttaataaagttacaaaacactttttttccaaatgacatcataccaggaagccctgttcggaaaacaaaagataagctgccccttggtgaagtgaggagagccagagcctccctccccttagcacttgcagcagtgtagaccccagggctgcgggaacgttgtgaaacgcacaggaccagtttcctacagggaagactaggccagaggttttccaacttccttcaaaggcattttccctaaataaatcttaaacagaccgctatactctaaagttggtaataggagagcttctctgagaaacctgtcctgcctgccccctcaccacccgcagccttccagcagggcagctccctggggcttggttcagaaaccttgtgctggaggagagatgcctagactgggagagatggggaaaggagtttgggcctgagcaggaagggtttgagggagtcccagtgtctcaggcatgttgggggtgagtggatgctgtggagatgcgaggcgcctggcccaggactcgggtctgagtcgcctcccatctctcctttgccatccccagatccccgaccatttccggccacctttgagggtgagttgtgtgaggacctcaggctgcatgaggctgggggctggtgttagcatgtttggctaaggggggttttgcttacaaataagtgagaagcccagaacatggaggcagccagatgtggaacagcagagagtgagggctttcaagttgcagacctgggctcggatggaactggccatgggaccttgggcaaggcagttgatctctctgagcctcagtttcctaggctgtaaaatgaacctagtcatcccttggttgtaggaatgatgagtagggatattttgtggcgaggctgggcccagagccaggcctggagtggatgatgagtgaacgttctttccttccctttccctttggtcatccttctggggcggcagaaaccagggaagtggtgtgccatgcacgtgcgtgtggcttacatgatcctgagacaccaggagaaaatgaaggtactggggccggagggctggggagagtgggtctcagagtcaggggaggactgagctctgggcattggccctcaacagagctcagcagaatcttggccagaaacattctctcctgtcccccatcactgctgaacagttctatggctggcaccttagttctctggctcattagggggctgctcagagaaggctccgagagaggcagaagataggcatccaggccccatctgggtgccagccagcctttggaggggaaccacgggtgagagagcaagagggggaccagactggctcctcatgtactgcccctctccctgtgtcccacacagggtgactcccacaagcttgactttcggaatgacctcctgccctgccttccggggccctatggggccctgccccctgggcaggagctctcccacccggcctccctcttcactgcgactggtgagtctggccagccccctcgggcctgaggttccctgtctatagcctgaggcccagcttgtgcccactcagcctcatcagaatctcccacctctctgccccaggtgccgtccacgctgcagccaaccctttcacggcagctcccggggcccacggacccttcctgagccccagcacccacattggtaagagccaagggcgtgttgggcaacccaggctttgtccctgacttccaggagatggaaatcagacccagcaggcagctggaatgcaggatagacctggttccacttgcttagtgaccttgggcaggttactctaccccctctgagccttgatttcctcatctgtaaaatgagtagggaagggcagggtgacttcagtctctgccagctggagccctgtctcccagtagccagtggcaggggcagtacgccacctggaaggggaaggtggggaggccatgctggcccaggggagagcatggccactgactcctaggatcttggcaggcttcttggggaggtttcacctgggtttgggtggacaaggaagagttgagcctggtggcttggagaaaggtgttcctggctggggacgtggtgacattccagtggcgggataggttagttgttctgtctggctgtgtgacgcatgcatgaagttagggtcaggtcgggaagggccctgcatgtcaggtggggggaagccaacaaggtcttcaggcttgctgcggagcggagatctgctgtgatgggtccaggcggctggtgttggggagttggggagaagagcgtgacttcatgtcaaggaagccctgggttggtaccgctccctggctagatgaccaccagcaagtcatttcacctctctgagcctctctgttttatcatcttcaagtgggcatgatcctaaccacctcttgggctttttgtgaggttaaccgacagggtgcttgtcaaagctcaacaccttcctggcccaaggaagtgctcagcacatggctgctgaaagcaggcagctgaggactccaggcaccggtcctgcctctgcccagccaggcctggtgcctgctcagcaccggctgcccagtgctctgaccacccccctttcctcccacagatccctttgggcgtcccacaagcttcgcctctttggctgccctctccaacggggcctttggaggcctgggcagccccacattcagtgagtgcgggtgcggtggggtgggggggctgcggccacagggtgagagctcagacggtctgggaggaggcctgaacagggcctcccacttctggcccctgtcactctctgcttcaccctctgcccagactccggcgccgtctttgcccagaaagaaagcccaggggccccaccagccttcgcctccccaccggacccatggggccgcctgcaccgcagtcctctgacctttcctgcctgggtccggccccctgaggccgcccggactccaggctcagacaaggagcggcctgtggagcggagggagcc

SEQ ID NO: 97499 - DNA, 12732 bp, Homo sapiens
acatctgagatggattaatgtccaaaatgtattaaaaaactcttacaactcaacgacaaacaacccaatccaagaatgggcaaaggacttgaataggcatttctccaaagatatacaaatggccgataggtatgaaatacatgaaaaaatgctcgatatcttttcattagagaaatatgaatcaaaatcatgagatatcacttcacactgcttaggatggttatattactattattattttgagatggagttttgctctgtcactcaagctggagtgcaggggcatgagctcagctcactgcaacctcagcctccccggttcaagccattctcctgcctcagcctcctgcctcagggattataggtgtgcgccaccatgcctggctaatttttgtattttcagtagagatggagttttaccatgttggccaggctggtcttgaactcctgaccttaggtgatccgcccgcctcggcctcccaaagtgctgggattacaggcgtgagccaccatgcccagcctaggatggttgttatttaaaaaaaaaaaaagaaaacaagtgttgccaaggatgtggaaaaattggagcccttatgcattgctgatgagaatgtaaaatgctatagccactgtggaaaacagtggttcctcaaataaataaataaataaataaacataaacataaaattaccatacaatccagcaacaccacttctgggtatatacccacaagaactaaaagcagggactcaaacatatctgtacactcatgttcacatcagcatttttcataatagccaaaagatagatgcaaccaaagtatccatcaaaagatgaataaacagaatatagtgtatacatacaatggaatattattcagcctttaaaaggagtgaaattctggccaggtgcagtggctcacacctgtaatcccagcactttgggaggctgaggctagtggatcacttgaggtcagaagttcgagaccagcctggccaacgtggtgaaaccccctctctactaacaatacaaaaattagccgggcgtggtggcgtgcacctgtaattccagctactcaggaggctgaggcatgtgaatcacctgaactgggaggcaaaagttgcagtgagccaagatcgtgccactgcactctagcctggttgatggagggagactctgtttcaaaaaataaataaataaaaataaaaggagggaagttctgatacaggctataaagtggatgaactttagacattatgctaaccaactgcagcactatttacaatagcaaagccacggaatcaacctaaatacccatcaatgacagaccagataaagaaaatgtggtatatatacaccatggaatactatgcagccataaaaaagaatgagatcatgtcttttgcagaaacatagatggagctggaggctattatccttagcaaactaacagaaacagaaaaccaaatactgcatgttctcacttataagtgagagctaaatgatgggaatgtataaacacaaagaaacaaacagcagacaccagggtcttcttgagggtagaaggagggagaggagcagaaaagataactattgggtaccaggtttaatacctgggtgatgaaataatctgtacaacaaacccctgtgaaatgagtttatctatataacaaaccctcatatgtacccctgaacctaaaataaaagttaaaaaaaaacccaaaaaacaaaaaaaggcattatgctaaccgaaataaaccagtcacaaagagacaaatagtgcatgattccacttatatgaggtacccccagtagtcaaattcaaagatagaaagtagaatggtggttgcctggggcggagtagggagaaatggggagttagcatcttactggtacagagtttcagtctgggaagatgaaaaaaagttctggagattgttatcagtaatggttgtacaataatgtgaatatatttaatgccacttaagaattattacaatggtaaattctatgttatatatatatatattaccaccataaagagtaaatatggtacagcacaggttctgctgagttattttgttgttgttaggattcccttctaccccatcacctagctctatcagagcaatgttgacatctggctactcaaaatgatgctctcgtttcgtatgacggactcatttgacaaaaattatattaaatgccaatgtctgaatgggtgttttttttttttcctgggtaacttcaacactgatcaatcaagaccatttctagatagcctgcccttaccctaacatgaagtgaaccatctcttcagtcaagtgacttttagcagggtgcatagtcattgtgtatgagtaacaggaagaaaagggtgagttattatcctaaatttgcagataagcccagagagaaaaatagaacacataagccctcccatgaacttgccagatttagcaagtaaaaatacaggactccctgttgtttatttgaaattcaaatttaactgggcactctgcgttttatctggcaacactgaagtattggaggtgaggagaaaaataacccagggtgttctggggtaactgaggtcttaacaggaagcctagacaggaaaaagtagaaaaggccattaaaaagatactgttaaaaaaaaattgtattgcttaatccatccagatcaggagcccctccccacactgggtttctatgatccaaggctttattttgagacagagcattgctctgtcacccaggctggagtgcagtggcatgatctcagctcactgcaacatctgcctcccaggttcaagggattctcctgcctcagcctcctgagttgctgggacttcagcctcctgagttgctgggactacatgtgcacaccaccatgcccggtaatttttgtatttttagtagagatggggtttcaccatgttggccaggctgatcttgaacttctgacctctagtgatccgcccacctgggcctcccaaagtgccgggattacaggctgagccactgtgcctggcctgatccaagactttataaagacatgtaagagggtgggagacagaaagcggaaaaggatacatcaaaactagcaatggatgaatgagaacatgtccagcctccagttaaggcaactgtggcttcaaaaaggaatcttaaataccagcacagaaatcagagggatcctaacctggctcaaaacagaagagaaacagtggctggccatacagcaggacgggcataactaacagaataccaggtatactgtttggatctgctcttccttccattaagccatccaccactgcttaatatctaaggagccggctaagaaaatccagtcactacttttatttgctaatactttgagccccagttacaataatgccactactaattaggtaactactttctaccttatcaactcctacagctttccagccattgtttcatccctcagcgataccacctgcttccgcgtggaacccaaacccccaggaaactaaatctgctcaggtcacccacctaggaataaataaaaacaggtttcaggccctttgtcctttgtaaattccgccttttttttttttttaaggcctgtgttctttatcacggacactgttcacatagtggtaatccttgcctgactcagatctacttgttcctgcgtttcattcctccgctgctcaattacttgttcaaaacgcaaaggacaactggtagtgaagaccctccaccagcaacactaccatgtgccaggcaccgtgctggggaccggggatacaaagatgagtagtgtaccgtccttgcccccaggacagttccccgtgtccgcagggccggcctggagggccacagccaactgtgggcaacaggatcaccgtgcccttcgcggcaagtgagtgcagtagtaggggacggttactgccaagccaaaggttttctccaggtaaaactggatgacagagagacagagactgaagcaacgccggcgccgggcggataataaagggaggcaggggctaaaagggtggagggagcagaggacccggccgggaactggcagtagggaggcccccgctgcagtcgccggcctgggtgccgggcggccacgcttccccaaagccgtcacagggacttggggtaccaaggtgactactgggcgcgagtcgttttgtggggggagggtgtccccaagggggcagtttgaggagacggttggggatgcatctggggtggcgcccaaagggacggtgggtgctgggtgtttgaaggtccggtggacgcagagctgaagggtcaggagaaggccaagggtcagaagggctggggacgaggtctgcccagggggtcggggcggacgcagagggcgggtgcagccgagggggaagggctgaagggaagggcaggcgctgaaggcacataggtgggaagacaggccctcccctaagggagaccttggaacgcggggcagtgggtctgtgggaccctgcccgcctccggagaggcgttcctacctcgtttctcgcctcagcctcgtccttccgcgccggcggcggcggcggcggcggcgtgtctcgccctccaggggtcgcgttgcaggctagaggcgccggcggcccctccctccgggcgggttggaaaggccggcccctgtcggcgtggcgcgatggtccgatctgggttgccctcaggccgcccctccgggcggcgcgttggttcggtccgcccggcctaaggtgctcgccccctccccggctcccgcagcgatgggcgcagccgagtcacgcgcagagctttcccgctaagggagcggagaggcttccgccgtggcccaatcttctgcggcccgcgcccgcccccgcggggtggtgcctggcgacgcgcggctcccgggtgctggaacccagggaaaccttccgcgggcctccagggccggtgggtgtgagtcccagcttcgcctgaggcggcggttctcaacgctggcttcccagtagaacctagtgtggaaactaaccaaacaacagaaggagggctgacctcacactggaccgactcagaaccactggggtggagtggggtggggtgaggtggggttggcctccagtgcatagccagggttcggaacccctgatgaaacgtagaacccatgcgccccctgcccttcagggccggatgtgtgggggacatggaagatgcctgtgtgtgactcctgctgtttacagccagagggggatggggcaggcagtcctgcaaatgttatgggaaacccactgtattagtccgttctgacactgctatgaagaaatactatgaaggaaagaggtctgactcacagttccgcattgttggcgaggcctcaggaagcttataatcatggcaaaaggcaaagaagtagccatccttttcgcagggtggcaggacagagtgagtgcaggcaagggaaatgccagacgcttataaaatcatcagatcttgtgggactcactcactgtcacgagaagggcgcaggggaaaccagccccatcatccaattacctccacctgttcccgcccttgacacagggggattatgggaattacaattcaagatgagattttgggtggggacacagccaaactgttacaggtagttaggcatgagcggggcaggagagggttctcccctgctacccactagggatgttgggtgatggttctgaggcaggagaatagggactggaggcagggaacctaagactggttcatgccaacttcctggaactaaattgaaaggaaaaccctaactttccacacctaagtaacaaaccccccacccaacttttctgcccagcagatgggaaattggctatctgcaaccaattagactgactgcagccgagtctaactttgcatagaagtataactttgtaacttcaccctagcctctgattggttgcttcttgcaaccaatcagatgtttgcacaggtgtgcgacctttgtaacttcacttcagcctctgcttggctgctttctgcaaccaatcagactgattgcaggctacgamttcatttacatgaggtgagcatgaagtggcgggtaacttctagggggtatttggacccaagaagrttctgtttcctggcccttgagccgctgctccggctgctcccacactgtggagtgtgctttcgttttcaatacatccctgctttccttcttttgttccttcattctttctttgctttgctgggcgttttgtccaattctttgttcaaaacgccaagaacctggacaacttgcagtcagaccctctaccagtgacagttccataattacctcattgcttctttaaaaaggataattcggctgggccagggagaggccatttcctgatggtccacacatgttaacatcaaaatgctaattgaatgcaggcctcagggagaagcaactttctgggcatgcgtgttaagagacaaaaatggtgacgtatgatctcctgggggcaccctccaccggaaaacgggaaggaaagcactgcgcattcgggaagcccactctaagggaagaatcatgggaaagaggccagcctgtaaaagtcctaggatcttggttaggcacttgaccttctctctttaaccttcacgtgcccgcttgggtttcttccaagcgcaccttcctttctttcctgttctaaggcctttttaaataaacttccattcctactctggaacttgccttggtctctttttctgctttctgccccacagtcgaattctttcttctgatgaagcaaggactaaagttgctacagacccataaggataggctgcaggtaacttggggtaactcagacctcttccaccactaacaaaaccatatcacccattgagaagactcttaggctagacgcggtggctcacgcctgtaatcccagcactttgggaggctgaggcgggcggatcacctgaggtcaggagtttgagaccactagcatggtaaaaccccgtctctactcaaaatacaaaaatcagccgggtgtggtggcgcatgcctgtaatcccagctactcgggaggctgaggaaggagaatcacttgaacctgggaggcggaggttgcagtgagctgagattgcgccattgcactccagcctgggcaacagagcaagactctgtctcaaaaaaaaaaatagaagactctgttctaggttccatactcactgaaagagttagagactggggtcacagtcaaggaagcagataaatgtcaggatatgtagcttgtcttcaggcttcacagaagtggtgtgagctgaattttgaagaatgagtgggaggtaaagagagaattggcatgtgcaaaagaactgaggggcaaaatgaccaatgtgattgagaagtgtgggaggcaacggagacagctgaggagagctggtcagggtttggtgatgaaacgcctatgactactaaggagttgggagagatactgaagggctttattgcagaggcaggaatgacaagatcaaatatgaatgttagaaataaagttctaagggcttaaataagggtgacatggagagagctagcattgccagtggggaaccaatgaggaattgcatgtttgcacagtgtgatcccccagttaaatagtctgggttggggaattaagccaaaccaggccaattagaattacttctctaagaatttggaattgggagacaaagagctacatctctgctcagacttaaattggacttaagggtaatttgggagctatgcagtagtcatcttctacttgcccatttggcctgagcagcattgaaaaccagtttgctgagaaagaagatcaatcagttgcacacagagaagcaagtctagacacaaaaagactgctccctaggttcttgggaccttccagcagctggttccacttctttctgaggcccagcaggattccttccccaggatcatgatgcatccttctatccattcataggaatctcatttttggcttcagcgagtgtgggttacttcctgttgtttgtgttaaagaataactttcaaaaaggtaaaataatgagccttatgcaagtatttttattttttattttttgagacaggttctctgttacccaggctggagtgcagtggtgcgatcatggctcactgcagcctcgacttccgggcttcagcgatcctcccacctcagcctccagagtagctgggactaaagatattttttgcatttttggtagagacagggttttgccatgttacccaggctggtcttgaactcctgagctcaagcaatccacccgcctccacctcttaaagtgctgggattacagacatgagccactgagcctggcagagccttatacaaatatacaatgaacatatttcaaattttttatttaactaatgagggaaccagtaagatactaaaaccagttcaaatgaagatttgacttagaaatgtcttttctctaatggacaaaatttatttgcatcacccagaacaggaatcgtttgcactgttatgggcagaaaatcttttgtattatttattgtcagtattctgaagttaacttctaactccaacgagttagaaaatagcttacttgtaaaataggaacctagtcaaaggaaatcaaaggctctcaccgctaatataatcaaataattcccaaagattcttaacagcacccaacattccattaaaaagacacccatttcaaagtatttcttaagttttccagacacttgcaaatcaaagaatatacgaaaacacagagacataagaaagcatgatgctggccgggtgcggtgtctcacacctgtaatcccagcactttgggaggccaaggcaggcacatcacctcagatcaggagttcaagatcagcctggccaacatggtgaaaccccgtctctactaaaaatacaaaaattagttgggcatgctggcaggtgcctgtaatcccagctactcaggaggttgaggcaggagaatcgcttgaacccgggaggtggaggttgcagtgagctcagattgcaccattgcactccagcctgggtaacaagagcgtaactccatctcaaaaacaaacaaacaaagaggctgggcacggtgggtcatgcctgtaatcccagaactttgggaggcaaaggtgggtggatcacctgaggtcaggagttcgaaaccagcctgaccaacatggtgaaaagcccacctctactaaaaatacaaaattagccaggcatggtggcacatgcctgtaatcccagctacttgcctctctgaggcaggagaactgcttgaacctgggaggtggaggttgcagtgagccgagatcacaccattgcactccagcctgggcaacaagagtgaaactctgtctcaaaaaaaaaaaaaaaaacaaagaaagcatgatgccttagggaaactcaagtagtatgggcattagttaagcatgggcaaagtgtaggagggaggcaacagcaagattaggaagggccttgtatgtgtgtttgggagtttggattttattttcttgagatggagtcttgctctgtcaccccaggtggaatgcagtggtgtgatctcggctcactgcaacctctgcctcctgggttcaagtgattctcctgcctcagcctcccgagtagctgggattacaggagcccgccaccacgcccagtttcaccatgttggccaggctggttttgtacttctgacctcaggtgatctacccgcctcagcctcccaaagtgctgggattacaggcatgagccaccatgcccagctaagtttggattttattctgaaggctgttggcactattatttcatgcaggggagtgatgtgaacatatctgagctttagaaatctcacttcagtaggagtgtggatattgaattacaggaaggtaatcaatcaaccagttaggagattgataattatgatgagaactgaaagagtctgaattagggcagtggctgaaggcttagataagaggagatagattcaaggatgatttagggtatagaaatctgtagaatttagtgattaattgaatgtgtcatgggggtgggtggggtaacatacagcaaatagtcttgaatgactcccaggatcctccaaatgatgtgtcttttccaaaacgcttttcatgaatcttagaagatttggtagataatttggagctggaatcacagggatatgttggggctaggacagtgttccttgttcatttctttggggcaccacgaactgcgcctatagaagatgccaaacttaataaatgcctgttctgactgctccaccaacccgtcattcccatctttacctctcctcaggcctccctattccctgagacacaacaatattgaaatcaggccaattaataaccctaaatggcctctaagtgttcaagtgaaaggaagagtcacatatctgtcacttgaaataaaaagctagaaacgattaagattattgaggaaggcatgtcgaaagccaagacaggctgaaagctaggcctcttataccagttagccaagttgtgaatgcaaaggaaaagttattgaaggaaattaaaagtgctattccagtgaacacacaaataagaaagcaaaacagccttattgcagatacagagaaagtttgagtggtctgtatagaagctgaaaccagccacagtattcccttaagccaaaacctaatccagagcaaggccctaactctcttcaattctatgaaggctggggaagaagttacagaagaaaagttggatgccaacagaggtgggttcatgaggtttacagaaagaagtcgtctctataacataaaagtacaaggtgaaggaacaagtgctgatgcaaaatgtacttagtgaatggtcctttttagtagcaaccagtacttgtcactttaagtttcgctttagtagttaaagtgatttaatgaaataatttttaaaaacttcaacctttacaattaatgcttttccttatctttcagctgggctgctgcatgtggccaggttcagtgggctttgtagatgtctgtttttctacttacccctcctccctccttcagcttgctaattcttttttctccggggcttaagcaggacaggagagggaagagatgaagaaagcctttacttgactaatacagtcataaactaattttaaggcttggcagataagttaggcatggtggctcatgcctgtaatcccagcactttgggaggctgaggcgggtagatcagttgagaccaggagtttgagaccagcctggctaacatggcaaaaacccgtctctactaaagatacaaaaattagccgggtgtggtggtgtgcacctgtaatcccagctactcgggaggctgaggcagaattgttggaacctgggaggcagaggttgcagtgaaccgaaatagcgctactgcactccagcctgggcgacagagtgagactccatctcaaaaaaaaaaaaaaaaaaaaaaaaaaaggcctggcaggtatctaaagttgactcgttttcaagaggtccttttataggttcttcagaaattctctccccattggtggagatatctcttctatagtgagttacttcagtgtgggtgaatctggctcctgtggttggtcacttacaactccattaaaaatttctagacattaaaaaactcaactttattgagatatagtttacataaaataaaatgtataaatcttaagtatacaggtcaatgaattttgacaaatacatacccatgtaaccacctccaaaatcgagataaagaaaattttccttatgccccttctttctttcttagtataaatccacaggcatttgacagcatatcccctgcttctttctgctgaagtctcctcaaaatttcagataatttatctaacgagatcaagaaacgctaaagacatggcccatatccggtctatgggtagcactcatgcatcccttgcttataaatgggaagtaattgtcactaaattatacctttttaaatggttgattttattttatgtgatgcctcgatgggaatatgtttgtgtagggccctgggaaggtttatgcttgctctgagtataggagatagggcccaaagtaaaattcttaggttccatcttcttttcccttccccatactgtctcttgtcaccccctacctctacatatgcttgtctggattaaaacttgcaagagatggtgggaggcaggcctgaggttgctttttttttctttttcttgaaatgctgcaactctggcagatatctgggggctctttccttacccctccttgcctttctgggaatagccttctggacaattaagaggcttagtccctagtgagaatgaaggagcaggtttatgctggtttcccagggactctaattcttcctaagttgcatgagtacgagggaggaagagcactgactgcctcctttggaatttccctagggcctctatctttttcaaaaaaagggtgtttctcttggacatcctgggcttcactatcttgccagaagtgatgagggccccaaagccttgtttatgggagaatgcataggcagaacgtcgagtgcttgagtgtttcagtttggtccagactggggactgctgtggaagtctcctgcactcttgaattctgtcaaaaacctatagccagagcatgggggatagggttttcatccacagaggcaaaagcaaa

SEQ ID NO: 97500 - DNA, 13823 bp, Homo sapiens
gagatgttttgattcaggcatgcaattgtaataattacatcatggagaacggggtattcatcccttcaagcatttttctttttttcttttttattgttttttgagatagagtcttgctcttgtcacccaggctggagtgcaatgccacaatcttggctcactgcaacctccacctccttggttcaagcaattctcctgcctcagactcctgagtagctgggattacaggcaagcaccattacacctggctactttttgtatttttagtagagacacggtttcaccatgttggccaggctggtctcaaactcctgacctcaagtgatctgcccgtctcggcctctcaaagttctgggattacaggcatgaaccaccacacctggccccctcaagcatttttgataaaggcacttatcccactcactacagctccaccttcatgacctaatcagttcccaaaggccctgcctccaaatattatccccttggggattcggtttctacctatgaattttggggagacagaaacatcagtctttggcacctccccatatttggaggagagccccagcattctgtctgccattaattgtcttatctcaactacagcagaaggaaggaagggtgtccaagggagagaatacagttatgggttcttagtttctgtttctggtggggtcactaaagccccttccttatcccttttttccacttatcactagagacagaaactaaaaatcatggcttcaggctgccaaaagcctaaaacaaaacaaaacagaacgacaacaacaaaataaggagggttggacaagcttggcaaggaagccgtaaggtgagaaccatgaaagtggaagtgatcacctgaaacttgacagcatttcagatagagaggtgcatttcaaagacctcgaggtggatgaatgcttggcttgtcccaggaacaattaagatatgagtgcagctggaccagagtgagagagtaggacagcagtgacagatgcagttagagaatagatgggaccagatcatgcaatgagggatagactatgggaagacaggagtaaaagcaggaagaccaattaaaagaggtgctaggccgggtgcggtggctcacaactataaccccagcactttgggaggctgaggcaggtagattatgaggtcaagagatcgagaacaacccagccaacatggtgaaaccccatctctgctaaaaatacaaaaatcagctgggcgtggtggcacgtgcctgtagtcccagctacttgggaagctgaggccagagaatcacttgaacccaggaggcagaggtttcagtgagccgagatagtgccactgcactccagcctggtgacagagtgagactctgtctcaaaaaaaaaaaaaaaaaaaaaagatgctgatggcttggtctaggatggttgcttgagatgggatggggagatattgttggattctggatacatttcacatgtaataataggtgggatttgctgatgcatttgttctacagagtgagacagaagaattcagagcatctccaaggttggtctgagaaactttgaggctggaggtgccattaaagataagatagactagggcaggagttcagtttggggaaagaaatcaagaatttatttttggcataagatacctgttaatgggccgggtgcagtggctcacccctgtaatcccagtgctttgggagaccgaggcaggcggatcacgaggtcaggagttcgagaccagcctggctaacatagtgaaaccccatctctattaaaaatacagcactggtgtttggaatatcagtaggtagcatagtgcagtggttgagatcatggacttttggcctcaactgctggggttcaaattctagctttaccacctattagctgtgagaccatgggcacgtcacttaacccttatgtgccgcagtttcctcttctgtaaaagggggacagaattacctcatcaggaggattaatatggagattgcttggaaaattgcctgatgatcacacttctggagctatttgacagcgaagaccctcgggaacgggactactttaaaacagtcttacacagaatttatggcaagtttctcggtcttagagcatttatccaaaaacagattaacaatagttttctaaggtttgtttatgaaacagaacgcttcaatggtgtagctgaacttctggaaacattaggaagtattatcaatggctttgctttacctcttaaggcagaacacattttctggtgaaggtattgatccccttacacactgtcaggagcttatcacttttccatgcacagctggcatattgtacagtacagtttctggagaaagatccttcactcacagaacgagtattagggggttaatgaaattttggcctaaaacatgtagtcaaaaagaggtcacgtttcttggggaactggaagaaatattggatgtgattgaaccttcacaatttgttaaaatccaagaacctttgtttaaacaaatcgccaagtgtgtatctagcccccattttcaggtggcagaaagagcactctattattggaataatgaatacatcatgagtttgatagaagaaaactctaacgtcatccttcccatcaagttttccagcctttatatgatttcaaaagaacattggaatccggctattgtggcgttggtgtacaacgtgttgaaggcatttatagaaatgaacagcaccatgtttaacgaggtgacagccacacacaagtcagatcgtcagcatgagaaaaagaaagaaaaggagtgtgaagaatttggaaaaaattggaggatctggagttaaagagaggtcttagatgtgatggaataattccaacttaacaaaaacaatgacaacaacattactaacctgtggagtcacacatttatgtagtagaagatggagcaacagttttccatattgtgcagctttacagtagatttcacatttgtttcattattacaacagcactgtatatacctgtctctaagtaaaggaaaaaaaataaggacttcagtccaaagtttggacagcagatggacttctcaggactttgcaaacataatcattgttctaaccctctttttgaaaaaaatcagtcctcaaagttctgttgatgaaattgctatgttaaaattccattatcgggagttccttatttatcactagcagagagtatgatacaattttcaaatgtgaacaatcttaaatttagcttgtctttctgctaagctgttaaatgtatttatagtaaaggaagaaaaaaagactcatttccttataagtttgtgtaacatcctcctctggataacttgactgtaatttgacatcttttcttttgcacatcttcctgagttgaatgtccatgtggaatggggtcatgacagaactgataaaagttctgtttactgggatgaacatctttctagtaaccaggtagtcctggtactcctttagttttaaaactaggagttaaaagagaacaggtgataaacatagtaaggaagggaattttggattcatgcatcagtttatggtgaatccaaatcaatgtcttgaatcctttgaaaacaggcactgggacatcacaggcttcagtacctgaccagtattagttgcatatatcattgaacacacataccacagatgttttagaaatgcaagaaaaacatccttttggaccatttgaaataagaaagacaaacactaaacaatacaaccatgaaattgatcgccgggattgcaaataaatctaattgggaaaagagttgagcaaacagcttggactgtttggagttgttgccttactttttaatgtatatttataaagtattccagcaaaagaggatgtagcctctgggaaaaaacaaacatgttacagtgttttttgtagattctcattctatatctcatcacagcaccagccctcttttttgccggaaaggattcaggataagtattattatgcattctgaattggatgcatattcctaactactgtattggttaccaaaagtggttctacaaaggctactgaaaaaaatctggaaattcctaatgtcttgagtattaataataaagtttaaaaatggttttatatcaaaggtgcatcgtgatcaaattgtttaagaaaaaaacaaaaaacaaaatctagggctgtattatatatatgtatatatatgtgtgtgtatatatatatatatcttattgactcttcgctttgtatttaaatgaagaatcttacatcttgggtaggtaaactgctgataaaacttgtgtacagtatgtacttacctaatgcagttgcattattatgtactgaaagatatgtgtttgggggtttatttccaggatgattttgcttgttatggacatggcagcagtgagttggtaatcctaaaccatcacttccagcagtattcgtgctatagagctgattctgtgttcatgcattgaattgtgatagtagcaaacatgaacatatgaactattgttgctcttaatagaaatacaatataaatacgggcttgtatattttcttccttacatttaaatataaagtagaatatacagttttattgttttcaagaaaaaggaaaaaaagctgctgacctttctcctccatgaagtttttcaggattatcaggtcacagtgtgtatgtaagagtcagctaattatggatattgttatctcagtaactttgtaaaaaaacaagaacaaaactggcattgttaattaaaaaaaaaaacccgcagtaaaaaaaaagtcatatgcaacaccagacacaacatggtttaatggaattaatagtatttttttttttaaaaaaaagaacattgatgaggattcactgtaaagttggtagaggctgccaaagacaaaacaactgactttaaaaatgctggaacaaagtgataaaaataaatttgttacaaatctcttttttagccctcgtcattttagccctttagtttcaactctacgttatatttatttttgatgatataaacttttgttttccattaattcatctttttaggtagaggatattaaaatcacaggtttatgaagaatctctgcccattggaatgaaatgcagtcatttgaaacgagcaaggccaggatcctttttcgcaccttaccctgtcttcaagagtaaaggtgaaaacttacagctctcctccttgatgtcaattttgtatgttgatcattccaaactgagaagaataaagccacattttagacatatttaaagtatcaattaaagctatatgtctaaaattcatagggcaacttctgagaagaaacgctgtctttttcttttttaatggaaagtgacaatgtgacattagtcatgttgtgtgcggtgacggagagtaactgaggtaatctgactgttgcactgtgtgacatatttcaggacatacttgctgcatttgcagcagccctctgtccctgtcccttcccacaattctgctgttgctgcaacttgagttaattgtgacaaatgaaactttgtgttatattttgtttgcttcataatttccagaactatagataaatatattttttaaatagcaaatattgtagttagtaagtgatgatgactccaaccttatccttaccatattgatttcagggatatgattaaaagtgtctttggaagagaaaaatatacacaaccctgtggtttagaatgatgctgaggccttaggctgtgggcctagaacagctatgtgagtgaattcccccatctcatacttggaatcaagcatgcgtccctgtttttcattgtgcaagtatccccagttgttttccttcagtgttgagtttttgtccttttaaattttattatatgttgctctccctaatatttgactgttctttataaaagaaaagaaaaaataagaaataaataataccctcaatgccgctggatactcacaagcagggttatgtagatcttgggcttgtttgmctaaatgaaagggtttaatttattttgtacctcctatgtgtgggatagtccaggatgcagagccaggacttgcttgtaattgcacctgctatacttaaatgtatagccttaggctcaatcacactgtggaaagaaacaaaaatattatatttagagctttaaaagcatttttatttttttgtggggatgaaggtgggatgggaaagtgatgtatggatgttattggaatttttaagtgtttagagttttttggggtttggggtttttttccttgttttccttttttccttttaattggatgcactgacctgcccaggaaatgaagagattctcttttgatgctcttaccaatgttatcataaggtgacagtcacctgcaacaaaagggtggcaccagacatgatcactgatgttttatttgcacatcaatatttttatttttgtactctggctcagctgcttctctgagtggagttaaggaatgagccacaagggattttttgtagtaggcatattggcattgcattttatattcctctatatttaattttgaaaatctaaaaggatcgtgcatcttgagagaaagttgagcaaattgtgttctagcggaatgtgaatttgtagtgcttcttgtgcatgacagcagcagtagtatctctcttggaaataaatatcctatattatgatgtctatgaatataggtttccttttcttccgtccctccctcctttcttctcccacctttctcttttttctctttctctgagcctctcttttcctccctccctcttcccttcctctttctttactttttttgaaatcacttattgtaaataagttgtaatccaaacctcatgtataaatggggaactttcaaatataaatattaccaatgcgttttctggttgttgtctgatttttgattgaagtataatgagaatgacatgtctgttacttttggtttgaggacttcgctttarcttcataaatcttttggtattttagtatttcattgttttagcagagagggcagcaaaagttcattttccctgttagtaatgctgtggttcatgatcagttttaaatttagctgtgtgtgtttttttaaacagcatctttgtgagtacagtaaaaatgaaacatttttgatacgaaaagttgcatatgaaaattatagactggttcggccgggtgcagtggctcacgcctgtaatcccagcactttgggaggccgaggcgggcggatcacgaggtcaggagatcgagaccatcctgactaacacagtgaaaccctgtctctactgaaaatacaaaaaaaaaaaattagctaggcgtggtggtgggcacctgtagtcccagctagtcgggaggctgaggcaggagaatggcctgaacctgggaggtggagcttgcagtgagcggagatcgcgccactgcactccagcctgggtgacagagcaagactccgtttcaaaaaaaaaaaaagaaaaagaaaaaaaagaaaattatagactggttcaaccagacagtgaagacttctgatccacatcaaacttaaaatgccacaaaacaatcttccacctctggctaaaacatgctactttcttttcaaacacaacaaaatgcaagctgagtcttaaatacttggaatttaaaatgttttcctttggaaatgatttgctttcttcaaagttgtaacagaaacaaaaatgaaggtgctccccaaaaagaaatgtaaccttcccctttcatggatgtgtgagaggttctgtactgtgggtgcatcataataaagaagcagtgaagagtcaaaaaaaatgcaaaaattagcagggcgtggtggtgtgcacctatagtcccagatacttgggagactgaggcaggagaatcgcttgaatctgggaggtggaggttgcagtgagccgagatcacgtcactgtattccagcttgggcgagagagcgagactttgtctcaaaaaaaaaaaatacctgttaatataagtggtaacattaagtacttggagtttaggggagaggttgggtattaatttagaatccatcaatgcatatatgacattgaaagccttagggtgtatgagatctcctgtgtggaagtgtatataaaagagagaaggcaggtggggactgagccctgggcactatggtgttgaaaaatctgaagaggccaggcaaggtggctcacacctgtaatcctagcactttgggaggctgaggtgggtgtatcacttgggctcaggagtttgagaccagcctggacaagatggcaaaccccatctctacaaaaaatataaaaattagcctggtgcagtggtgcacgtctgtagtcccagctacttgggacgcttgagcctaggaggtcgaggctgcagtaagccaagattgtgccacgtcattctagcttggacaacagaccaagaccctatctcaaaaaaaaaaagaaaatcaggaagactacaagaatgtaacaaaaagtctaagaaggagtagcctccgaattaggtaggagggggagaactgagaaagcggtattctggaatccaagggagaaaagttaagaaagagagagggatcagctacatcaaacattgtcaaataagatgagaactgagaattctattacatttagcaatgtgtagccactgttgaccttgacaatagaagtttcgctccagttgtggagaagaaagtccgcacggtgagtccaagagagactaatatggagactaattggaggtacacagaaagttattgaggattttgctctaaaggaaaagcagagaaattagttggcagctaaataaatatgtgagatcaagtgaggagtttccccaaagaggatatattccagcatgtttaggagaaaaaaacaaaagggcaattgcaaaagcacagttcttatcttataggcaagaaggggtaagacaaatgcactggaagattggccgtgagttggagcagagatccaccaccattgtaataagggagaaggtgggtggataaagatgatgagtacacttggtagtaggaagatgaagtggtccttttcagtttgtttctaattccccaatgaaatgtgaggtcaggttagtgcagtgttctcaaagtgtggtcctcagaccagcagcaacagcatcacctgagaatttgttagaaatacaaattcctgggccccaccccaggtatacccaaccacaacctggagatggggtccagcaattggcatttgaatgagccttccaaggccaggcgccatggctcacgcctgtaatcccagcactttgggaggctggggcgggaggatcacctgaggacaggagttggagaccagcctagccaacatggtgaaacccccggtctactaaaaatacaaaattagccaggtgtggtggcaggcgcctgtaatgccagctcccagagacacagaatcatttgaacctgggaggcagaggttgaagtgagctgagatcccaccactgcactccagcctggggaagacagagcaaaattccatctccaaaaaaaaaaaaagacaaaagaatgagccttccaggtgatgatgacatgtgctcaagctagagaaccaccggattagtgtgaagagggagagagcagggaatcagaggtttgagaaaatacaagaagaaatagtttctctagctcatggaggagtgggatgactagggaattgttatgggattgctaagcagggttgaggactcacttttgtggtcattaatttaaaaaatgagaccaactagcaagattggttttgtttactctttctatattcagcttttcaggggcaagagtggagtatgcagagctggattttcaccagggttggtgttttgctggacaattgtgacaaagggaaggagagcaaaaaggtggaacacgtgagcctgaaagttgagagtgcaagcaagagagtgtctctgaagatgagccagagaacacaaggagagtggtctgtgtgtgaggatcagtgggttggatttctgggtggagtagaaggactcttggagggctggttttagaaggaatggggcaaaaaggtgggatgtggttgtcggacccagattttggagaattacagtgagtgacaatggcatcttggctatgcctgaggctgcgagttgcacaggtgggtcaaaagcaaccatcagagatgagaaacccaaggaactgtaaggtcagatgattagaaggatcatttgcatagttgcagaaataaccaaaaaacgcaatgggaatattggtggagaggaaggtgtcaatccagaaactaaactcttccaagaacgaagaaggagggaagcctgcagagctgtagatggtcacaacaagggtgtggtattatagaataagctccccaaaagatggagactttatggagaggctaaaaggagtagcctagaagcagtgatcatgattgggtacagccgggcgcggtggctcatgcctgtaatcccagcactttgagaggccgaagtgggcagatcacttgaggtcaggagttcaagatcagcctggccaacatggtgaaaccacgtctctactaaaaatacaaaaattagctgagcgtagtggcatgtgcctataatcccagctatccagaggctgaggcaggagaatcactgggacctgggaggcagaggctgcagtgagctgagatcgcgctgctccattccagcctgggcgatggagcaagactctgtctcaaaataataataataataataataataatagtaataataattgggtaggatgttgggtggggagaaagcattgttgtttgatagggttgcacaggcatctctcaggccatggcttaaatttagtaagaccaagaggctaagaaaaacactggggcacagctttaacatgaaggggttttggctgatgccacactgtttcagggaaaacagtggaaggacttggaaggtcaggggtacgtaggggtttgcatcacataaagagatgagaggccgaggctggctcatgcctgtaatcccagcactttgggaggccgaggtgggtggatcacaaggtcaggagattgagaccatccttgttaacacggtgaaaccctgtctctactaaaaatacaaaaaattagccagtcttgatggcatgcgcctataatcccagctacttgggaggctgaggcaggagaattgcttgaaccctggaggcataggttgcagtgagctgagatcacaccattgcactccagcctgcgccagagagcaagattccatctccaaaaaaaagagagatgagagtctgctgctgatattgacatggatgtcttggattcttctagtggcaaaagtaaacagagaagaaagacatgataacatggatcctgatgatattggtatcttaggaataaagaattgattctaatatagccttcttcctgagattagttgtttaggcatattgtgggattaagattcaggggtgccctggtcaaaacagctccccctgtgcatttcctctctggcactttccatagtgtgtccttatctcttcagctaattattttctcttctgtctcttccataccaaaataatctccaagacagtaggaaccatgtttactctttaatcattgtatgctcactaaatatttgctgaacaagtgaacaaaaaacctggtggtggggaaattagactaattcttaatgtcaccaggaggtgcaggtaagttgaaagaatagaatggacctaagaagagggccgggcacagtggctcacgcgtgtaatcccagcactttgggaggccgaggtgggtggatgacgagctcaggagatcgagaccatagtgactaacacggtgaaaccccgtctctactaaaaaatacaaaaaattagccgggtgtggtggtgggcgcctgtaatcccagctactcaggagcctgaggcaggagaatggcgtgaacctgggaggcggagcttgcaatgagccgagatcgagccactgcactccagcctgggcgacagacctagactccatcaaaaaaaaagaaaaaaagaaaagaattgacctaagaagaacttgctaatcattacactggtatagtcacaggactgtctgcctcctagggaatgagctgtcactttgccacagttttaaactagagctgtgtggcctggcgcggtggctcacgcttgtaatcccagcactttgggaggctgaggcgggcggatcacgagttcaggagatcgaaaccacggtgaaaccccgtctctactaaaaatacaaaaaaattagccgggtgtggtggcaggcacctgtagtcccagccacccggagagcctgaagcaggagaatggcgtgaacccgggaggcggaggttgcagtgagccgagatcgcgccaccgcactccagcctgggcgacagagctagactccgtctcaaaaaaaaaaaaaaagaagttaaactagagctgtgtgttcagcctgctggtcatgtgatttcctgcattgagccaaaagttgggtaagatgaatcatcaaaggccttgacagttctagaattcaatgaaactaaagcattcacgtgtcacttgtgagtggtgtcatatctttgttcttcatgaaaaaatccagtgaaatactcattccctggtgttactcccaagagcttgaattcaatcattcatccaccatacatccattcatccatcctccttcatccatccaccattcatccattcatccatcctccttcatccatccattcaccatccatccatccactatccatccattcatctatccaccatccatccaccactcatccattcatccatccaccactcatccattcatccatcctctttcatccatccatccacaatccatccatcaaccatccatccattcatccatcctccttcaaccatccatccaccagtcatccattcatccatcctccttcattcgttcatactcctttatccatctgtctctccattcatctgtccatctatccatccattcaaccatccatccattcatctattcatccatgcatccattcatccatccaaccatcatcaaaaaacattaatacatcactcttcaaagccacgccgggtcctatggaaccacagataaaacatatgtggtctttgaagaacccacatatcaatgggggagaaatacatgctaatagaaataataacaataatatccaataccaggtttctatatgagaacacctgtcatatagtactttctaagtgttctacaaatattaattcatctgtctccagaagaaccctaagaggtaggtactattattgttgtcaattcatatgtgagaaaagtgtggttagaattttcactccatttagaatttgggatgctataaaaacagccctggtttagcctacgtcatgtggatctgaaacaaatacttttaagaatgaacttgttgctgtggtggaggtggctgttttgagtgacaatatcctttccagtcatcattgtagagaggaaagaatattgttctgaaattcaagaatctggatgttagtctggttctgtggttagctgtgtggctttgaacaacttgctttcctcctctaggccttactttcctcctctgtaaaaggatcctaaatctgtgtgtgaggaagggcaagtgtggtaatggctgggttcagcagaatccctgcatacagttgtataaggtgcatattgcccaatcccaggagccaccacatacataggctaaatgtgaatggagccacctggaattgttccacatg

SEQ ID NO: 97501 - DNA, 12518 bp, Homo sapiens
gttggcgcactgcctgtaatcccagctattcaggaggctgaggaaggaaaactgcttgaacccaggaggcggaggttgcagtgacctgagatggggccactgcactccagcctgggcgacagagtgaggccctgtcacaaaacaaaacaatacaaaaaaccaaactaccctatggttgtcaggtcatcattcatagtaaactgcagatgacaggagggcaaaatacacctgcctcctcatctgagagcatacatccctcgctccacattcttagcaagagtaaaggaaatcacctccttacaaggactcagtctgcaaaagaccaaatgcagctgctattaagctactaccaccgtaacaaagcacagtgctgaagagttcatatcctcagcccagaaagctcttctgattaagcagatgtgagattgaatcacattccgtgccataaatagcagtatctacatcttttaaggagagaaaagtaatttctaacactagaatttttccagctaagtacatgtcattcattttactattctgtacaaaattttccaccaaaaatatatctagtatgtatataacctaacaatgcactgcataaaatatccaacagatgccctactacacctttcttccaaccccaggctcaggacggcttgctccttaccctgtccaaagccatggcttctagctaatactctggactgcccttgcccacagccccagggccctgggggcaaacgccatcccctaggctcccgctcactgctataatcccacacgccttcagcaaatcaactgccccttgactggggtaaacacctcaaccttttttccttatgtgcacttttataaaaagtggctcttactagttacagcaaaccattcaagcaagctttcataaatagatctacatgcatcaggcacttctgatattcctggcactgttaccctccaagcaaagtttgaaagaaagctagctcactttgtgaggacccaaagttttcccagtagggagcagttacaggtagggagaatcaaaatggaaacaccagctgtgtgcatttccagcatcctatgtcatactatggcttcaatttttgttcttttttaactcaacatcagaggatatttaaacacctgaatatcaaaatacaaaaacatgtccaaaaggcaatgaaaatgagtttgggaccatttacctctttggacacttcacgcctttttgtctttacattagaaaatggaaacttaagccacgcacagtcccttatgcctggcctataaacccaatattttgggaggctgaggcaggaggatcagttgagtccagaagtttgaaactagcctcggcaacacagtgagaccgcatttgtaccaaaacaaacaaaaaagtaaaactaaattagccgggcatggtggtacatggtggattgtggtcccagctactagagctgaggaggatcacttaagcacaggaggtccaggctgcagtgagccacgaccatgccactgtgctccagcccgggagacaaagtgagatcgtcaccattaggcaaaacaaaggcatgattttaaaaaaatgtttcacatttattatcatttttgagacagagtttcgctctcgttgcccaggctggagtgcaatggcgtgatctcggctcactgcaaactccgcctcctgggattctcctgcctcagcctgggattacaggcatgcgccaccacgccccgctaattttgtattttttcagtagagactaaggggtttctccactttggtcaggctagtctcaaactcccgacctcgggtgatccgcctgcctctgcctcccaaagtgctgggattacaggcatgagccactgcactcaggcccacatttattgaaccatctatctcctgaaaaagaacaggagagtcagccacaggcaaaacctttaagtatgaagacaatagttttcaacagcacaataaaccttacaccttcaacaaaagcatgtcctactgctgaggctccactgggccaatgcaccaagagaatttaaaatgctttaaaaatgcaaaccagggaggacctcagtgggaaacaggtccttgtcatcatacaaggcagttaggtattacaatgccttcatttctgatctgaaaaatggacatgactcctacatttcttcacagttgtgctggggggtggggggggagttcgtgttgttttgtgtctcgctgtcacccagtgcagtgccgcggatctcggctcactgcagtctctgtctcccaggttcaatcaattctcctgcctcagcctcccgagtagctgggattataggcacaccaccatgctcggctaatttttgtatttttcgtagagatggaatttcaccacgttggccaggctggtctctgacttgaggtctcctgacctcaagtgatccgaccacctcggtctcccaaagtgctgggattacaggcatgagccaccacgcctggcctctatctgttgattattaactgccagccaaatgttggcggctgttcagtcttaacagacgagactcagaatctcgctagtcacacatcttagtgggaaaggcaggatctgaatcaaggcaggattacaccaaagagcaaacatccaagctcctccttcctgtccctgactaggctagatggcttcatttactagaaagtgtactcacctgaacaactgtgtaccccttgggaattttcacttctgccttggaaaaccacaaataaccctcagacacctgcaccgctttctcacatgactgtaagtttcattgcaattaggatctatgtccagaaagtcctccctaaaaccagaaccagctatagcccactccccacagaaccctgggatgaattcccacccagcatcagtatctatgggggagggatctccagcactttcatgagattatcaacggggtctacaaattgacgaaaagaatgaaagggtcaggtgcggtggcttacacctgtaaccccagcactttggaaagctgaggtggatggatcacttgaggttaggagttggaaaccatcctggtcaacactgcaagatcctgtgcctatttaaagaaaaagcttctaacatctgcaagcctgggacaaactgtgataatctgtagctaaacatgcgccaggactttctcaacgcctaacatggatgaccactctcatgcctaacagtcagggctcaggtgtagagactgcttttcaccataaatcatgactacccaaactcaggcaaaagcagcgtctcaggatatacaaatgccaatcttggtcatgccaatctgctgtagaaagcactccaataacaccgcatctcagagtagattttaaaacaagatggttaagatggtacattttcaatttaatgtgtatttcaccacaattagtaaagtaagcctaagtctatgtgatctgcatgccctcctaaagtcatcacctgaaatgctgttccctgagacattttacaggttctctcctgttcaggcctttgctaaataccacctaaatgtccttgaccagcttaaaaaaacaagcaccagcctggacaacatggtgaaaacccatctccactaataatagaaaattagccaggcttggtggcccatgcctgtgattccagctacttaggaggctaagacaggagaatcgcttgaactctggaggcggagtttgcagtgagccaagattgcgacaactacactccagcatgggcaatggagcgagactccgtctcaaaagtaaaattagccaggtgtggtggcgtgcgcctgtctgtagtcccagctacttgggaggctaagataggagaattgtttgaacccaggaggcgggggttgcagtaagccgaaatggcgccacggcactccagcctgggcaacagagcaagactccgtctcaaaagactaaataaaacgagaaaacttaattaaaaaaacaataaaccaagcaaatgtgcaaaccctgttatcaccatcacttagcccagaaattccacttcatagtctactctcatccactagcaaacaggccacataaacagaatataaagatatagacgggtgcccaggtgtgccaggcctatctttagctctggtcattactaaactgaaggtccaataactgggcaaaaaagccacacacctaagaaacagggcaaagactgatccagatacacttttcctactccacaagtgccactaaaagttagaaggctggttccatttatccaatgacacaactctcatcactggaacagaggcaacagaagggagaatgaacctcacaagccctgcaccccatccctctgctgtggactcccatacgcaccttcgaacagacgccgtgggtccttctcatcaagcgtcagcagttcccgggcggccttgcggatcttggccagggtaaatttgaccctccagacctcacgtttgttccggagcccatactcgcctggtggggagaagggggtggacaagtgtagtcccacgtactggcacaacaactagactggcagctttggaatcacaaaaccttcctaaaccacgaatagtaccaaatttaggggacggactagatagagtacatgggcaccttcattcacgtgctaaccgcctcccggaagccgaaccacttcccggaagccttggccactcaccgatcagcttcagctcttggtcgagacgagatttctcgaagggtctccgcggggtcacataagttttgcgacaaacccagctccgggccactggcatgttggctccgcttccccgtctgcgcctgcgcgggagagaagtgtgagcgtaagggctccaaacggcgcctgcgcagtcccacaactacgccaaaacctcgcggagcccagatccgatctcgcgagaataacctccaacgctctcatagtcagtatctgcccccacaaccgtgctgcactcccgttcaaccaccctgctctgtttcctaacgtctttagcttactcatggaaactcggaaggcccgggccaccatccaacccaaaccctagagaaaaagcacaccgccgcacctcacctaagcaaaccacccggtcactgagaaagaggcgcgcaagcgccacggctgcgctcttatagtaacgccggcgtctcgtgacgttttcacgcaccacgcacgtcagagccaatcagaagaggcgttggctggctgagaagcagtggagacgtgaggctgggctagagcggcgtgctaacctgggaggactaggttttttccggccagggagtggaaacctgagaagtagggagaaccttccttctccgcccctggacggtggtttttctttttctttctgagacagggtctcgctccgtcgcccaggctggagtgcagtggcgtgatttcggctcactgaggccccgaccaacctctcgggctcgagcgatcctcccacctcctccccagtagctgggattacaggcacacgccacgacgcccgggtagcattttttttttttaacagtcggcgtcttgccatgttgcccaggctggtcttgaactcccggcctcgagagagcctcccgccgtggcccccccaaagtgctgggattacaggcgtgagccaccgcgcccagccgagattatttctgtcactaacaataatgtggcattctggaacgctatgtgccacatactgttctaagaattttaaatgtatttactcaatcttcaatacatacttacagagcactctcagagaagttgcccccccacccatggtactattattatcaatagccacttaaggggtattagtactattatcagtaatttattttatttttgagacggagtttttcgctctcgtcacccaggctggagtgcagtggtgcgatctcggctcactgcaacctccgcttcccgggttcaatcgattctcgtgcctcagcctcccgagaagctgggactacaggcgcccaccaccatgcccggctaatttttaaatttttagtagagacggggttttgaactcctggtctccaacgcctgacctcaagtgatccacccgcctcagcctcccaaagtgctaagattacaggtgtgagccaccgcgcctgacctagagttctctttttatatatagtctggttattgtctgtctgtacacccatctctccactccgaatgcgatggtctgtctccacagctcgtgttcttcagttgtcttccctacgctgctgcctcggcagtcactatctcctcaggaagcagtcccacccgcccctttctcttccacggcatccacaccatccggatgcctggattcaaatgccacgtcaccacttgccagctgcagtgccttcgacaagtttctcaatcactctgtgcctcagcgwcctcctctgtaaaacggcgaatgatggtagcgcctacctcataagcttgtgaggattaagtgagagtctatccagtgttgaggagagtggcataaataaagcgcctagtggtagctaccatcgtcattattgtcatctgcattgtacttccatatcttacaaactaccttgttcagttttatgggttttttgtttgtttgttttgttgttttgagacggggttttgccatattgcccaggctggtcttgaactcctgggctcaagtgatccactcgcctcagcctccccaagtgctgggattacaggtgtaagccaccatgcctggccaaattttatgcatttttgtatcttgaacacgcgtatattattcatctggaagggggaaacgtggaaggaaaaaacttccataagttttcactcccttcaggatgaagtccaagctccacaaattccgggtgcctcgtgattacagagatggttttataatggtggttgaacctgtaggttctcaagtcttaaaaaagatctgcgtttgaacctcagcagtcactgacgagctcttgatcttaggcaaattagcctcttcaagagtgctaaatgggagaaagtaacaggactttcctcatagggtttgatgatttagagtaaaaaaaaaaaaaaaagaaaagaaaaccagcacagagtcttgtgtactgaaggtgcttaatatcttaacacagctgactctgtacagtctgggggcgaggggcactgacccccagctcagccgaaaacctccatataggctgggcgcggtgcctcacgcctgtaatcccagcactatgtggaaggccaaggccggcggatcaactgaggtcaggagttcgagaccagcctggccaacatgacaaaacctggtctctactaaaaatacaaaaattaggcaggcgtggtggcaggtgcctgtaatcccagctacttaggaggttgaggcaagagcatcgcttgaacccaggacgtggagattgcagtgagccgagatcgcaccactgcactccatcctgggcgacagagcaagactgcctcaaaaaaaaaaaaaaaaaatcaagaaagaaaatctgcatataacttttgacttccccaaaacttaactactaggccaggcaccgtggctcacacctgtaaccccaggtgggatttgggaagctgaggtgggcagagcacttgagcccaggagttcaagaccagcctgggcaacacggcaaaacccagactctacagaaaacagaaaaattaactgggtgtggtggtgtgtgcccgtagttccagctacttgggaggctgtggtgggaggactgcttgagtcaaggaggttgaggcagcagcgaactaagatcatgcccctgcaccccagcccagctggcagagcaagacactgtctcaggatttaaaaaaaacattactcgtagttgactggaagccttaccaataacatagtcaattaacacatattttatacgctatatgtattatattctgtattcctatgatgaattaagctagagaaaagaaaatattggccgggcgtgatggctcatgcctgttaccccagcactttgggaggctaaggcgggcggatcaccaggtcaggagatcgagaccatcctggctaacacggtgaaaccccatctctactaaaaatacaaaaaattagccgggcgtggtggcaggcacctgtagtcccagctaccggggaggctgaggcaggagaatggcgtgaacccgggaggcggagcttgcagtgagctaagatcgcgccactgcactccagcttgggtgacagagcgagacttcgtctcaaaaaaaaaaaaaaagaaaatattaagaaaattctaaaaaagagaaaatatatttactattcattaagtggaagtggatcatcataaaggtcttcatccttgtcttcattctgagtaggcagaggtgcagaaagaagaggagggtttggtcttgctgtctcagggtgccagaggtggaggaggtaaaaggcaaagcaggagaggcaggcatgctctgtgtaacctttacttttttcaatctgcataaaagtggacccgagcagttcagacccatgttgctcaagggtcaactgatgagatctggcctcaccctgatcctcttcagaagcatggtccagtcatatggcaccaggccctcttccacaaacccctcatgcttcctcctctctctctctcactcaggctggagccctctagcccttcctctctgaaaggagcacgggtaatataagaggaacccttggtttccatcatgggttgccaaggaccagctgggcatgcttggggagctgaattcctttccttttgtacaagtgtaataaaatctaattatgccccatccataggacgcaaaaccatgtagctgttggcaaaaatgagacaagcctgggcatatccaataagcaagatgcagaagtgtgcatagtatgctacaattttcattaataaaaatgaccttaacgtatgtatatttatttaaaatatgcttagaaagtcatgtaggagaaattataatttccaaattgtctcagccctgatttaaaaattatagtttaagccactcatttatttagcaacaatgtattgactgctgtgtgccaggaactgttcttggacctggggatactgcatgaacaagggtaaataaaacaaaaaccaaaaccaaaaccttgtccttaactagaaacaaatgccaatcacctgatgaatggataaataaaatggggttatgtccatacaatggaatatccagcagtaaagaggaacaaagctggccgggcacggtggctcatgtctataatcctagcactttgggaggctgaggtgggcggattgcctgagctcaggagttcgagcctgggcaattatggtgaaaccctgtctctactaaaatacaaaaaattagcctgacgtggtggcaggcgcctgtaatcccaggtacttgggaggctgaggtgggagaatcgcttgaacccacttgaacccaggaggcagaggctgcagtgggccgagattgtgccactgcactccagcctgggcaacagagcaagactctgtctcaaaaataaaaaaaataaataataataataataataagcaaggaagagaatgcacatggccagttcatgaggaagctgcaaagtaggacctttgagttttactctgagatggaaaactccaggaaagttttagacagagctgtgacatggtctgacttatcttttaatatgatgattctggccgggcgcggtggctcacgcctgtaaccccagcactttgggaggccgaggcgggtggatcacaaggtcaggagatcgagaccatcctggctaacatggtgaaaccccgtctctactaaaaatacaaaaaattagccaggtgaggtggcgggcgcctgtagtcccggctactagggaggctgaggcaggagaatggcgtgaacccgggaggcggagcttgcagtgagcagagatcgcgccactgcactccagcctgggcgacagcgagactccgcctcaaaaaaaaaaaaaaaaaaaaaaacaaaaaaaaaaacgatgattctggctgctctgttgaaaacagacaacagaggggcaagaatggaaggcaggggatgagttaggaagctatcaatatcaaatgagccatggtttggtttttctaagatactggcagtgaaggtggagggtggggcctaactgtggatccacagtgctttgaacatggcacctatagaatttgttgactgacaacatggggggacaccagtcacaaaagtttttttttgtttgtttgttttaaatagagatgagatgaggtctcactatgttcagccaaggctggtctcaaactcctgagctcagcggctcaactgatcttcccaccttggcctcccaaagtgctaggattacaggtctgagccaccacatctggccacaggagttttaaatgaggaacttttcagaggagagactcatgacagagggaatgagacttctaagtactttgttgtagagaggagaaagggtggagaatagacttacaaagccaattatgaagcaggcacaaagagagtattggccagacaggggttagcgtcattttttttcttttcatttttttgagatggagtttagctcttgttgcccaggctggagtgtagtagtgcgatcttggctcactgcaacctctgcctcccggattcaagtgattctcctgccttaggctcctgagtagctaggagtacaggcgcatgccaccacgcccggctaatttttttttttgtatttttagtagagatggggtttcaccatattggccaggctgatctcaaactcatctgcccacctcagcctcccaaagtgctgggattacaggtgtgagccaccacacctggcccagtgtcatattttaaattaatctaaacttacaggaaattgagattctatgaagtctgtttactgggaatggcaagaaagaggggagatgggagtctctctaaacctattctggttccagaggctgctcaattcacacaaaaaagagaaagaatgaaacatggggggaagaaatggaagaactagaggtggagactttcagccccagaattttaccatgtggaagtttttgtttgtttttgtttttttgagacagtgtctagctctgtcgcccagactggagtgcagtggcgtgaccttggctcactgcaacctccacctcccagattcaagtgattctcctgcctcagcctccggagtagctaggattacaggcgcccgccaccacgcccggctaatttttgtatttttcatagaggcgggccatgttggccaggatgctctggaactcctgacctcatgatccgcccgccttggtctcccaaagtgctgggattacaagcataagccaccacgcccagactcaccatgtgaatgtattacactgacaaaataaacgtgacaaaataaaactgcacattgataagataaaggtgtaattattggaatagtggtagtgttctagtactttcttaagcaaaaacatgggtaaatgatttcataagtgcaaattttttacaaatacatgtgttttagcttttataaaaattgcagaatataacacatccaaaaaagagtctaaaatataaatatacagtatcaaaaaaattctccaccactacccaggccatgaaaaagcagaacgccttccagagtccttcctttctccccaggctctgaactcctaaaattacaatactcatttcctttcataatatatatatatatacacacacatatatatacatacatgtgtgtatatttacatatatacacacacacatatatatattttttgagacaggttcttgctctgtctcccaggctggagggcagtggtgcaatcacagctcacagcagcctcaacttcccaggctcaagggatccctggctaatttttttttaaattattttttgtagagactgggtattacaatgttgccagagctggtctcaaactcctgggctcaagcgatccccctgccttggcctccaaaagttctgtgggattacaggtgtgggtcatcgtgcccagcctatatttttatttataacgtttgtatgcatctgggaaatttcatagaaatcttttcaaaaggaagtttagtgaggtagaaagagtgcagatttaggagtcagaaaaaccaattttgaaaggccaggcctgctatttactaagtgtgtgactttgggcaagtcagtccccctcctccaggcctttttctcacctgtacatgcagatgagaccatccacgggttccaggactgtcgcaaacattcaaatcatgaacatttatataccaagtttattgagacctcctgagacttaaaccctgtagaaaacagatgaatcaaacccaggccccattctcgggaagctcacagtgtgaaaataggtaactacaaaaacacagccaataagtgctttgaaacaaggaagaacataaaaaagatgtagtgttcgaaaacctggaatcaaaaactaaccgcggaga

SEQ ID NO: 97502 - DNA, 13742 bp, Homo sapiens
acccaacccagaagtccagctggcttcacctctcactatcataagacaatgagtttctggttaaaatgtaagtatgtgcctggaaggggtcatatctttctactagtttaagagattggtttagttgggccaagagtggatggataaatgaagtgaattccctcaacatcaaggatgtagatggagggttttactgggagagggccgtttaggggatgagaccctgagcagcataagggttatctacgtatctcttcattttcccattcacacctattccttccagagctattgctcatctctgccccttcaggaggaattttcagagggaattatctttactcattgtcttttttttttttttttttactttccattgactccatagtccattccaatctgacctgtaatcctgttcctccatcactccactaaacaactcttgctacagtaaaatctcagtaaccatcacatccctaaggccaattgcattccagtcctcattaaagcggaagtctcagtggtattcaactcttgtcagtatatcgttttagaaataccccttctttttggcctttatgacaatacactctcctggttttcctcctacctctgcagttgctcattctcaaggtcttcagttgtcccatcctgacaattcactcttttaagattcctcaacattctttccttggcctccttttccaattcccttagcagtttcattcattcctcccctttcaattattatcacctacatatcaatgactcacaaacataatctccaatccaaacaactcctctctattcctaactcatttgattgtctcgaagagactagaaattgatcctagcccaattcgaactcaagatcttccttccaaactaggtttcttctaagtcttcctggcctatatgaatgaagtctgaatcttaagggagatttttgacaacattctctccttcactgccatattcatctcaccatctgttctgttaattatactttctaaatgcatctggaatgcatctttttccaataaatatggaattttctacagttaacagcaatcaaatttcatttgaaatatggctatagtgttttgtagtacagcttttatgttcgtactgaagataaaatggagaagtaggacttttccataagacagtctctagctagcattttaccttggtttttaacagcactttaacttttattatcattcatttatcaagcacaatcatgtatcattcatgtattaaatggctagtttaattccaaatgaacatttactagatgccttcagattttcagaatctataccacctcattattttattaggaaacctttaaaaatgctaaaattttcttaactgcaaatatcaacacagatttggaacttgataagggttatggctgtgtaccattgtgaattactaagtggcaacacataacaaaaaattatattaaagagtggtaccctttaaaattatttattttgtgttatgtgaattttacctcaataaaaacaagtatcagcacaaaggcagaaaatttctgagaggctgatttttctcctctataaaggaccttacataactccactgggataattgtctatccaagccacagaaatcaatttgaatctgcagttctgggaaagattaggtcaggctttaaataaagaggtgtaggcaaggtaaattgtcactgaattcttaaataccactcagagttcaagactgtacttcttttgaattacttccactctttcactgtgaacaattatatgggctggttcctaagaaccattgtaaaggccaatctagcatcttttttttttttttttttttttttttttttgagatggagtctcgccctgtcgcccaggctggagtgcagtggcgcgatctcagctcactgcaacctccgcttcccaggttcaaatgattctcctgcctcaacctcccgagtagctgggattactggtgcccaccaccatgcccagctaatttttttctatttttagtagagacagggtttcaccatgttgaccaggctggtctcaaactcctgacatcaagcgatccacccaccttagcctcctaaggtactgggattacaggcgtgagccactgagcccggccccttcattcttaaaggtccctaaagagggagtttttaaaatctttagtagcatattctggtgtctcaccccaaccctcaaaatttgtgaggcttagttaaatctctccttcatttttaagaatctatttcttctgtgttgaattctcagtaggaataggtaaaaatatcatcagcctagtcatcagatgacctaagttcaagttctcggttcaaattctgacatttttatcatcaggttgctaaccttaaacctcagtttcctcttaataaaatggaagtgataatgtctgtttcatagggttctttcaattcctaaattagaaaatgtatatgatatcatatagttatttttaaatgtaatttattacctcagtaagacataattctctgccctattctaattttatttcatgtggataattcatagataattttaaatctatgtcagttttttactacaaaaggcagcatatggttaaatttcaaattaatgatatattccactaccctagtcccactgaaaatattaaataacaccagattctaagtcaatctagaaaactatcctgtcctctggatccctttacttcattggtatctattgttcatttgttatgagagagaaagtttattgtttcttccatcagagcttatgatcctgcttacagcacaaaacatgtatacaaatgaataaaataaaaagcaggaggaaacaagcaccagaaaaataaacttcatacaaacttagaacattataccgggtgaacaacaagaatgattttgtagttcagccctcaataagccatcattagacattaggtaaatatattaataaaaaagcaatttttataaaatcaagacaaaaaagggagttttataaaaatcacactgtagaatcataaaaattcagcagtggaaagaatctttgctatctcctagctcatctgcctttgacatgggataatattgccccactgtaccccaggagcatttggtaacacgagaagagtgttttttggttgtcatgactagaggtggcagagcatgagtgggtgggacctagaaataccaaacatactgcaatacaagggacacgcccattcaacaaataattatcctgcccccatcctacgcgccaacctctcaacctccccctgccccatagacagaaggaaaaactgatgttcacatatgatacgagatttttccatgatgttctgggcttagcattagtctatatttcagacagtgctattaaacagcaacatcatgtgaggcgtaaatgcaagccacctgtaatattaaatttgctgtcacattaaaatatttaaaaactagtgaaattaattttgatagtatattttctttaaccctgtctacataaacctttatcatttcaatatgtaatcaatataaaattattaatgagatattttttgtgctaagttttcaaaatctgttatatatttatacttaacagtacatctcaattcagactagccacagtgcaggtgcccagtagccacatgtgcctaggtgtggcccccatattgcagctctaggagatcctgtgtgtctttctcacaaattagtgtcataagcacccgagtgcaggacttcagctgactccgtctactgttcctgtcactgtgtcatagagacaggagattggtctgatagactgttttacagaaagccaaatccatgttcatcattattttgtctcctctgatcttttaaggagttgcaaattgcaaataatcgcttgagattattttgtgttctctgatctttaaggagttgcgaattgatttctggatgagtcacttgagtattttttttaggtctgaagctaaatggcccatttgataattccaggctggacatattctttttctgaaaaatatgcaatatctttaccatttgccctaattgctttcattatttatgtaggatagtacctgagcacaagtttctagcccttcttgttagaattatacagcttagttctttatttattatttatttatttatttatttatttatttatttatttatttatttattttgagacggagtctcgctctgtcgcccaggctggagtgcagtggcgcaatctcggctcactgtaagctccgcctcccgggttcacgccattctcctgcctcagccttccaagtagctgggactacaggcgcccgccaccacaaccggctaattttttgtatttttagtagagacggggtttcaccgtgttagccaggatggtctcgatctcctggcctcgtgatccgcccacctcggcctcccaaagtgctgggattacaggtgtgagccactgcgcccggcccggcttagttcttataactgttcttggtagtagtatttgcgtaatttttcttgctgaaacttccataaacattcctgtatttcctccagctaataaagtatttatgtcttaacccttttttttacaatatcaattttatgtgttactaagctccttctggcattctttcttgctgtattgaatgtaactattttgtcaatttttcttcatttctctagagctcagttattaaataacgttttgcttggagtattatataattatttttcataaatctttttatttctgcttgactttcaattgaaataaccctgaagtaagaagcgtatatatatataattttttatttggatttcagatacaaaccttttaatttttaagtctttaaacacagcaaaccatagattttaaagtatattgagcctgtacatgtcaggtttagatcatgagaaagaggcaatcatgtcatcttgtctgaaaagatttaagggaatgatttattcataatttagctgggatttgatacctttgtgccctaaaaagagaataaaataaatggtcttttctagtctacatatatttttgtgggtctatttttcctccaccaaaatagagagttgtgtaatctggacaatggatctgtatgtctgcttttgtctatactttctggctgaattttctgtaaagtccagattataaatattttatgctttaccaacttaatggtttctgtcagaactactcaactctgcttcccattgtagcatgaaagcagcagtagccaatatgtaaactactgggactgattgtgttccaatcagccagtttcatttcgtaaaactacatttacgaaaacaggctgtgggctggacttggcacatggaccataatttgctggcccttgttctggctatttcagaatcactaccttcactatgactgtatagactgctcatcccatctcccatcctcatgctggcctcatgatgttgagttgttataatgactttaaattcaaaaaagacagatttagggattactaattattgtatcactatgaaactatatttttcttctagttcacccactaagtatattataaaaaatatttatgcttctgcttttaaaacacaatttcccaatttttccactgttgttttcttttagtattttagtgaggtccataaaacctcacctttagcttcgggtctatcaccacccagcttttctgcccttaattttcatttatttctcattttatgttcatttgctgtagagtgaacactctgctaaattttccaacttttaccctacagtgtaaaagcagcctttttttaaaagtttttaagatgaacttagggataatttgataatttggggataatttgataatttggggataattttagatttacagaaaagtttaaagatagtacagagggtttctgcacactttcacccagttcccaccattgttagcatcttaatataccatggtacatgaatactagctgaactcaaggctttatttgaatttcaccagtttttccattaatctcctttttctgttccaggatcaaatcccagctaccacactgcatttagtcatcaaatcaccctagttttctctggtctctgatatttcctcagtcttttcttgtttttttgtttgtttgattgtttgttttttgttttttttttttcatgaccctgacagttttgaagagtctggtcaggtaccctataaaaattttcccagtctgaggtttatctgatgttttcccctcataattaggctcaaattaggggtgttttgaaagactaccctagaggtgatgtgtccttcttatcatatcatatcaggggtttttgataggtagccacatgccattactggagatgttaaccttcatcacttagttcmggtagtgcttgcttaatttctcccctataaagttactatttttccttcttcatattttatgctttagaagcagagcactaagtctacccaaccttcaaggagaagggggaaagggaactcagccgcatctcccggaaaggggaacagccacatttattatttgaaattctcctgtatggaagatttgcccattattcctcacttatctctttattcaaacatttatttatttatatcagtacaaactcatggataattatatcatactttgtgtaataatccaaatactacgttatttattttattgttcaatttgttccagctttggctggtgggagctctttcaggttggctcctatattcctttgatatacccgtatcctttttttgagcactatcttactctctgccactacaagatgctgtacgctcaccttgtatttttccttccccagtgctagaatcagccatttctccaaggactctggctcctcttgttggagaatgatattagaaaccaagatttgtgccctgagtgttctaattgctagcaaggtgtcattgactctaggccctctcagttaacatagctaagaaatgcatgatttgtgtgaactaaccaatatatatacacatatctataaatatttatatatctatccatctgtatctacattaaactaaacatgagtttgtactaatacactgccacagggctcactgagtcacatttttaaaagatcgctccaaaaatattttataaaacaacagcaacaaaaagggataactaactgttccaagagtggaggcagtgagaccagtttaggctgttgtcatctaggcaagagatgatataggtttgaattaggatggtaacaaacaacaaggaggagatggagctgattccagacagactttgaagatacagctggtaggatttgatggtagtttggatatgaagtaggggtaggagaatgaggggaaatagaaggatgaaggacaactcatggattggaggtctgaaggaaatgtgtgcactgtgatgccatttgctgaggtggggaatactagggaaggcgcagctttggaggggaggatacagacatcaaaagttctgtttttatcttgctaagtttgagaagctctttagacaaggtgacaagtcaaatgagcgggmacrcctaggagtgtggagctcctgcgaggagtctggactagagatataaattatagtgttatcagcatacagatggtaattgaagccagsgggctagatgkgataacccagggagaaggcaagagtgatgacagaaaaaaaaaaaaggatcagcactgagtcccaagacaagacacttcagcatttagaggttgagcagaggaggagccagcagaggtgatttcacttctctgctagagttcaagattcatagtagttttatttttaattaattaattaatttatttatttattgagacggagtttccctcttgttgcccatgctggagtgcagtggtgcaatctcagctcactgaaatctccgactcccgggttagagggattctcctgcctcagcctcctgagtagctgggagtataggcgcacaccaccacacccggctaattttttgtagtttagtagagacgggttttcactgtgttagccaggatggtctccatctcctgacctggtgatccacccacctcggcctcccaaagtgctgggattacaggcatgagccaccgcgcccggccaaaattcacggtggtttttatctgagatgtccgcatcacacatttcctcactgctcttgaggttccactgacaatcagaagaatttcaatttttacattaattttgttttgttactgctttggggaggcaactggagatgattcaacatttattaaatcaactctttgggattaatgggtgttctcttcttctgaaatacaatgttctgttctgttttcatgaggctccaattgaaaactcattcctgcccctgtcctcatttccctccctgggtctgtgaacagctttctgaagagacagagagaagtgagctagctctgggagtaggcagtggaagagcactacagtgctttccatacctagctgaaaaggacctgtagaaaatctgcagacacatttatgatcagggacttctttcccttcctaaccaaaatagaaaaccaagtctcagataaacaggccagatctccaagtcttgcgcatttctccagtcctgtctgcatttcccccatctctaccctgagccaggctcctaccagccccgcaagggaaaagggagtaaaacagcctttcaatatgcttaggaggatttgtcacaggtgattctccataaaagtgtaaggagaaaacttgtaatgccatatatgaactgaaatggacaatcgcaagattatgtgtggctgaagacatcaccattgagacagtaaggccggttagacgagctttcagtgacagaagttaaatatgatgcttttgaaacaccgatgtgtgtaaagacactaaaaacaaatgcaacataatagccaaaacttgtacttgacagaaacacctagagctactgcaggaatgctttctctgtttgtgtatactctgaggatggttaccactgaagtgttaagtggctaaattataattgctatgggaactgtaagtgaaacttgacctttgatacacttacatgttcagccataacattgcattaacaggctcttgcatttacctggtgtatgcggctttgcttcaggctttcagggagagtaacttgaactaaaaattgtttaagaaggagaatgaagaaagcttgattcctttcaaaatctcatccactcctagcatcagagctcacttcttcaaaattgtcttgtaacaatgcttttcaaggcaaggtaacaaattcttgtatagagactactactcctttaaaataaatagtggactcttacttatcagaaagtcagttgcctgactatttgtattggttgattaggacttttggctagggcctctaaacagttagctttccagtgactttcagaaagtagtaggagaaaaatagctatggcccagtgagtagccatgtgtgagaaataaccatcattaattatctcaccgaattcaaatcacatgaaattcaaaaataagtgaattgcacactacagtgaataattctctccattgttttgttattgcatttccacaaattaaataaattaaacggatgcaaatttgatttatgcacattttatgattttgcaaatgtgaatattctgagtaaatgtgaacaattggacgcatgaagcccctacaaggtttcagagtactaaaacccaaagaagcaaagaagactaccttggaaaggaaagaggttatatttattaagcacctcctgtgtcctgggcactatgatggatgctttatatatgcaatcttcttttaatctttaggattctccatatggcagatgttgtgaaccaactttcccaatttacgtggttacctactggtgaaatcagtatttgaacctagttttgggtaactctaaacccctgagttctttaaacagtatctgtatatttgcagatttctatacagcaaataatatttgttatattatatataaacatatgacaagtgatatttgttatatgtttacaaagtagctcaacattccataaaacattgcatttgtgcatgaaataccaacatcaactaatttgtctgtgtaagggatgaggtcgattaattgagcatcagcttttataacagttcatgaagcacaggagtctggttggcataaataaaaatgaaagggaaatggaaagcaagagactcaaaacaaatgcttcggtttctttagtgacaatttttgtatttatatacaaatgtgtaattatcatccacaccgtacatattaagagatgtctttttcatttgttaacaacgtgattaagattcttaaatttttagctagcaacttttctaccctagcatttatagcagagggtcaaaagctgaccttgaaataccatttttttaaagcttttatttttttttagcagtttttggttcacagcaaaattaaatggaaagttcagcgagttcccatatcccctgtgcccctacacatgcacagcctccccattatcaatatcctacacaagagtggtatatttgttatactggtgaacctgtatggacacatcattatcacccaaaatccatagtttacattagggttcacttttggtggtgttctttctataggtttgggcaaatgtttaataacatgtttccaccattatagtatcttacagagctgtttcactgccctaaaaatcctctgtgctccatctatccattcctccctctccctaaaccctagcaaccactgatcatttttactgcctcgatagttctgccttttacagagtgtcatgtaagtggaatcagacagtatgtagccttttcagaatggcttctttcactcagtaatatgcttttaagtttcctccatgtcttctcatggcttgatagctcatttccatttagccctgaattatattccattgtctaaagatactacagtttgtttattcactcacctactgaaggacatattagttgctttcaaattttggcaattatgaatcaagttgctatcaacatttgtgtgcaggtttttgtgtggacataaattttcacctcttttgggtaaataccaaggagcataattgctgaatcatatggtatgagcatgtttacttttgtaagaaactgccaaactgtattccaaagtagctgtaccattttgtattcccaccattaatgaatgagagttcctatcgctccacattctcaccatcatttggtgttgtatgtgtttgggatttggggttctaattggtgtggagttgttacattgcctttttaagcacaatatagtatttcaataggcaatgtactagagacatgttattctaagttataatacaaaatcttggcatgtcaattttctcttgctctctccgtaggttaaccattgacccctgcagacatttaagcttgctcatcctaatgtagaactgttccttcaaatggagtatatattatttcctagaggaataaaactgtgtttcctttatagttaatagaaacaaaaagtcaagatgtcttctagtagtccattggacaggttaccaaatttcagaacgaatcttcaacttctcaggttctgaaattcagtctcagcatcatgttagcattgactagattcaatggaatggattcccagtatgtgaactcgtgaaaaattgatgtttaagctaaatgcgcatttcttcctaggtactgatatgattgtgcctgcattccatgagacccactttctaagatcatgttgactgggtattgtggctagtccataaagttggaacagacctccatccaaaatttgatttaggtttccaggctagtgatgccacacacacacacacacacacacacacacacacacacacacaccacaggagggtatgaagaggtttattactcccataatgatgctttctggagaaagcaggataggcatctcaagttgaaaatgtcttgagagagctgggataaaattaaaggagactggctttgggttttaatgtggttaagggacagggttggggtgagggtggcagtgtatgattcgaacttactgctggttacagaagaggagcacctgaggatttttgtcagcttgccccagtgttggacagaaagagaagatggaagggttaggctgaaaagatgtctgcagtcaaacatcaaaaaatggagtcagactctattgcacagggtgttcagattagcaagaaaaagattgtttagttaacatggaattgaagcaaagtatggtgacccctcttgaaatggtccatactatgaatggttaagtctaagtggcatctctgtctcacaacaatgtaagcctttttggattccagcatatgaggcttttgtgtctctaccttttgatcactgttaggaaagagaagccctataaattcttgctatttacttctgtttatacatttttcttcaaaacattatttgatgttggagatgtcaatacattttctgacgcagtccttcttgcactttaaactgggtgtcaatacatcttttttggtaatttcttcaggttagtaaatctcatctgttatgggtagaataagactattttaactcatagtgttccaaggaaactactatctaccatctacaattactttcagtattttaacaaactggatgacagtgtcttctttctgttgcttatgaagtctcatcctgaatgttattacaaaacactgaccctactcttccatgtcaccatttaaaaggataaaaatgtatatattgtggaatattggtaacagcagagaaaattcctagtaataattatgtgatgcataaagagtaaagtagtaaagatgagatcaattctgaaggactgtggctgatggtcctatatctatgctgagaacaaaagaatatactcaaagagaaatagaaaatattcagaatacatttgaaaaacaactgcaaaaatagtggagattcagagaaaaacctcttcttaaaggatttatttaaaactgtttattttttattgttttttattctcatatatttaaggagtgccagtgcactcctttcaagtattacatggatatattgcatagcggtgaggtctgggcttttagtgtaactatcactcaaataatgtacattttatccgttaagtaatttctcatcccttaccttcccctcgtccttctgagtccccattgtctatcattccactctgtatgtccatgtgtacacattatttacttcccacttataagtgagaacatgctgtatttgactttctgtttctgctgtttcacttaagataatggcctacagtttcattcatgttgctgcaaaagacatgatttcatttttttatggccaaatagtattccattgtgtacatgacatattttctttatctaattatccattgatgatcacttaggttgattgcatatctttgctattatgaatagttttgtgataaacatacaagtgcaggtgcctttttttatagaatgacttcttttcttttgggtagatactcggtagtggactgctggatttctatgtttagttatttgagaaatctgcctactgttttccatagaggttgtactaatttacatttccatcaacagtatataagcattctctt

SEQ ID NO: 97503 - DNA, 13216 bp, Homo sapiens
  misc_feature (1)...(13216): n = A,T,C or G
nnnnnnnnnnnnnnnnnnnnnnnnnnnnnnnnnnnnnnnnnnnnnnnnnnnnnnnnnnnnnnnnnnnnnnnnnnnnnnnnnnnnnnnnnnnnnnnnnnnnnnnnnnnnnnnnnnnnnnnnnnnnnnnnnnnnnnnnnnnnnnnnnnnnnnnnnnnnnnnnnnnnnnnnnnnnnnnnnnnnnnnnnnnnnnnnnnnnnnnnnnnnnnnnnnnnnnnnnnnnnnnnnnnnnnnnnnnnnnnnnnnnnnnnnnnnnnnnnnnnnnnnnnnnnnnnnnnnnnnnnnnnnnnnnnnnnnnnnnnnnnnnnnnnnnnnnnnnnnnnnnnnnnnnnnnnnnnnnnnnnnnnnnnnnnnnnnnnnnnnnnnnnnnnnnnnnnnnnnnnnnnnnnnnnnnnnnnnnnnnnnnnnnnnnnnnnnnnnnnnnnnnnnnnnnnnnnnnnnnnnnnnnnnnnnnnnnnnnnnnnnnnnnnnnnnnnnnnnnnnnnnnnnnnnnnnnnnnnnnnnnnnnnnnnnnnnnnnnnnnnnnnnnnnnnnnnnnnnnnnnnnnnnnnnnnnnnnnnnnnnnnnnnnnnnnnnnnnnnnnnnnnnnnnnnnnnnnnnnnnnnnnnnnnnnnnnnnnnnnnnnnnnnnnnnnnnnnnnnnnnnnnnnnnnnnnnnnnnnnnnnnnnnnnnnnnnnnnnnnnnnnnnnnnnnnnnnnnnnnnnnnnnnnnnnnnnnnnnnnnnnnnnnnnnnnnnnnnnnnnnnnnnnnnnnnnnnnnnnnnnnnnnnnnnnnnnnnnnnnnnnnnnnnnnnnnnnnnnnnnnnnnnnnnnnnnnnnnnnnnnnnnnnnnnnnnnnnnnnnnnnnnnnnnnnnnnnnnnnnnnnnnnnnnnnnnnnnnnnnnnnnnnnnnnnnnnnnnnnnnnnnnnnnnnnnnnnnnnnnnnnnnnnnnnnnnnnnnnnnnnnnnnnnnnnnnnnnnnnnnnnnnnnnnnnnnnnnnnnnnnnnnnnnnnnnnnnnnnnnnnnnnnnnnnnnnnnnnnnnnnnnnnnnnnnnnnnnnnnnnnnnnnnnnnnnnnnnnnnnnnnnnnnnnnnnnnnnnnnnnnnnnnnnnnnnnnnnnnnnnnnnnnnnnnnnnnnnnnnnnnnnnnnnnnnnnnnnnnnnnnnnnnnnnnnnnnnnnnnnnnnnnnnnnnnnnnnnnnnnnnnnnnnnnnnnnnnnnnnnnnnnnnnnnnnnnnnnnnnnnnnnnnnnnnnnnnnnnnnnnnnnnnnnnnnnnnnnnnnnnnnnnnnnnnnnnnnnnnnnnnnnnnnnnnnnnnnnnnnnnnnnnnnnnnnnnnnnnnnnnnnnnnnnnnnnnnnnnnnnnnnnnnnnnnnnnnnnnnnnnnnnnnnnnnnnnnnnnnnnnnnnnnnnnnnnnnnnnnnnnnnnnnnnnnnnnnnnnnnnnnnnnnnnnnnnnnnnnnnnnnnnnnnnnnnnnnnnnnnnnnnnnnnnnnnnnnnnnnnnnnnnnnnnnnnnnnnnnnnnnnnnnnnnnnnnnnnnnnnnnnnnnnnnnnnnnnnnnnnnnnnnnnnnnnnnnnnnnnnnnnnnnnnnnnnnnnnnnnnnnnnnnnnnnnnnnnnnnnnnnnnnnnnnnnnnnnnnnnnnnnnnnnnnnnnnnnnnnnnnnnnnnnnnnnnnnnnnnnnnnnnnnnnnnnnnnnnnnnnnnnnnnnnnnnnnnnnnnnnnnnnnnnnnnnnnnnnnnnnnnnnnnnnnnnnnnnnnnnnnnnnnnnnnnnnnnnnnnnnnnnnnnnnnnnnnnnnnnnnnnnnnnnnnnnnnnnnnnnnnnnnnnnnnnnnnnnnnnnnnnnnnnnnnnnnnnnnnnnnnnnnnnnnnnnnnnnnnnnnnnnnnnnnnnnnnnnnnnnnnnnnnnnnnnnnntggggagcggtgggggtgggccggggggaagcatggggatgaggctgggtggcaggatcctgtcctctctgccgcctcattctggggtgtggctccagccttccctggcccccgccggaggccgggagggagcagggtctccctcagggctgcaggggcaggtgcagggaagccccaggatgggcttccctggagggggagggtgggggggagttctgttccttgtgccccgaggtggggcagccccttctcattttatacaataaacattctccacctacacctcttgcctctcactacctgcccttctgtcctggggcggtttgctcctaattcccctctgtgatggtgcagagcgggtccatcacaccccagccgaccccagccgcacttcagagctgagttcccaaaggcagcactaagcttcctccaccctaccccaggggaagagggggcctgctgagctgctcagccccccaaaggagccgacccagatcaaagcaatagctagtgcattgagccctagggatgattacttggctgtgtacaaggcctccctcaggctgatttgtgcctctgggagggcacatgtcagggaggggtggggagaggcgggccagttctcaggcagcgcctgttgtgctgaccgggaaggtctgaaaagaggctgaagcaggtcaggcctctctgagcctcgtgggagccgaggcaggctccccgcatccctcaactcctctggctggcaccgggagtaagggcaatccaggcagaggggcagggtggaggagggcgcgggggtcggggtgtggtgtggagagtgaagagagcagtgacccagcacagtccgctgacgctgaagccagaatcagtgggcccggagccatggtcccgggattggagtcactcgggattggagggtgccatgaggtcccgggattggagtcactcgggattggagggtgccatgaggtcccgggattggagtcactcgggattggaaggtgccatgaggttccaggattggagtcactcggggttggagggagccatggtcccgggattagagtcactcgggattggggggtgccatgagggccactgtctgcttccgccttgtgctgtgtgggggcagctcctactggctcaggaaagccaactgctgaattctcaacaattttgctagccagttgttaatgatcattaacaaattatagaagcttacaatttgtgttattaaaagcaaaatcggcaaacgtcacttcctacttatttctgcatacacgactgttttctctgcccctcggttatgtacatctgtgggacctatggacacaaacaccacataacagggtgctgagggcatctcctccagctccacgttaaatgacatctaactggtagcttgaaatcagccgtggtgggaggaggcttgacttatggttacttgtctagacttcagatgataaaatgcagattagacttcagggtgctgtgtctatgctcattacattgtgaatagcacaagttgaggaaacgctcttctagtttccgaaaaccatcatctgattcaacaaagtggctcagatcaccgacgaagtggagaagcttgacgttctccttgtttcccttttgtcttactcattagcttgaaggaagaggagccaactgtacactcacagagggggccatcaacactcacatgcacacaccgtctcaccccagaggttctggacaggcccgaaggccaaccttgctgaaattcaccaccctctttgggaggtgacctttcaccacctcccacctccctgacagagaactggccaggcctgaaaacctcaggagtgggagccacgctcccccttggattggaatgtgaatgtcatgggtctctgcccgcgttccacacctggccccaagcccccagctacctgctggcagcctaggaatagcacatagtctgggcagcagaatcaggtttattggagggattgggggtaggatgagcacggcatggggcttgaggtgtgtggagggagctcagcaggcccagaagcccccttccaccggcaaagtggaacccgtggtcatgccacttcggtcactcagcagaaagaggatggcgttcaccacgtgctctacctctgtgggcagggcgggggtcaggggcatagaggaaggaggctgccgcccatctttccctcccacccctacccagggcacacacagggactgctggcaccacgctggctgggctcccacctgactcaccagcaaacttgccaagtgggattcggttcagcatagtcttggccttgtgggggtcactccaggtggcctggcccatggacgtcatcaccactgtggggtttactgcattcactcggatctacaccgggacagctggggtcagcagggcaagtggggtgtcctaggttgggggaggtaccccagccctgctcaccttgtggggcccgagctctagggccatcaccttggtcagcatgtccagggcacccttggtggagcctacgaagaggaacccaagctggctggggctggggtcggtgatgagggcgaggctggggctggggtggggctgagggcacagctggggcactcacagtagacgctatggttagttactgcccgctgggagcactggctggagacattcacgatggcccctgggactccccgggctattaagcccctggccacaatctggaatcgcagcgagaccgtgaggcagagctggcatcactcacgagaattcccgtccagcccacagggcagctcacctgcgacacctggatgaccgcacgcaggttcacctcaaaggatctagaggccgagggacagaccctggtcagagattagggctgctgcgtcctccaggacagcccctccctgaggttcctccgccctcacaggctcacctgtcaaaggcctccttggtgacctccaggaagggctgcagcagggcgacagcggcgttgttcaccagcaggtccacggggcccacgctgcccagcgcccgctcggtggcctcccagtcacccaggtccacgcacacgggttctatccccgggcactgtgtgtatcagggggcagttaccagaggctctgtgcccagcaagcggcacagctggggactggggctggtgacctttcagccggacaagtaaaggagttaggagttccgaaggtgtcgggactgtggggccagcagccgggcgctacctccggccggttcacttcctccctgcgcccgagcgactcctgcccggggcctgcttcgcagccatttcggcctctttctgagcccgggggccccggcggctctgccgaccacccggccgcccacgcaggccaccagccccgagagagggtgcgcgggcgcccaggccgcggtgagaagcgcagcgcccgcgaggggaggcggagtcgcgcacagaggtaccgcccccgctcgctgccgccccctcctggctcgccgcctcgcagcgctgggacccggcgggacctacctcgcggacaaggctgtcaagatccgcctgagtccggctcacagccaccacccgcgcgcccgtcgcgtgcagcgcctggaccgtgccgcgccctatacctgccgatagcgggctcagtgaaggcgtcccctgcccgcctctgcccgccgccggcctttgcccacctttccccgccgcccacctttgcctgccccggtgaccagcacccggcggcccgcgaggaacagctccatgtcggcgcagtctccgccctccgcactggggctgcggaacttgaagctctggccacgatgggcggggcgcggcggggccaatggcagggcggccttcagataggcggtggggacattcaaatagctgctccccgctgcagtgattggccgaaaggagtgggcgcgccggggcggggcggggtctccgctgcctcagggacgggtcttttgaagtgcctggtgtgacccatcttccgtgcttgaaatcgacgtagtggaccctggctagcatatttttccctgccaagattattgcaaaaagacgatgtggtggttaatatcggaaagaatgtgtggttaatatcaggaagaacacgtgaaatggagaatttcagggctaacatttcttgttttgtttctgaaaacatcggcatgtcctaaaaagtgtcgcctgtgcccatcatctctcaggcttgggagcaggacaccgccggctcactttaaagccaagggaaagaatttggacaaccaastacgtctggagaagacaccaatgtcagcagagctccgctttcatctgtgggcgaaggattacctagatgccaaggcaagagactgaagacacaaactgtttcagtataacaaagaaaataggccgggagcggtggctcacgcctgtaatcccagcactttgggaggccgaggcgggtggatcacgaggtcaggagatcgagaccatcctggctaacacggtgaaaccccatctctactaaaaatacaaaaaattagccgggcgcggtggcgggcacctgtagtcccagctactcaggaggctgaggcaggagaatggcgcgaacccaggaggcggagcttgcagtgagccgagattgcgccactgcactccagcctgggcgacagagcaagactccatctttaaaaaaaaaacagttaaaataaaaatagtcataatacaaattagatataaaaatgatcatgatcatggataattatcaatcattagtataaacattattaatcattagcttttaatattactctttgttgcattactaatataacctagggacattgtgagaagtgacctagaaggcaagaggtgagccctctgtcactcccgcataagggctgcttgagggctccttggtcaagcagtaatgccgttgtctgggaagccacccgttacttagaagactgcgaaggggagtctcctttccttggaggcgtcagggaacactctgctccaccagcttcttgtgggaggctggatgttatccaggcctgcccgcagtcatccggaggcctaaccccctccctgtggtgctatgatttaatggtcacatttcttgtccacttccaygttcctcccgtactcctggttcctctttgaagttcgtagtagatmgcagtagaagaaatagtgaaagtcttaaagtctttgatctttcttataagtacatagaagaaagcgctgatgtatggtcttctctytctgtttcagctacctaaaagggaagsgccccctgtcctatgatcacgtgacttgcttcaccttgtcaatcacttggaagattcaccctccttaccctgccctccttgtcttgtatgcaataaatatcagtgcgcccagccattcggggccactactggtctccgtgtcttgatggtagtggtcccccgggcccagctgttctctctttatctctttgtcttgtgtctttatttctcacaatctcgtgtctccgcacacggggagaagacctgctaagccccatagggctgtaccctacattcatctgaaagggacttgaaccccaggtcaccttggacagccagcatccggccaggggcaccttttagaagttgaataggataggaagggattggggtcatggaagtacatggtggtccagcaaagaccagcattgcttcccgaggctttggggtcagttacagatgcgtgtgtgtgtgcacccacacactgggcctccatgtaaaagctactttgttctgtgggtcatggtaggaaagtctagaactactgcccttctgtggccaggagtgaccttctgtggccaggagtatggaattggtgactgtagggcctttggatcatctggggctttgggcccacagaggtggacaggccggaggcaagggtggccaggcacagcaggaggcaaggtcctggtttgttctggaggacagccaagtgcatggtccatatcagacctggcactgcggccagtccaacccccccttggccgccctgtaaactctgctttctgcccctacccttggagcctgctttctgcctgccagcagccaagggaaggacacccctcaacctgtccttcctggaaggcccatctgcttagacccctccagcggcctgcacgtgcccccaggagagtggaccaggcctcactggtcctgttatccgtggctcaagccctgctccctgtgagtcctgctggctggtcagaagcaccctcggcatcccctacccccaccctgtgccctgtgccctcccaaccactgcctggagggcccgatcctggcccctagccctctgccctcttgcccagctttggaagattcccaaggtctgggtaaagttaccagtatccagattccttctcgagctcgaaccaacattacacttttcctagagtcaaaacgggagttaacacaagtatataaatgacaattaatacattggatagtttgattgttcgtccaaattttgatattccccactaacagcatataacgaagcttaacacaactctataggaatagtcacattggaggtgaacaaagcagaatgtctgaatctacactgatactgagggagaggagcagtggtggccacgcccgatgttatctgctgtcaaaaagcaatttgaagggccgggcgcggtagctcacccctgtaatcccagcactttgggaggctgaggcgggtggatcacgaggtcaggagatcgagaccatcctgactaacacggtgaaaccccgtctctactaaaggtacaaaaaattagccgggcgtggtggcgggcgcctgtagtcccagctactcgggaggctggggcaggagaatggcgtgaacccgggaggcggagcttgcagtgagccgagatcgcaccactgcactccagcctgggcgacagagcgagactccgtctcaaaaaaaaaaaaaaaaaaaaaagcaatttgaggtgcccggggatgctgaagaggtagagtggcatacctgggttgagaaaaattattgtaatgccaattggagtcccataaaagaggactggcatcaaaaagaggaaaagggttcaaaggagatttatcatggggttcagaatcacggacgcgaggggcggtagcagggacaacagacagaaaagtttccccttcccatactcgcagtctggatgtggcaagagccaattttcaaagttctgggtgttctgagctcagaatggggagtatcacacgagccctcgggggacaatgtccttattttcccattttaagggaaagaaagagctgaacctcctatacaaagtaaaatgatgatcctcgttcttccaataagaaataaaacaagtagcctccaggcattccctcccgccacaggagcaattgttttttaaatagccctttggtacccagtctattactaaaccatatgagtcagttttggtttttttttttgagtcgaacaagcatttctgtgaaccggaccgatgaacgtttctacacaactaccaaagggaagcgggtccccacatgcactcaggaaaaagaaaagccacgttggcgcgccagatatcgggggaaccagcccccagtatttcaatgtaggttctttctattttccataagtgttggctggctgagaaatgaagagaaagagtacaaagagaggacttttacagctgggcctcccagggcgacatcacatatcggtgggaccctgatgcccgcctgagccgcaaaaccagcaggtttttattaaggattttgaaaggggagggggtgcaagaacagggagtaggtcacagagatcacatgcttcaaagggcaaaaaggagaacaaaggcacttcaggaggccaaggccagtggatcacctgaggtgaggagtttgagaccagcctggccagcgtggtgaaactccgtctctactaaaaatacaaaaatcagctggatgtggtggcacgtgcctgtaatcccagctactcaggcagctgagtcaagagaatgatttgaacctgggaggcggaggttgcagtgagccaagatcgcaccattgcactccagcctgggtgaccagagtgaaactccgtctcaaaaaaaaataaaaaataaaaagttttaaaaaaatttttttaaaataaggctgggcgcggtggctcatgcctgtaatcccagcactttgggaggccgaggcgggcggatcacgaggtcaggagatcgagaccatcctgactaacacagtgaaaccccgtctctactaaaaatacaaaaaattagctgggcctgttggtgggtgcctgtagtcccagctacttgggaggctgaggcaggagaatggcgtgaacctgggaggcggagcttggagcgagccgagatcccgccactgccctccagcctgggtgatagagcgagacgccatctcaaaaaaaaaaaaaaaaaaaaaagactgagccctcagagacacagctgcagtgaaaccattaaatggaggccagtagcatgtgaaccacacaggcagggccagagggagcacagggggcttcctggagaggtgggaggaaggcatgactgagagagagcacgggggaccctgggagggagaggccacctgttcctggcctcatgtctgtgtgcacacacgcagaggcacatgccaatgtgagcacaagcacttgggcatacacacagggacacacacaggcacacatgggcatagacacacatgagcattcacacggggacacaggcatacacgggtgtaggcacacatgagcatgcacatggggacacacacagacacacacgggtgtagacacatcagcatgcacatggggacacaggcacacacagatgtagacacacacatcagcatgcacacggggacacaggcacacacaggtgtagacacacatgagcatgcacacggggacatgtgtgtgcacccggggacacatgcatgccatggcacagcagccacacaggacacacacacacacacgcacacacgggcatgcacacgtgagcacacatggcaatgcatggaccaggcagccacacaagtgcacacatggagcatatgtgaacatgcaggcctgagcatgggggtgcatgcactgcagctgacaggcccacagacatgcgtgtatacacatatgtatccacaccccccacaggcatgcacaagtgaatatgtgtgtagacacacagtcgcacacggacacacacgctctggtccatggtggcaaagaggaccctggaaatcagcagcttcggcttcgatgttgctctctgtgaggatccctgctaggagtcagggttggccaggaccctgtccctgggctcaagtcctcctgcaggagagccaccctcaggaggggacagaccctggtgctccctgaagctgggccatgaggctgagcttgggggagagcaggtgaaggcggccaacgtggttacaggtcttgggtggctgctggccttcctggctgagccaggtttgcacctggtgctgggagctgggcctgagccttgagctctggaaagcaaccataggtgggggctggggaaaggctcccgctccaggaggaaagccaagggctccctaaggccatattgattcttctggacaatgagggggtcaaaaagacctaagaacccccagctcccatcttccacgggacagctggccggtccttccagctctcaggatggtcccatgtggcgaggcaacagcaggggccactgttcctaagacgaccggatgggggtggggccctcctgttcgcgtccggccttctgagcctctgtagtccctacagagaggaggatatggggctcaggcttccccgggagcccaaggccgggaggtatgatcgactctgcgggtgtctgtgggctcagtgctaggcccttcctgccataagcaccccccgccgtggaggagcatttgagctcacggatgctacagagaaagtttcctacagggtctcctctgagggccatggaaagccatgtgtagacactcagcctgcccccagagcctttggtgccccaggagtagagccaggagccctccccgccacctccatgtgccctgtgcctgggcgcccaagcctgtggatcccccagcatgggctaggcaggtccttcattgctcagaccccaggctttgggaggtcgcatgttttgccgtctgcatagcgaggacgtgctgggtaggaaaatgaactccaagccacggccttcctggccattctgttgtcacccgtcgtttccttcacctgctgtgaaagtgcaatcttgcttcgctgcaacctccacctcccgggttcaagcgactctcgtgcctcagcctcctgagtagctgggattacagatgccctgctaatttttgtatttttagtagagacagggtttcaccatgcctagccaggctggtctcaaactcttgacctaagatgatacgcccgccttggcctcccaaagtgctgggattacaggcatgagccactgcacccggccagttctttttttttttttttttttgacggagtctcgctctgttgcccaggctggagtgcagtggcgtgatcttggctcactgcaagctctgcctcccaggttcacgccattctcctgcctcagcctcctgagtagctgggactacaggcgcccgccacctcgcccagctaattttttgtatttttagtagagatggggttacaccgtgttagccaggatggtctcgatctcctgaccttgtgatccgcctgccacggcctcccaaagtgctgggattacaggagtgagccaccacgcccggccaaacccggccagttcttctttaaatgtttggtagaatgtaccagtgaaaccatcaggcccaggacttttccttgtcaggagttttttgattactgacaaggctggagtgcagtggcaccatcacagcttgctgtagcctcaacttcctgggctcaagccatcctcctgcctcagcctcccgagtagctaggattacacgggcacaccaccgtgcctaattatcaattttttttttgtaaagataaggtcttgctaaattgcccaggttgggttcaggtgatcctcctatctccgccttgcaaagtgctgggattataaggatgaaccaccatgcctagcctcttttttcttttaattattattttattattttttaaaatttttgtgggtacatgggaggcatatatatttatggggtacctgagatgtttcgatacaggcatgcagtgtgacagacacacatgacggactatggggtgtcca

SEQ ID NO: 97504 - DNA, 35773 bp, Homo sapiens
acagaggaccatagtggacaaaagtcatcgatggtaaaaaaaaataaaaaataaaaaaggtaaaattatatttaaaaaatctcttgcctgggccaggcatggtggcttacacctgtaatcccaacactttgggaggccgaggcaggcagatcacttgaggtcaggagttcaagaccagcctggccaacatggtgaaaccccatctctattaaaaatacaaaaattagcctggcgtggtggcatacacctgtagtcccagctactctggaggttgaggcaggagaatcacttgaacccaggaggtggaggttgcagtgagctgagatcgtgccactgcactccagcctgggcaagagagtgaaaatccatctcaaaaaaaaaaaaaagaatctcttgccagaagaattgccgttaggtaaatttgatgttagattaaaaaacaaaaaagtcatgtcttcttatcaaaggtatgtgacttttttgtttgattgtgggcacagaaaatgtttttatttgttgtgggcacagaaaatgggctctggctaaattaatgagaaagacaggaaagagtagaggaaaggatatatttggaaagaaaatggggatataaaaagaaacaaaagaaaagaaaaaagccagacttcttaagggaaaggtaaaaaggacagttcagagaaccaaaaggccagcattaattatcattctcttttcttctatcatgcatcaacaccaacaattttctgtctctgtgtcactttcctcaagattcagattcctggggaacagggtccagttgctcacatttggtcactatcctatctggcctagggccgacagaataccttcatttacagtcctagtttggactgtagaagtgggacagtttacatgaaaattcaagaaaccatcacaaaaagaaggaatgatggctcctgaacaaacacacaacagatgtccatttcactcctctaatctattcattttagatgtggaaacggagtccctgagttaaaatgctcttatttacagccgtggaattagtcaatgatgaggctgtaactaaaacatcactttctcatccttcagaagcttctcatttcagtgtttttcctacttcacacatctgcatattcagttatgttaagtttcttccatttagaaaaatgcaataaaatcttacattgtccccttaaagtgtggtggagtgggctgatatctgagaaatatgtaactaatttaaatatatttttatgaccttaaagataaatgtcatgcaaatacccaaagggcaaatagttgccaggaaacagaaaagcagtttgcatttggctatgggcacacaaatccaatatagagaaaaacgacttctttcttacctgagaagtctgacactttaaataatagtgtcaaatgcattttcaggcatattttttccaggttatttgtgctatgaagtactctgtctcgcaaaatgtcagagggctgctttttcagtgggtgccatttttcattcgaatgcactgaaacaggatttccattgaaaatgttcaagttctgtgaggcacattatattgtttttaatgtcactattataatgtagggctgcaactagcatacatgaagcaacattcaatataaaagttttgcacttggcttcaatgtgaatttatgtggtaaagatgggatgaaacatattttttagttttggagtgttctctagtagcctctgtgctgtaaatggtttgaatgtcaactcctctcatggacttccttgactacctttctttttctttttattattattgttattattattttattatactttaagttctggggtacatgtgcagaacatgcagttttattacataggtatacatgtgccatggtggtttgctgcacccatcaacccgtcacctacattagctatttctcctaatgttatcccacccctagcccctcacccccgataggccccggtgtgtgatattcccctccctatgtcgatgtgttctcattgttcaattcccacttatgagtgagaacatgcacagtgtttggttttctgttcttgtgatagtttgctgagaatgatggttttcagcttcatccatgtccctgcaaaggacatgaacttatccttttttatgactgcatagtactccatggtgtaaatgttccacattttctttactgatggacatttgggttggttccaagtctttgctattgtgaatagtgccacaaccaccattcttaagaagtttctcattgtgattacaactgcaccttaattgtttgtttagtagtctatatcacaagatataattatatgtttgtaaagagaggcagtaggtgtagcccttaagatcacatagcctgcagcaacctactgagttcaacagtctcagccctactaattatatctgtggtccttccataaaatcatagtttaccccctgagtctcagttttttaactataaaatgtgataataatgatactaatttcataaggatcttgtgagtacgtgaggtaagatgcaaagtattgttaatgatgcttattccatagtgagcttcatggaggtgttttctattactattactaatttattgtctgtgtctgtcttctcttcacctacattagcctgtgaattctatgaaggcaacaagcatatatactcttttctccagtgggtgtcttgtgagaaatatgcctctcacatagccggggatcaataaatacttgtaggttgaatggatggactgatgaatggatgagtcagttttacatttcaccaagtgctttcacatatatcgtcacaattaagctaccaggcattgttgtcagatagtaccagtactcttctcattttacataatagaaaactaaagcttggagatactaagtgatttgcttatgagcagagttcaaacattacaaatcctgagctcaagttcatgtcttctgactccaaattttattctgttttggttcaaatttttctatttatttattctatctctgagttctgtctactgattttttttataaaatagggaaatcatttgccctgttcacttcattgcattgttttgagtaccaaaagtgaaagtaggtaatatatatcaaactgttaccccaatgtaagacattactatggtgtttagtatttaagggaatctttagcttgattgttttatgaaatgctatatattagaaaaataaaattcaaaagaagagagacagaaggaaggagaatctgacctaatgaaagataaaggatttacaataagtattggctttgaattctgaaacatttcctgatccttgacaatgtgagcaggtcaatctgggcagaccagctagggaggaaaaaaagagtacctttctgatgttttgacaatttgttgaattgttgatgtatggtcagcatacatctctgatattttatcacataccttcaggtttttttgctattgaaattaggtgggtataggtttagtcttatatttcacctcttctcaaataaaaacactgagtttccaggatgataacatctctcttaagtttaatatgttctagcttattttttacctcaccaaaaattgtaaattttcttgaggtaccaagaaggttgaaaaaagaaagggctccagtacccaccccctccacaagacaaagtaacattggtagtaatgaaaagtataactactgattaatgtaatagttaaacagaatcaacaagcacttaatgaacatatactatgtgaaaaactatgctatacggttatataagcatcacttaattttattgttccatttatttcttcactatgtactgacaacctactctttgccaggcacacttgtagttaccagaaaacataataatgaaaatgtgcttgactttacagagttcactagtgggtgaggcagacaagataaaaaaggacacagaaatacttgatatactatcaaatggtgacaaattctatgaaggaaaataaaatagtataaaagaataaagagtaacagaggtctgagattatgaatctactcggtgcatcaaacacaacttccctgaggagttaaaatttgtgcagagatatgaattaaatgaggggttaagccatgcaattttggcggaacagagttcttggacaaaggaacagtaagtacaaagctcctgaggcagtgaaaggctaggctggaacggccagaccattgaggtgcaaagtgatgtgaatgaggtcctagaaccaggcaaggtggccaggcagggctttaaggaagagacgggaagtttggactttccattgaagtggaagagagctcttggagggtttgggtaggggaataaaacaattgggtttactttccaaaggacctttctggctgctgcgtagggaatggtttgtaggttgtgggaatggcaaatgcaaaagctggtagaacagttagaaggccgttaggttattccagtctaggcaagagatggcggtcgctgtgtgtggtggggggtgagggcaagcactgagtttaggaagaagatgtagttctcttctgattacttctattttctaagtgaaataagagttaatgtcatgaactgagaatgaggagatttgagaagtgagaagttgtgaatgggaaaatggctggacagaaaaaattatagaatcgtgggggcaactccaggacctacttggagtttgtggtcatgagttggatgtgagacagcatcatgcggttgtgtgtttttctccagccactttcagttgctctggtaagggcagagaattgggttcaactaagccgggatattatcaggtgagtatggcaaattgggaggcggaaacaagcaattatattgctagactttggaacccaagcctggcagaggaaagtgggggcaagaggtggtgttggcagtgaaatgagtatattattagataggatggtcccatactgccaaagacctattggaggagcaactaaaaaagggaaatggataaatgagttgggaattggccatcacatgcttgaaatggagacttggagatattggaaatggcctgggacatgtgatcacaaaattaggtcatctttattagtataatatcatgtctcgtgtttgctgggtctttctctcttctatatcaacttgatacttctggttgccaaagtaatcacaaaattgagactagccatgtatactgccaacaagatgaaggactttagattattaatatctgaagacatacttctttttactgttatgattgcaatactgacactgttctgggggtgtgacagtgagattagaacatacagtagcctctgggctcaatgaggatgcccattacctgtgcattcacacatctgcctctctggatgcaaggaacccacatcattcccacacaaccggtagtgtttgttagtgggtgcttcgatatggaagggagataaggagtctcctaggcagagaatcccccgtaggagctgtcattcctgggtagcaacaagctgtcagttaatgcctacctcagcctacttttcagtatgggatccaagatctcatttcgtggaggtaggggttggttttcttgctatgggtcagcgcgctggagcagggcttctgatccttagcattctttaatagcattcctagagtgacctaggaggctccccaggaggagactaggtggcttagctcctcagcctaactactgcagaaaccaggagtgcgtcctccttttcggattcttgacgtcaagctccgacagccttggagcgtcgcaagggcggtagagagctgagggagggtgacagggaggggaagccattgcagcaacagcttggaggagggagctggacgtcgtctctcgccagaaaaacggggagcaggagccagactaggggaggaagaggactggcccgctcagggaatagctgggttgctgcaaaaaggggcggggagaaggcgggggcgctgcatgmagcgcgctggctccagcggtggccgcggggaatgtgacatcagcggcgccgggcgcttggggctggaggaggcagctcgcctcagctgcgytgtgcacacctcgcccgggggaggacgcagacccgggcaggcggcagggatgtcggcgaaggagaggccaaagggcaaagtgatcaaggacagcgtcaccctcctgccctgcttttatttcgtcgaggtgagttggcccagtgccttggcataatgcagatcctctgggcatctcctgagcgaattcaggtcctggacagtgttggaggcgcagagatcctgccgggcgcgcgcggctgtccccaaatgcccgaccctcccctcttcccctagatttcacagcagctccccgaatgtgcctgtgaatacctgtcagcccggggtgattaccattagaggtgtcgctgctgggtggcctgcagggaacggatacctgtgtgagtgagtgtggttttagttccttggccctcctgtagtgcctgtgtgcacaacgtccgctagtgccccagaggggccatgatgcccatatttcgggatttgtgtcttcaacctgccgagtacgtgtcgggaactccgtgtgcacacagctatgcctagggcatatgagggttgaaggtgtttacatagtacaaatattgttaattgcttttattgctcctgcccccccccccaaatccttctcctattatattattttggtgctcacatacgcttctgaaattggatctgcatctctaaacatcaatcatcaatgtactggcctctttccacagtaaaaaatacatattatatatgtgtgtatacataactatatataatattttaaatctatgacatcatctgattttacatgatttgtatctgagtatttactgtgctgagcagtattatagataaacaattaaatgcagatgtatccgtaatgaccctctaacttaccaaaatgcagtatttgagggagaaacaattcataggagtgttataaagattggcagatacagtgattccgtgtactgtgctccattgcattaggaagacatttttaagcaagaggtttattaaattacagatactgaagggttgtattgcatagatttagggaaatcagatggttttaggcacaaaactatattctgtttagttagagtctgggttgcatagagaattataagactgttgctgaatcataaatatccttctctggccatcttttcagccaaatatggaggtttagcccttcgaagtgcaaacagtagattctgtattcaatgattgtaaggcttatctgtcctgaggaatagtcactgccttgaaacttgggagaagagacattgtcggactgttcttataggtaacaatatatttggaagttttgtagaagtgtcatagatttttgaaataatttcagtttcaagaaagatgtatgtgacttgcataactttcagagaaatgatgggtgacccctgcattcatgaaccatagaaaagaagaaaaaaaaatctatgtatttaaaataatgaatccatttattatcctttctcttttcacaagagatttttgggaacatggtttaggtaatttttgttgaaagataataaagagctttctcaagaaaaatgtaggtagcagaagattccatgatgaaaatggtgaaggaatagaaagatgagatacctgccttcaagttcaatccatcagaccacttgtcgcatggctaatccgtgtagttttgtattatagtgatttcatttgtgtctgaatcaatgacatttgtctaggagaaatcagttaatggctgagttccatctccaggaaggaacacacctgaggtcagctagaagctgactacatgtgggttgcagctatatggcttcaaggaaaatgccctcatgaaagaggaggcaaaccagagaattaaggatgtgcctttacagaatgtacgtgggcgcttttgaggcatctttaaccggagtacatgtcccttaagcaagaattttaaaagtacaagtgcctcataatgcaattgaattgtgtgtttaggaacagacatctcacaattgttacttcttttccatgagtggaaatagcccagattcattacttttactttggcctattcagataccctctatgaattccttagcagggcaagctgtagaayaattacttgaacacaattcatggagtttaaatgagcattgatgacactgtatcttggggttaacagacttcaaagacagagccacacaattggattgcaaattatcttcctaaaaattaaatgcatgatgaaccactaaagagcctccagaaaatgggagactgcattagtataaaaattatttaagggtttgaccacatgcactatcacgctcctttgaaatgactcattttgaagctggtgagaatgcactaaatttacatctccttcgtaggatgaataaacatagctggaatttgcatgttagtaaaatgctctagagtaatgacactttgctttacagcatagtttcccaagaccttagaaattaagatggaaaagtgaaacatgagtgaatctccttccatcacatatcagtctaaagcatatatttttagccttctctgttactcaaaccataatttaagtaacaagaagaggctaacaaaacagatctcaggagaaaacagtccctggttctcaagtcagtgacaccatgagcaacttacactttgccttttttcaaggagtttagaagttttaaattactaattcatgataggtatgagatgtgaagaaactttaattgggaaaatgagggaagggaaacttacactcgagccagagggggctgaaatcaagatggactgagttgtgtcaggaaaatggcagcatgctctaggaaaatcctgggccttgcagacagattgacttggttcaaacaccgcctttgccagatactacatgaataattctggccaagttacttctctcatccttagtttcttcacatataatagaatttacataatataaatataaatacacctgtattcatacataagagaaattattatacctacatcttagaatattgaatatattatgaggttaaaggatcatgactgagatatggtaggcaatcaagatatgttagttcctttcctttcttataactgttcttgacctgaaataaattattttacttatagtttggacttaagggatcaagtcctgacaaggtctagcttaagagttcccattgttgagaagaagtcatcttctccccaatttctagaaatagtttgggctccacaggcttcttgaaatggacttgtattaattgacacaaatggggagagtgaagtactatttacagtttgtacaagaataatgacaaccatttataaagtacttagtatgtactaacaataaagctaaatgctttacatccaccatgttgttcaatcttcaaagtttctctttaagaaagaggccattattatctgtgttttgaagaagaaactgaaactcataaaagttaaacaacttgcccaattttataaagcaaagttagaggcagggctgggtattaactcaaaggtcacgctcttcaccactgcaataacaatctctctcaacttgttgaaagaacattcacataggcaaagttactttctattgtttctcactggtaaaaaaggaagatgtagtaaggcaagggcacactgacaaacagggtgatacagttttctctggcaacagatcagcttcctcagctcagttcctcctccactgggagtgtccaagcacaaagagttggaggacagtgcatactccccacattggctcatcagttagtggctagtgcccctcaacaagaactctggatagatgcaaggaaggagtaaagatgttggcagcccatttgcagagtgtcaakgtatctctaattataccccaatgggcattaggctgaggtgttggtgttcagccactaaaaccaagtaatcttgtccttgttcaccacgatacctgatgttaaagcacacattagttgaagggatagaatttagggatagaattatttttttcttacatttttggtttatgctgctgcttgctaatgaaatggcttatggttgacagtaatattagatggtgacttgaaaaatacgatgatttttagttttgcacctcattttatgagcaagtttcttaactcagttttacactgtacagcctgggaaaacaaaggtcaagttgtgaaaagaactctcagacaagcatacccacaccttattaggataaagagaaaagcaggtaaaaagcaatgttccactagagaaaaggtttatcatgcccttaaagttcccaagtacactgcaagtgatggctgtatcacttacagtggcaattgcagccagcagtatacctagagttaacaaaagagtattcaaactttttgtttattattatactttaagttctggggtacatgtgcagaacatgcagttttgttacataggtatacacgtgccatggtggtttgctgcacccatcaacctgccacctatattaggtatttctcctaatactatccatcccctagccccccaacccccacaggccctggtgtgtgatgttcccctccctgtgtccatgtgttctcattgttcagctcccacttatgagtgagaacatctggtgtttggttttctgttcttgtgttagtttgctgagaatgatggtttccagcttcatccatatccctgcaaaggacatgaagtcatccttttttatggctgcatagtattccatggtgaatgtgtgccacattttctttatccagaatatcactgatgggcatttaggttggttccaagtctttgctactgtgaacagtgttgcaataaacatatgtgtatatgtgtctttatagtagaatgatttataattatttgggcatagcccaatattatatgtgataaggctggttgtctggggctagtgcacttcctttatgcaaagaattacagtggtccctctggggctcaggctcacaattttattctcattagtcatcctgctcaaagatcaattcactatataatgtaaacaaatgacaaattacctttttaagcctaaaaaaatataaattcctaacatgaaataaatgggaaagggattctttttacttaaacattctgctatatgatataacatttttatgacaaacctgatgctaattttatgaaggcagaagagttatgcttgacctatatgcaaatatattttgacagggctacagatagagaaaagagtttgaaattgcctgttattcatacgagaaaacacacaaagacacatatgtatgcacacacttctgtgcataggtatgtacaaatacacatggagtaagaatatcatctctctctccactcagcataaaattacagtatctgaagcattccaattcagaatattttaatctcaaaaaattaagattactcagaaagttttcattccttttgtgtgtgtgtgtgtgtgtgtgtgtgtgtgtgtgtgtgtgtgtgtgtggcagggtcttgctctgtcacccaggctggattgcagtggcatgatcacagctcactgcaacctctgcctcccaggttcaaatgattctcccacttcagcctcctgagtacgtgggactacaggcatgcaccaccacacccagctagtatttataatttttagtagagacaggatttcaccatgttgcccaagctggtctcgaactcctgggctcragcaatcctcccgcctcagcctcccaaagtgctgggatcacaggcatgagccactgcacctggcctactcagaaagttttcattactttgaatgtgtacttagcagtagatacgttgcaggattttgttaatggagcttaattactataaggtcagtaactaaacagtttgttcagaagaagaagccattgctgctactctgttgccatcctacctggggaagttcaacaagcctttgagcaaagacacacattttgaaattgtggcttcttgacaaaaccttaatacaatttttattttctttccattggaaagtgtccacaggtttttaattgtagcaaacattaattcacaagatttctcttctatctcatgatctatgtacaaattatataactcatttgattttcttgctgagaaatattgctagtctattcccttttacataaactttagcatcagtaggaaatacaaaatcacatttctgcattgcatataccaaaatagtagctgtagatttttttctcttctctagattgtatagaagtagagtctgcttaaagaagtacttcaaaccctgccaaatgagatgagttggcaagtctcttctctttcaaagtcacaatgcataaagtctgatgcaaaataaagtaaatagagaacagagtcctaagttttagagatagagttaaatgaggacatttctacaaatctaagcatcgaacatagcacttgctattagggaattattttctattcctaaacaccaccactatcttactgtttcttcatggccaagttactcaaaatgtgatttttttctacttttctctatcaggaaataaaaaatacttggtttctgccaatttcaaggagattttaataatgatgataataatcatagtaataacaaagaatagttcatttcaagtcttctttatatggcagactctctagatacattacttttagtcctgagaactaccctactgagaaggcattgttatctttattttttgaatcagaaattgtagctcagagagctactgtttttaccagggacacatagcaatgaagtgagggagtcaggatttcagagcttgtccatcttgctcttgcattatgactacaccatactgtctcacacatgcttccaacaacaatgctaaacctagtgatgaagtgcaatggagagccctgtctgtgctgtgacttggctagcttcatggyatctggatgcatgcatttgaaacatgtctgtttgtggctctgtcagagttctggaacagagtttttctctacattcagctactaaacttggctgtattagtggtatttcctacttaatagtaactggtttaatttttgacatgtctagaaggcacagtgtcccctaaaaagaagcgtcctctgggcaagcacaaatggcacccatgagtctctgatgaagattaatgaggatcagtgggtgggggtgagagggaagacttggaacttaaatagagtttaggagagtagaatatgtaggtgtgtccaaatgatagaaagaaagaaactcaacaaggtaatagaaacagagagaggtcaagtcaagcaggattagaagaaaaagcattagaaaattgaaggtaggagtgaagtgtgtgtgtgtgtgtgtgtgtgtgtgtgtgtgtgtgtgtgtgwwatggagatccaatctgtgagcaaaccatggagacccctttaaacattttggttttctaagctggcttattaaataaagattatttgagacacaattattgctgtttatgttggaaatgtattacaaatattactcaaagcaaacacattttctctcagcatatgtatacagcataggctatttctcaagcaacttttgtatttaaaaggtgaggaaatgtctcacagagtttaaaagtcttattacagagataaggctaataaaattatgcgatccaagaacatatggcctcactgtttcttctaccacctaagaaaattttgctttgaaaaggttaactgagttaacctttggacacatcaagtatgccagcgttacctaaggacacactggttaatatcagatcaggaatagaacctaggtctcctgactcctgttctagtgctctttcctaattattactatttctagaattccttttattagaaagtttccctctggattataacatttaaaatacaggtcattctaattctacatgtgaacaaattgcgctggctgtttgtgctaacttccaaacacatttcatgaccaccttacattaaacaagtcaaagcaattatgaatggatcttccactgttccaaattgttaggctctttgaaaagcacggtaatagctaaagattagaaaattaggagggatttttctcattgcctaagtgcccacctgtaatttcacaattaactcccttgacatgaggtctctaacagagagtacagggaagtataaacatgggaagcagtaagaatataatttatgtcatcagttatggaatagctttgaattttcccttatacttcaatgtaaatttttcatacattatctcatctgatcctctaaatgcaactgagaagtaaatataaactctattttaaaacttaagtaacgaagactcagggaagtccaaaaacttgcctaaaactcaagtagtgctatttttcatcttggtcagaagaaaaaaaaaggtgatatttaaactgtgaaatgtctaattatgagcatcatggtagccttttatggtatgaattagctgagaaatgtatttacagataactatcgaatggagtaatcttttcatggtcaagtggattttgtaatatggatgccaaggatagaaatactaattttggcagaactaacattgaggtgtttttcttaccaataattagactgaaccaattgcacttaggtccataactatctggttggctgtcaagcaacatagaggaggwtaatggctttcttatttgctgtaacaagatggtttctgcctgtgtaaaactggtatttagatcacttaagaataaattaaagaaaaggggaaagacragtaattaaaatcaatgtatttgtgggaaaaggtaaacatggaatcatacatttaacagaagaatgatgtttgggagtgagagcaatggaagtagatgtgactatatcgttaacaatttaatgctcttaccaaaagtctgcgctatgggtttgcttagagrtaaactgccatttaatgaaatcctaggcatgcttcagaaattaagtcctcatggatrgagtccaaaagagactgatcttttattaaatgttcttcaataaggaatgctaaaatgaaattccagggtataacctgttttgtactcttacaacaatttatttatgtgttgaataaatatcaattgcttatgatgtgacttttggtaaaagtaatagaaacaaaatggaatcatcactggcatactttccggtctatagtagaatttcaataaattttaactggatgtaataaaataggactaatcatatgaacataaatttttctttaactgtcttttatcagctggtggagacatttttatttgtaaagtgatcataaattgcctatcagagatattgctcggccttgtggattattgaacagttgaagattagatcaatatccaaggtctatatgagtcctcatctcttaattgtacttacgttcattttataatctaggacttacctatggattgtttgagatttgaaatttcaaataaaggcatcactgaagcaaagaactttgcaattttaattttcatagaaagttattttagttacataaggtgcatataccagcaaacaattttctgtgcctatggtaaaacaaactattagatatattttttttttacttttttaaaagaatatagttttcttttttacttgatctaccaattagctttagaatcttgggcagttaacttattttctctaagcctcatttttctcatttgaaaatgatggaactattgtggtcaggttagagtaattatgaccctttaatcatatgcaaattataaaatatggccaagaattctaaagcaaagacaggcctagtaaatgaattttctctgtcccatttaccaacaccccctctcccatcttgtctaaagtaaactttgtggtagctttagatgctacctgattccctggaaaggggctggttctcctgattgttttttattggtatcacacatttatgtatgttttatacagtgtgcatacaatggtggagcagtttattacaatgtataatacaacaacaacaaatatttactggaattcctgctcatttttatagatagagggacatatgcacacactcacaaaatagagaccactttttttcagtacccttaccttgacctagtcagtggaggggaattctcatttactgtgtgtcttctatacacagtgcccaggtaacactctactgaaagtctctactccaaggttgttggtaggcccataatctgtaagccactgccattcttatctttccagagttctaaaatatcatatataaactcgtcagcagcagtgtctgttcaatgcaaattaaatatcttcccatgcctcaactgagccatctgtgaaataaagaatattatgctttctaaaaatgatgaataaattagatttagtctttgggaatgagtcatctcatttaggctattgtatgattcattggaatctttttttttaaggcagttggatacaccctgaagaattaacaggttacttatcccttgggtgatgatctgaaaatgcctgtattgtagcaactgagatttgagttattaaaacatgaagaacatccaactgtgaagatttggacataaataatgtcttcttcatggcaaaacctgataaaaaggatggtcagcaatctgttataaacaatatactatagggagatgaatttttgaaaactcttctsctttaagacctcatttggtttctagcttccagttgaattttatgtacatgaagaaaaattatttgatggtgttacatctttcaatatttcagtctcagactaatggttattccatagataatattggttctggtaatttttagacggttggcccaggacataattaaggaaaaattctttttattatttatttttaaactccagcctgtagaacaatgcaaatagctgagagcagacagtctctcaataaatctgtgatggattcgtcgttgcgtaggtcaataaatctagcagcttaattaatgaatatagggagacagagcctggactgaacctcagctttggctttggccttggccacattattctttggctgaccttaaaggctagtggttctttcagtcctgttcagaaatagaggaagagattgctaagacttcactgctcaaatgtatgttccaacatgactgacaagggccaagtgtagcacatcctagaaaatgcctactttatgggactacaaaaaactttaagaactgctcattccaaatcccccagcccaccaaactcaggaggctgtttcttcctccaccactacccttcaccttcctaagattccagaggtcaatgcagcacagtagggagagggagaggggtatgaggtacctcatatgagatgaccctaagaatcacaaggactgacgttttccagtaaaacacataacacaatcctacttactttaattaacttaatcacagcattaaaatgttagaaaataaaatagaagttattaatgtcccacattaagtgctcaacttcaatatctcttttacatacaccaagccttttcaaaaatgaaacttaaataactaaggccttcagcagcattggaaacttaactttgaagaagggctcataatgggcatctaagtgtgcatctaagtgtgtataaagatgtgtatgtaggagacaagcttagagggaagagaagcttgtgatatgctagagcgttctaatctctgaaattagatgagaaattccttttctggataattaataggtcaaataaaatgtatcaggcacatggaaaatactaaaaagtatttgttaagcattgaatgtaatagaaaatatgaactttcataatatttaagtaaaatggtttaataataaaattgatactttattttaataaacatcatgaaaacataattaatttagaaacactgatggtctttaattcagtcattcctgtgtatataatgttaagattatatgtcaatttaaatctcaaaatcagaaatttgcttctcttatgctataactcaaatacaaggggacttctaaaagttcatggaaaaaatggaattaaaagataaacacaaaaaatataaactttatttctcaagataagctctatcaagttcaagatagtttagtaagcaatgataaaaaccattagtccattcctaaagtactgatgctaatgggaatttaaccatatcattgcaatcttttttacattatcagctaaagaaaaatgggtgcctttgraagatttcttaagaatagaaaacaagaagaagttagaacaagccaaattaggactgtgaaatggatgcctaatgatttctcattgacactctcacaaaattgcccatgtttggtgagagggatgagcattgttatgatggagaaggattctctagcaaagctttcttgggcttttttctgctaaagctttggctaactttctcaaaacactctcataataagcagatattactgttctttggccctccagaaagtgaacaagcaaaatgccttgagcatcccaaaacgatgttgtcatgaactttgctcttaaccagtccacttttgctttgccaggaccactttcccatcttggtagccattgttttgattgtgctttgttttcaggatcatactgataaaaccatgtttcatcacttgttacagttctttgaggaaatgcttcaggactttgatcctacttgtttatttttgtccattgaaagctctactcttgtctgcagccaatctggccacagttgctttggcaccaattgaatggaaagtttgctaaactttaatgtttcagtcagaattgtgtaagctgaaccaagtgagaggtctatgttkttggctattgtttgtgttgttaatagtcagtcctcttcaattagggtatggacaagacaaatgttttccttgcaaattgatgtggatggtctgatgttgtgggctttatcttcaacatcatcttttcccttcttaaaatgaattatccatttgtaaactgctgatttcttgtatttataaactttctgcaaattatcaatgattttgccattcttctactaaagcttcatcataaattcaatgcatgttcttgcttcaattttagcagaactcatgytgctctgacaggggttcttttcaaactgatatcttatccttctcggtgcttcaaactagatctttttcagatatgttatgagtgagtatgagcttattttggtgcaaaaaattgaaatccattcacagttttttsataatatacatgttccatgacttttgaagatcgctcatgtagaagttttagttatgtcacatttgcctgacattattacaaggtgaacatctgtgtgctttctatgtgtgaataaaacaatcccactaatagtgaaaacactaatctaagtatattaagatcttacctttttagaggatatgaagaatatatacaatatcacacactatagaaattgtagggtagcattaactatctataaaaagaaatattctcttttttattttgttatttctcaatgtctttggaaacccattgatccattgtataagcttctaggaagaggtagaatacagtaattctgtacaataatcacaaacatgaattgggaagccagatttcttgagtttgtaatccagctaacaagctgtataaccttatacaaatcatggaatcttactgtataacctcatacaaatcatgtaatctcatgtaatctcagtttcctcatctgtaagatggcagtaataatagtatcytcatcaaaaaggtgttgtgaagattgcatgaattcaaacatataaagtactttaaatggtacctgtcaaacattagtagcattaaattactattattacccaaatttttaaatgtcagctgtatgttgtaagggaagagaaattacagctggaagaaaggatttaaaagcaattacttttaataattgaaatacagattctcagcctcaggtcttagtctctaacggtttaaagaataaaatgctttccaagacaatgcacattcttcagtgtctaattatgtaagaagaacaaattttcactacctgaggttaagtctggtgagtgcaaaaccaactaccccaagcctagtgctagatcaatattcaggtaataaaacaaccayttatcattatttttgactttactgttacatcagtgtgattgcaytggtccttttagagctgtaaagatgtagtttcatattcaggtataaaaacatagaacagatttttttcccattcaacctaatacatctattaggtgaggtagctcttctctattaattatcattgctatggaggatccaatttaagtttcttgatttgttaatgctaatgaaatcattagagttctagaaattcaaaatagaaagcattttcttgtggtagaataaatgaagatctttttaaatggtggatattttcttaacaatactgcaagaatgtctcaacatttggtatctctcttcaaattgtccatgtatgtattagtttactgtatattggggacacctagtatgtcagggataaagagatggataagactatttctctgctctcaaggatcttgtcgctgaataagagagaatgtaaaggaacaactgccatcccatatgacaattgctatgatctagacattcatcaggatatctctgtatggtcagagaaagtgatccgaaggaagcactaaaagcaggaaaacatgtggaaccttaagtttgcctaatttctgatactttatattagaaatcattcactagggaagacaaaagtgaaaataaaagcagaccatatccaaaatataattaaatgctcttaagatattcccaaaaccaaaataatacaaataacttcaaagaaactgcacaaggaataacgttcaggacctgagggcaccacatcagtgagagtgtgatttgaaagtgcctgccacccctttcctgttgtwgccgttgaaaccccttgacacatggccatctctcgccttgtgtcctttaaactggcaatctcattgaagcctggggctgtcctttcctgaaaagcaccagactagtgccagatggtgacatgtggcagaatgacagcaggatacacggcggtgcatgcttccaggaatttagcagaccaggtttcaattactggcctttgaagccaggcatgctattttacttatctggggcatggtccttatcttaaatttatcttagggatcccaaggaggttaagaattaaagtagataattaggatgaaatgtctaaataaaaactcagtaaatgtcctttgctttttaggtctaagtacatacctaataaattctactgaaactgagaggagctctagaaaagacagatctcagattggaacaaacaaagcaattttcatgtttgggtgataaagaataagtgagtagagaatgtgtttaagagtaataagaattaagagaaacagagtggcgtttttcaaactgcacctttcccctaggaccccctctccccacatgggcaccccacatgcagttatcttagcggtgtggaggaggaaagccagttgagttccatgagcaaagaattttgagcatgtttcccaacttagacacctgggtaggagtctgggtgttcccaatttgggggctttgtggctgttgcacaatttatataacctatttctgcctcagttttctcatttgtaatctggggatactaatagatactttatacagtgtagattgaatatagcgatcttttaaacttaactagtatctggcacctaagtcctcaacacatgctgtgtacttttcagaaattgcctatgttttttgttcctttaatcataatttcttgatttctttcaattaaattcagtgaacatttattggacacctaaaacattaaaagcactgggtgaattgcaaaggtttcactcttgagtacttgatcttagggcaagggttggtaatatgtaaataactataatcaaaggcagactaacagatccttcgataaagttatatatgaagtatgtgagacggagtcttcaattctgagtggagagcctggagaaggtttcagggagaaaaaaattacatgatctcaacctgaaagaataagtacaatttttatgagaaataaatgtggaaccataatgtgaagcagagactagaacatgtctttttgaaatataaatataatgggaacatgkgctgtctttctggtttaggagagtggagagtaggtggaaagcaaaatcaaccaagacaggcagatcaaggccatattttaaaaagtcataaatatcattctaaaaaatttgcactttattttgttattaatggggcaccattaaatgcatgatgaggtgtgaattctaggaaaattagtttggaaacattgtggaggatgaaacaaattatgaagagaatagagatttttttaaaggccctaatgctttatataaggcagtgacagtgtgaaagaaatgagagaaatgattcttaattcatgacagtatatgaagcatttcagtattagatggcaatgtaaaaaaacccctcatttcactgataacaaatgaagcccagaaaggttaagtgactttcccaaatcccaaaagctggcagaataaatgaggggagaaactggattctcctgcttctgaggccagcactggtttccctcaatcacactgccctgtttcaatttgtatctattcatgtcatacaagccacatctgttttatgtataaaaaccagtttagatttctagaccttaagtaatgttgcagactcattctgaccaattatttcccttaatgacacttcaagtgttagtctgtgtttataatctatatttttgaagttctttgcagccaatctgaatatgctatacttagagtgaggatagttttatataccataaagcctaatattatgttattattattatcaatatttgaagaaaatattaatctgtattagctacaaggcaaaaaatactacaggataccactaaagatcatactgtaggaagtagaaaattccctcaccacgtgtgtgttgacctgtgacaatcttcttcatggctacaggctttaatacaattgctttgatctgctagtatttttcccagttttaattgaatttcaatgtattctgttattgtttcaaatttcacattatatatgattttgggatatttataaagttggttccaagcctctcattttaaatgtgttattaatattaaaatcttccttaatctcttagaatagctcttgcatatgtttggcatgaatatacacaactattttctttgacttcttgtgacattacttatatcaaaactaaaataatttaaccttgaaatctcttatgatagtgttgttccccaaaagtgaggattttgctgcttaaatcatcttgtaccaataattttcagctttatgcctccagccttggactctcctgttagctccaaattgacctcttactttagtaactaagagatgtaacagttttaatattttcaaaacagaatcttctattctttccatccaaacttctccctatcccaaggaatgacactactggcctaattcctcaaaccccatctttgaaatcaacctttattgttttatcttcttcattgatcaagccataaacaaggtttgtcatatctatgtccaaaaccatatcaacaatctgccgatttctttgtatctccagtactaaactctagtacatgctgtctcatctctcctggatttccgccattgccatgcatccactagaatgtaaactctgtgaatgcatggagttttctctgtttggtttactgctacattccttacacttagagaagtacccgatgcctactaggtatttaataaatatttgttgagttttgaacagccttctaaatttttaccctattcctacttttgacccaccatgatcatcctcaatctaacagccagtgatctttgtaaaatacatttcaaatcatactacacctctgcttgaactctccagaatgtttctgatcctactttaaataaaattctaacttcctccttggacgtcrggtctctgcaacgtctggtcccaaatctacctctctgacttcattttgtatcacttcctccktttgattatggtytttacctggttttcatatggctagttctttcttgcccattcaagtctctgcttaaatggcacctactcaaataggtcttcctagatctaaaatgggaattcaggcacttaattacacagccctcttctttatagtatgtgttctttctgatatatatatctttctgatatatatttaatatatattatatattatatrtgtgcaatatatagttaatatataatatatattatatatatgaaatatatattgtttacctggcttcctcaactagaatgaaatattcatgggaacagatattttgttttatcataactgtattcccaggacctagaacgaggcttgggactagcaggctatcaaagatatttgttgaatgaataaatggatgaggcaccaataccatgcatataaattggccctttgtgactatggtttccaccagttcaaaaggatgttataggactctgaattcacaatggctatgagagaggcaaagaatggaactgatctgtattgccctaggctcagagcaaagtgaactctccccagtgaaaagtagtttgtctttattataatcaggctaaaaacaagtaagctgtctgatctagataaaatatcatgatagttttgataaaatgtttcactaaaatggatatataatctagatttgtctttttaaagttggcatcagaaaaatcaatgttatctagcaaatgtggtattttaaaacacctttcttttgtttgccctgttctctaaaacagttataatttttcttctggttcctcagcagatggtaattataagaatcagtcttttccttttgaaaataaaccgctttcctaatcctcaggtaatttccctccgctctattgctgcataaaaatagctcggtttggctgggcgcggtggctcacgcctgtaatcccagcacttcgagaggccaaggcgggcggatcaccgaggtcaggagatcaagaccatcctggctaacacggtgaaaccgcgtctctactaaaaatacaaaaaaattagccgggtgtggtggcacgctcctgtagtcccagctactcaggagactgaggcaggagaatcgcttgaactcgggaggtggaggttgtagggggccgaaatggcacccctgcactccagcttgggcgacagagcgagactctgtctcagaaaacaaaaaaacaaaacaaaaaaagcttggttcacacttttttgggggctgtatcatgactagagaataaaatttgtagttcttggctatgtagacttttaaaaaatctctttaaatctcattttcaaaatctcattttaaatgcaatcgaaacaagtctgtgtaattttattatgtgcatatcaattctatatgtatgccgaaaccggcacataccgtctgttaaattccttacactcaaaaaaaatctgttgttgagcatttcaaaagataaaaaggtaactctgaagacaattatgttagaaataaacattgtcatttaattcattacattgggtagtaaactacagtatgggaacaccatgtataaaattatttatttccaaaatataatgaatataatgaagattttatacaaataactattacaaacaaaatgatgtaaggagcagagtaaatatgctttttaaaaaataagataaataaacatcaaaaagaaaaaaaggttctttttagtagagatggggtttcaccatgatggtctggctggtctcaaactcctgaccttgtgatccgcctctctcccaaagtgctgggattacaggtgtgagccactgcgcccagagaaaaaaagattcttattaggaaaacaaatgaaggttttaaaacatgcttctatagaaatatagaagatattaatatatatatggaaaattatataattagaaaaatgatataattggaaaaattgtcagtttcaggaaggctactggctgaaaagactaatgcataatattaatgacaaattactttaattcatatgttaatgtggcatatatgtatatatagagatacatgcgtatatatttggaagtcactataacgtgtatcagtggcaacatagaaatcagtacgattaggcccctgccttaaggagattttagtttgggaagcaaagcaaaagactaaacctagtttatagcagataaaaaagagcagtgggtaaatatttcctaaaaagaagtactaggggattaaaactgaagaaattactctcaaaaggtattatcaagtaaagcttcatgagaaaggtgatgtttagtgaatatattattgttactggttataacaataacaacaatacttaataatatttataaactatttattccagatattgttgactgtggaactagaattcatggattcaaaatccacckctgtcacttacgatatgtaactgcttatccacctgcaaaatgaggatactgatagcaactatcttatgtcacaatagaaagttttaggttaaatgagtttaaaatatgtcaaattaattaaaatttctaaaacataatattggcacgtagtaagcactttatgaagtatttgttaaattaatacttaaatatatttatatggatttaagtggaaatttcaataatgtgcatgcaccacgaagcgctgatttattggtcaagactgaaagctactattcgtgcactataggagagggaagtagtgaggcaaaatgatcagatatttgaagtgatcgaataatagccgataagaaaaactaaatgtttttgatatactttttgttctctgcaaagcatccatctgaaaaacagaaagattatgcaagtttactcactatgtatttcttttttttccrgtaaacctaattatttcctaactacaaaaaaaaagacctcttgggaatagaagacataatgctgtcttctaaaaataaaaattaaaaaactgttttttcaaaccaaacaatcagaaatcatgggtagctaatattgtctttatcaaaaacatttcctgtttgcttaaataaatattatatcctccaaaggaacaaagccttaaactaagcagttctttgagtgttatgtaagtccacatttttgggttctggaaggtctggcactaggttaagcatgtgtgatattttctctttagctgagagcaggtctctcactaagctattgctccttgrtgaccaagtctatctcttattcactatattatatctacctacattagtgcctagcacattcacacatgaatgaataaacaattaaacacaaaaatggtacacaaagcctagaaagtacactgtgcctagtttagggagaccaaatagatgagacccagtgaagtcaggattttcagataaacaatgaataacttttagtgtgagtatctctcaaatattgcatggggtatacttacactaaaaattattcattgctatctgaaaatctgatttcactgggtgacttgtatttttattagctaactctgttaactctagtctagttattgtaattaaattaaggtttacacatttattcaattatctagttatcaacaagtattgattgcttccttaaattattaaatgatgtattccctgcctaccaagtgccaggacttataaataacactggcagattctcacttcatagagcacttatttcagtgggagactgggagagatgaaaaataaataagtgaagtattaaattggcaaggtaatttcagttaatgataagtgtcatgaaaaaaatcaagcaagatgataaagtagagagtgaaggatggatcaagatctaccttgggtaaagcgtgcagaaaggcatcattaaatgatgtaaagaagcagtagtataaagagccagaaaaagagcacaaaaggaagaagaaacagcaagcacaaaggaccctgggcagaaatgaattcgaatattacaggaaaagaatgaaaaccaattagattgcagtgagcagagggctgagaagtggtgaaaacgtagtacaagaagaatcaagagccaaagcatgaagcaacttgcattgcatgggatggcatttggattttattcaagttgagtgggaaccactagactgatgcgatctgaaatactttgttgttgttgtttgtttgttttctttatttcttctaaaataaaagggatacatgtgcagaatgtgcagrtttgttacataagcatatgtgtgccatagtggtttgctgcacctattgacctgtcttctaagttccctcccctcaaccctcaacccccaacatgccctggtgtgtgttgttcccctgtctgtgtccacgtgttctcaatgttaaactcccagttatgaatgagaatatgtgtgtttggttttctgttctagtgttagtttgctgagaatgatggcttccagcttcatccatgtgcctgtaaaggacatgatctcattcctctttatgggtgcatagtattccatggtgtatatatatataccacattttctctatccagtctatcattgataggcatttgtgttggttccatgtctttgctattgtaaacagtgctgcaataaacatgcatgcacatgtgtctttatactagaatgatttctattcctttgggtatatacccagtaatgggattgctgggtcaaatggtatttctggttctagatccttgaggaattgccatactgtcttccacaatggttaaactaatttacattcccaccaacagtgtaaaagcgtttctakctctccacagcctcactagcatctattgtttcctgactttttaataattgccattctgactggcatgaggtggtacctcattgtggttttgatttgcatttttctgattatctgtgatgttgacctgtctgatctgaaatatttctacaagaccctttggaatgctgtgtggaaaatgaatgggtatggtgggagggtaggagtggaggtgtagcaccaattagaaggttggggtcaacatagatgcgtaacaggctgtgactaaggggggtgaattggaatccatgttgaaggtagaagtaatagaacttatgaatgatttttaactctggaatcggagaagagtagcgagagaaggagagaaagccacttgttttctatgtatgccctgtatatcaggtagaataaattgatcttctttgtccttcattcttagttgcctatattggcatcatcggtggttagcctctatttcctcgaactcacagatgtcttcaaacctgtgcactctggatttagctgctatgaccggagtcttagcatgccrtacattgaaccaacccaggaggcaattccattcctcatgttgcttagcttggcttttgctggacctgcaattacggtaagaattacccccaaaattgtgtttatctgtcctggaaaactaaaaatcaccacatttgtataataaatgggttcaaagcaaacaaaacgtgaactctaaatcctaaatcaaagtcatgtctttgagatatattgacagtatcatgtggaagttaatagcttaacattattggcattaaaatttaaacattttatgattggagaaatgattgattcctagtgtttatttttattaatcattatgaaaagttttgtaactttataattcactttgaatggctaataggacatttctgatatacttcctaattaacttactttacatgtgtttatttagtatctgaagcctgaaaaaatgggggagaaattacatagccaaaagtgcatttgctatcactcacagttttatttcttactagattatcactgtttattgattatggatactgagcataaataattataaagatataaaaactcattccagccatgcatgcatgcacacatacacatacatacagacatactcaaataataaactgttttatattcagaaaaggcattttcattttaaaatatgttcatgaattcaaaatagctagaagagaataatttaaatgttcctagcataaagaaaagataaatatataagatgacgaatatcctaattactttgatatgatctttacatgttatatgaatgtatcaaattatcagctataccctgaaaagatgtacatctatcatgtatcaataaaaaatctaaaataaataactaaataaataaaatatgtacataaagaaatgctctaatgtactggaactgaattcaaaacatagttgtttttaatgtgttaatatacattgtgagtaacacacttttagataaatctattaataaataagactggccaacccttttcaccacctcttttgccccaaaaatactacctaagaggacaagaaacacttttcaagggaaatggtatttacttctacagtgaaaaactcttgttttgcttttagcatgttcatgaatgtcaaaggaaatggctattaaattaaaagctttatttgaaagctccacattctaatgaattcgcctattcaggttcagtacagcagagtttaagaagagtctctgcacagatgttctaaactctatatttttatgtagctatggattttttaattccccaatattaaataattataatatgctgtttacaatttaaatacatagtgtataaaatattctcagaagataaaattgaaacttaattttcatagaactttatcatatttgaaaggtctctaaacactttaaaaattaatgagttattctatagtgactgtcacattactagaactattaataatgtacttggaagaagctgagactttgagactaataaaacattcttggagtgcgatattgctcagaataacattattttcctattatttactgaagttttaacaaaaaattcatattatacagtcattttaccagggcagaaaaacagaactaaagacaaaagccacatgattatctcaatagatgcggaaaaggttttcaataaaatttgacataccttcatgttaaaaactctcaataaactaggtattgagggaacatacctcaaaataataacagccatgtatgacaaacccaaacatcatactgaatgggcaaaagcttgaagcattccccattgaaaaacagcacaagacaaggatgaactctctcaccactcctattcaacctagtattaaattctggccagagcaatcagacaagaaaaagaaataaagtggattcaaataggaagagaagtaagactattgctgactagtcaccagatggcatgatccaatgtctagaaaaccccattgtctcagtccaaaagcttcttaagctgataagcagcttcagcaaaggctcaggatacaaaactattgtgcaaaaatcactagcaatcctataccccaacaacagttaagctgagagccaaatcaaaaaagaactcccattcacaactgccacagaaagaatgaaatatctaggaatacagctaacaagagaagtgaaagagctctgcaaggagaactacaaactactgctcaaataaatcagagatgacataaacaaatggaaaaatattccatactcatggatagaaagaatcaatatcatgaaaatggccataccatccaaagcaatttatatattcaatgctattcccattgaactaccaatgatgttcttcatagaactagaaaaatctatttcaaaattcatatggaaccaaaaaagaccccaaagagccaaggtaatcctaagaaaaaagaacaaagctggaggcatcacattacccaagttcaaattatactacagggctacagtaaccaaaacagcatggtactggtacaagaacagagacatagatcaatggaacagaataggaaacctagaaataagactgcacacctacaactatctgatctttgacaatcctgacaaaaacaagcaatagggaaaggattccctattcaataaatgatgctgggataactggctagccatatgcagaaaattgaaactggaccccttccttacaccatatacaaaaatcaactcaagatgaattaaagacttacatgtaaaacccaacactataaaaaccctggaagaaaacttaggcagtaccattcaagtcataggcacaggcaaagatttcatgatgaagacatcaaaagcaattgcaacaaaagcaaaaattgaaaaatgggatccaattaaactagagagcttctgaacatcaaaataaacttccaacagagtaaaaagacaacctacagaatgggagaaaatttttgcaaattatgcatctaaaaaaggtctaatatctagcatttgtaagaaacttaaacaaatttaccaaaaaaaaaaacaattaaaaagtgggcaaaggacatgaacagacacttctcaaaagagggcatacatgcagccaactagcatatgataaaaaagctcaacatcactgatcattagagaaatgcaaatcaaaacgaaaatgacatactatctcacaccagtcaaaatggctattattaaaaagtcaaaaaatattagatggtggtgaggttgtggagaaaaaggaacgcttatacactgttgtgggttcaaccattgtgaaagacagagtggtgattcctcaaagacctaaagtcagaactaccattcaacccaccaatcccattactgggtatatacccaaaggaacataaatcattctattataaagacacatgtacacgtatattcattgcagcactattcacaatagcaaagacatggaatcagcctaaatgccaatcaattatagactggataaagaaaatgtggtacatatacaccatggaatactatgcagccataaaaaaatgaaatcatgtcgtttgcagggacatggatggagctggaggccattatctttagcaaactaacacaggaacagaaaaccaaacaccacgtgttctcattcataactgggagttgaacattgagaccacataggcacatagaggggaaagacacatactggggcctacctgagggtggagactgggaggaggaagaggatcagaagaagtaactaatggatatggggtgtaatacctgggtacaacaaatccccatgacatgtgttcacctatataacaaacctgcacatcctgcacatgtacccctgaacttgaaataaaagtttagatagatagatagagtttataatatatataaattttatatatatagatgctttaaatgtatcatactgtcacaccagaaagcgcttatcctaaaagtgctcaaaattattataattgatatatttgaatttgagataaattacttaacatactacacaaatgatcatgcctctgttataaaaactgtattgatatgtaatcattgaaacaatttcctttgtatatatctagaagtctttctcctccagggtattttatcaagttgctaggaaagcaaatttagttgtggcactccctgccagcactatttatttcatgttgcttcctttgctgacactggtacatgtcctggggacaataaccttggtgtcatcactgtgtgcctgcttgtgttgactccttctcgtcctataataaattctcaatatacaagtttgagatgctttctgagagatttggcattaaaactttctttcttgaggcctgagaaataaaagggaaaatacaccatggctcccttccaccaggctgacgtaggaagtccagtgccaactccttccagaaaggtgccactcaattcctgcatctccacagaacctccatagctgctgcatgcctcttcgtggaaggaaaggcaaactacgggactatttacacttcaggatccctgatttccctatatcacttcaggatactccaagatgacagcaattctttcctaccacactggttttataggttttaggtaaccaactggatggtgagacagatttgactttgctgacatcaaacactttgtcacagctttctctccaaacatatactatacttctagatttcactctactttcatttttttttcttggttttgaaggccttctccccaaacatacattttctcagcagtgatcctccagtgtctgcagtcatcttgttctagaaccataattctatctcgaatcttcctacatatacagctatgctaactcctttccctctctcttcctgaaagtaaaaataacaggctctaatttctgacttcaaggatgccagtttcttttctatctttagggtggcataagcctgttccaaaaatggggtcatgagagggggtagggaggtaagcagaactctccgtttgggaatgagtgtccaaaaggacttgtgtgaggagagctgacacccgccacgtggagtgggggtaaggcaaagcaaaacaaaaggcctcgcttcagccagattctccaaaaggaccttcatatgaataaaaagatcggctgatttgtatgcaggaatttaaatatgaatcattcagtatttgcttcccagatttttttaatgctttgagagatgtttaaaaataacttgtctttgtgatgttatacatggaagtggaaaaatgtatttcatttatgtgaaatgtatatttttatttttctgaaattgcccttaaattgaaaaatttattccttaatattcaattttcatttactttagagtgataaaacaagcattctgttttaggttctttggagattatttctcagagaaaacaagaaagactatttgggtttatcacaaatcttcatgaagtctatgtgaacagaaaaaaaagggcgctttttcttcctggaaatacaattttattacacattgttaaagaattaatatatctaattttatagaagaattccatcagaatttaattctagctcctggaatagccttagctttaggaggctacacaatcaatatgcagaatattagacatgttagggcttccaaaaaacattcattgaaaattgaaacattgaagatactatgatgaatactataataatttttgttgttttgttttacaagaaagactttttggactgtgagttctccctatgatgactgttccatggctagggtccttatagtactaagaaatatatttcctctcaaaatctcccctgaagtagtcattataatatctcctcccaaaacctgtccacaacaacaacaaattgcgtccttttcagggttgggtacagcacaaaacagagattgtgaaaagatacttgttgtaaactgttttctgtttacaaatgcaacagcaacaaataattttcttatcagaacctaaattctgacaccatacctcagtacaacactgtgccattcaaaaaaaaaaaaggagaaataagctgggcatttggaaacgcactgggaaacatctccctataccctgaggagacctatctttatgccaaattgaattattttgaaaactcgtgaatgacattag

SEQ ID NO: 97505 - DNA, 12540 bp, Homo sapiens
tgttcatagattagaagaattaatattgttaaaatgtccacaccactcaaagaaatctatatcttcaataaaatccctattaaaattctaatgccatttgtcacaaaaatagaaaagataattcttaaatgtgtatggaactacaaaagaccatgagaagctgaaacaatcctgagtaaaaagaatgaagctggaggcatcatagtaccacacttcaaaatatactataaggcaattgtggtcaaaacagcatggttctggcatgaaaacagactcatcaaccaatggaacaggtagaaagcccagaaataaacccacctatttatggtcaattgatttttggaaaaggtgccaggcacacaatgaggaaaggaaagtctattcaataaatggcattgggaaatctggttatccacatgcagaagaatgaaattagacctttaccttacaccaagcacaaaaatcaactcaaaatgcactgaaggctcaaatgtaagatctgaaactataaaactactagaacaaaacacagggaaaaactccttaacattggtctgggcaaagatttttttttatatgaccctgaaagctcaggcaacaaaaccaaaaatagacaaatgagattgcatcaaacttaaaagcttctgcacagccaaagaaacaatctgccaagtttagaagagacagcccacacagaatgagaaaaagtatttggaaaccgtacatttgataaggggttaatactcaaaatatataatgaactcaaacaactcaatagcaggaaaacaaataatccatgggcaaaagacttcagcagatacttctcaaaaaaaggcatacagatggccagcaggtttacaagaaaatactcagcattaccactcatcaggaaaatgcaaattaaaaccacaaggagatatcaccacacacctgttagaatggcttttatcaaaaagatgaaacaagcattggtgaaaatgtggagaaaagagaacatttgtacactgctgatgtaaatgtaagttggtacagccattatggaaaaaagtatggaagttcctcaaaaaactaaaaataaaactgccatataatccagcaatcccacttctgggaatatgtccaaaggaattgaaatcagtagtcaaagggatatctgcattcccatgtttattacagaattatttacaatacccaagagaggaaatcaatctaagtgtccatcaatagatgaatggataaagaaaatgcatatatacacaatagaatgatgctattcagcctttaaaaagaatggaattttgtcatttgggacaacgtggatgcatctaaagaacattatgctaagtgaaataagccaagcacagaaagataaataccacatgatctcacttatatgtgaaatcttaagaatgctgaattcacaaaagtagaaaatagaaggatggttaccagatactggagtcaggggagtgagagaatggggagttactactggtcaaagggtatgaagtttcagctagacggcaggaacaagatttgagatctattggacaccaggctggctatattcaataatatgttgtatatttcaaaataactaagaaagtaaatttcaaatgtattgccacaaaaaatgtcaaataattgaggtggtgaatatgttaattagcttgacttaatcactccacatgtatgtgtatgtgtatacatcatattgtattccatacatgtaatacaattatgatttgtcaattaaaaataatataagtaaaagtaaatttttaaaaagacacattacggtagccgcacgtggtggcgggtgcctgtggtcccagctactcgggaggctgaggcaggagaatcacctgaacccgggaggcggaggttgcagtgaggtgagatcgtgccactgcactccagcctggcgaaagagcgagactccgtctcaaaaaaaaaaaaaaaaaaagacacattacatacagaggaacaaagaaaaggatggcagcagatttttcaccagaaacaatgcaagaagaaactgtctttttttgcagatgaaatgactacctatttaaaaaaaaaaaagaaaaaaccaaagaatttacaaaaaaagcccctagaactaaatttagcaagatcactaaacacaaaatcaagatacaaaagtcaactgtatgtctatatactagctacaaacattcagacattgaaattaaaaacaaacatttacagcagcatcaaaaatatgaaatacttagggggataaatctgacaaaagatgtgcaagactcataaactagaatctacaaagcatttctgagagaaattaaagaaaacctaaataagtgcagaaatatactgcactcacgaactagaagacttactattgttaagatgtcaatttttcctgaattgatccatagatttaatgcaatctcagtcaaaatctagcaggcttttttttatagatgctggcaagctatttctaaaacttacgtggaaatgtaaaaggaccaaagataccctcaccctcccaatttttgttgttgttgttgttctttgatacagggttttgctatgttgctcaagatatccttgaacttcctgggctcaagtgatcctcctgcctcagcctcccaagtacctggagctacaggcatgtactaccgtgcccggctataccccccaccaaaaaaaatttaaagaaatttaaagctacaataatcataacagtgtgtaactagcatccagataggcaaatagaccaatggaacagagcaaagtccagaagtaaatccacacatatacggtcaattgattttttttttttttttttttttttttacaaaagtgcaaaagctattcagtggaggcagcatattcttttcaacatgttgtactggaacaattgaatatccatgtgcaaaaaccccaactttcttccatacattgcaccaatacaaaaaaaattaggatcatagacctaaatgtaactaaaactgtaacacttttaaaagaaatctttataaccttggggttaggccaaaacatcttagttatgacaccaaaaacatgatcaatagaagataaattggacttcatcaaaatttaaaatttgttttttagaggcatttttaagagaatgaaaaaaacagaccacagattgagagaaaatgtttacaaatcacaagtcctgataaaagacttgtatctagaatatataaatataatatataaataatttatataaatttatacataaatatataaattcttaaaaactcaataatataacaataaacaatcattgtccattaagagatggacaaattatttgaaaagattcttcatcaaagaaaatggataggaaataagcacatgaaaagatgatgaacattatatgccattagggaaatgcaaattaaaaccaaaataagataacacaccgattatgatgtctaaaattaaaaagacttaaactaaggttagccataatgtggcagaattaaaatttttatgcactgccggtggaaatttaaaatagtacaaccactttaggaaacaatatggcagtttctttaaaaattaactaaatgcctataatatgactcaaccatttcactcctacaagtcacccagcagaaataaaagacttgtatacaaatggtcatagcaactttatttataatatccccaaactagaaaacaatccaaatgttcaacaacaaagataactgttatacaaatatggtatatccacaaagtggaatactactcagcaataagaggaataagctattaatatacactacagtatggatgaatctcaaaacattatgctgagtaaaagaagctggacaaaaaaaaaaaaaaagagtatgtgggccggcacaatggctcatgcctgaaatcctagcactttgagaggccgaggcaggtggattgcttcagctcaggagttcaggaccagcctgggcaacataatgagacccttgtctctacaaaaaatacaaaaagtatccgggcatagtggtgtgcacctgtcatccagcctgggcaacataatgagacccttgtctctacaaaaaatacaaaaagtatccgggcagagtggtgtgcacctgtcatcccagctactcaggaggctgaggtgggaggatttcttgagcccaggaggtggaggttgcagcgaactgagattgcaccactgcactccatcctgagcaacagagccggatcctgtctgaaaaaaaaaaaaaaaaaaagtctgtgatttaagtgatggatttgtaatgttgtacttggccagtctaaactgtccaagaattctacttcctgtatgtttcctatcagagttagcaacaagggactttagacggtgggaaaaaggcagcagctactttgaagcagcatctgggcctacagttgctctactacctacccttggattcaccagtttttctgactttgggaccatgtatgtgtttagttctgtgacaaagcgccctggcttctgcaggataccctcatcaccaacatcagaggcaacaagaatggacaagagtttcagcctgtccttgtgaggctccagctcatgcttccccatgccagcccacttgtgatcgtcttgactttttgcccagtagacttccagctctagcatcagacatggaaacagccttaaagagactccttgaccagctgccacagttgcataaagccaatttcctgtagcagattgatacatatattttacccccaccctactctcttttgttgaaccctgactgacatagatacagggtccatactgtatggttgcatttatatacaattctgaaaaatgcaaactaatctgtagtgcagaaaacagaaagttcctgggaatagggaggagcagggagggatggaaggaaggggttacaggggaatgaagaaacaaccttaatgggtgatatgtttacattttgattgtggtgatggtttcacagttgtatacataagccaaaatttatcaaattgtgcagtttattttgtgccaatcatacacactgttaaaatttttttttagtgcagaaaagaattggcacacccccgacactaatttcctagtttaagctgcctggaaatgaaattctaggaatgtttcgggctttgttgtgccacctccactatgcagaggaagttgtaaaagataaataaatgacaggaagctcttttaattcactcttaagagagacatagcaaattttggtctagaaagaaatgtaacaaagtgtgtttttattttccttttatctatactactatgttttcccacaataaacatgaagtaattttgtaattaaaataaaaggaaaatatggcacatcctccggatgtatttttctttctcactgaaagtcccttttatacgtttaaagaaatatgctgggtgtggtgcctcaagcctgtaatcccagcactttaggaagctgaagcgggtggatcatctgagctcaggaattcaagaccagcctgggaaacatagcaaaaatgtattttctctatcaaaaatacaaaaaagtagccgggcatggtggtgcatatctgtaatatcagctacttgagaggctgaggtgggaggatggcttgagcccaggaggtggaggttgcagtgaaccgagtttgcaccactgcattgcagcctgggtgacagagtgaaaccctgtctcaaaaaaaaaacaaaaaaacaaaaaaatacaaaaaaaaaaggaaataaataagagaaaatagaatttcacaggataagcttcctagagtaaatgactattgtctgtgacacaagaatctacaaagggtctgtgaagctatgatattataacagaaatgtggaatactctctgaccactaagaccccatcagtaaggatttggttatttaattattttattaaacttaccattattttattcctctggaaggctgaggtgatgtgttctgagaaagcaagagcatttgctttagaaacaaagtgggtttattgatgcatattaccttgggcttctcaccggcccgcttagcacaggacatgaaacacctagggatgaaatgttctctgttgattttttcttttcaatgtgaaatgtacagtttttgaagtcacaacgttggcacaattaagaagtttawctgacaataacagaacccaaggaaattggttagtattgtgtttctagaatactgtatcttcctgttagtttaacaaactttcaaccartcaatcatcaacatctttttttttttttttttttagacagagtcttgctatatcacccaggctgcagtgagtggtgccatcatagctcactgcagcctcgacatctcaggctcaagtaatcctcycacctcagcctcctaagtatcgggaccacaggagggcatcaccacacccaaccctttttttattttttgtagagacagggtttcccaatgttgcccaggctagtcttgaactcccggcctcaagccatcctccctccttggcattacaggcatgagtcaccgcacccggcccatcttcatcttccaaagacactaaagacaaatcagaccaaagccctgtcccaaggaggctcaacacattactttactgtaatgcaacgtatgcggagacaaccacagaatggaaaagggaagcacaggggcacctaccaaagctttattagcggggaggggctgcagaatcagggaaagcttctcagaacacatggtgctcaatcttagttgactttgcttggtggtcctttcaagcagacagacttcttccaaggcctgggcctttgggaccaatctacataactacatagaataatttatgttttgcctaacaagaatccaatttcaaacttttgctttgctagcagatgtttggccttctctgcttcagagaaaggggaacttcagtcaaaggcaaaaatagaagatcatcctaggcttttgagtttccaagggcccagccctggtatgatggacattttaaggaattaaattcagagtgattttaacttctatgcatgatttttgccttctatgctaattttttaaccttgcaactgaatcagaatgattccactgtacagtgttttaaaagaaaaaaatgttacctctagaattttacacccaggcaattcaacattcatgtattaaaaagagacattctcagatatgcaaggattcatgtatccttgaaaaaattatttgaagatgtactacaacagagcgataaatgaagcaaataaagggcattaagaatggagctgtcagtcaggcgtggtggctcatgcctataatcccagcactttgggaggccaaggcaggttgatcgtgaggtcaggagttcgagaccagcctggcctacatgatgaaaccccatctctactaaaaatacaaaaaattagccgggtatggtggcgtgcacctgtagtcccagctactcaggaggctgaggcaggagaatcgcttgaccccgggaggcgggagctgcagtgagctgatatcacgccactgcactccagcctgggtgacagagtgagactctgtctcaaaaagaaagaaagaaaaagaacggagcttggtaatcccagctacttgggaggctgagatagaagaatcacttaaatctgggaggtggaggttgcagtgagcaaagataacaccactgcactccagcttgggccacagagcaagaccctgtctcaaaaagaatggagctgtcatgtataaaagggtaaatgctgagtaattaaccaatttaaaatagaaatgtgccttaaaaatacattgtaattttgattataaagccgaatgatattaccaaaaattattttccaaagaacaatgatattctgaatccaaaattctaatgttaataaaaactaaggatgggtgattaaaaaataaaagtgtgtcaaacttcttatcttataaaaatacaagatactgtttcattcctgactctgataagagaggaaatataggttaaagtatattgtaaaacataaggcaacagaaaacttggtagtttgaaaggcagaatgaaatatagggtataggctgggtgcggtgtctcatgcatgcaatcccagcactttggaaggccaaggcaggcggatcacaatgtcaggagatcaagaccatcctggccaacatggtgaaactccgtctctactaaaaatacaaaacttagctgggcatggtggtgcgtgcctgtaatcccagctactcaggaggcgaggcaggagaatcgcttgaaccagggagtcggaggttgcagtgaacacagatcgcgacaaggacgcactccagcctggtgacagagcgagactgtctcaaaaaaaaaaaaaaaaaagaaaaaaaagaaaaaagaaaagaatgaaatataggatatatactatactaagttctgatgataatgaagccctagctgccatcttggctgcaatctttgagaccccaagccagaagtagctagctaaatgactcgtaaatttctgactcatagtaactgtgtgagaaaataatgtttattgcttgttatgagctcaattgtgtcccgtcagaattcatatgctgaagtcctaatccgcaatcctcagcatgtgactgtatttggagggatggcctttaaagaggtgattaatttaaaatgaggtcgttagggtgggtcctaacgcaatttgactggtctccttctaagaggaggtttggacacagagacaaccagggatcatgtgtacagaggagaagccgtatgaggacacaggaagcgggtggccatctgcaaaccaacaagagaggcctcgggagaaaccaatcctgatgacgatttgactttggacttccagcctccagatctgcgagaaaacaaatttctgttgcttaagccacacggtcggtggcattttgtaatggcagctttagcaaactaatatacttttgttttaagctactaaattttgaagtcatttgttagccatatataacgaatacagatcttcatattggaggtccttatgactaatttgtatggagaaacaacaccaaaaaatagcaaaataattaaccagagaaagtaacagagttcccagcaatcctataatgctgccttcggtttcacccctggtctgtctgtttctaattctgtaagactgttccagaagttcccccaatatgattcggagtctcccagccacaattcctgaggggaaaatagtacccagcccaccccatgaacccacttttcacctcaggatacaatcagagatgagaacatgtgcttatatatttggtattttggagaaaacaaatgtaaataaactgcatgctcaactctaggaacaagttgtgtgtaaactgtaacccatccttatgatagaatatcattcaaccattacaaagcctgttttcaaaaagtccttaatgatccacaggcatttttataatgtattttttaaataaaaagatgggtttttatttgtataaaaatattgtttttaaagtaggattggaaactgctggtagaggttacctttggatcatggatgtggaagatgattctttttctctttttaaaattttctgttcttttgacactgaatatgtattactttcataatcagaagttgcattttacttaaagaaaaaagaatcttgcccatcctcaagactccccaaatctccccgttaaaatgactatctcctctataacaccattattttactttaccttgtattatcacgtcttcatatttggcatttgcatactatttttcttctaagtagttatggatgtgtgcctaacaatagcagtgttatccaggtttagctttccagaaaataacaccactaatctcacattagtatgataatacctatccacaggcagggcaggcccattcctgtggccctccatttccttgggaggcaggtgctgtgggttttcatcctgttcccagtgccaggcacatgatggctgtttaatgtgtattcactgggtcaaagagaattcctcttcccattataaacttgttttctgattaatcctgagaacacctggatggggacatcaatgctttgggtggtgggatttcaggggtactgagaaggccttttcctctctcctgagctgatgccattatcccatcccatagcatgagattcctgagcgagtgttcctggcctaagtgagagtggaaagcggtgttagagccactttctgtcacattacaacacatcccagagggctgcgccgggggtcatgaaggaagtggaaaccaaggacatccagaggacaaggacctgggactagaaaggaggtggcagtctctgagtcctgtgtgtcctttctccccatcttgctcatggctctagaggccaggcactggtatgggttcagcacactgccaggccatgaagcactttctaagaacagtatctaagacactgaaagtcgggctttgtcagtgagaaccctactagtcgggtgggagtggaggttgcaggtgcttggtatctctgtgggctcagccttcatggtattctccctgtgtgcatgcctgtctccaaatttccacatttcaaaaggacacaagtcatattggagtaggggcccaacctattccaatatgacctcatcatcgtcactaattacatctgcaatgaccctatttccaaataaggtcataatctgaggtactgggggttaggacttcagacatccaaatcttggggggacacaattcaacctgtaacaagggggtgggcagttcacaggagaaaggaattatcctctctcccctaactcatgctccttctcaagatttgtgtccaaacattttaaatccttttaagacatcattcatttaaggattttagagttttggaaaccgagggaaggatcttccttatgttctgctttctgcccgactccatctcttctttgatgcaacaggttagttatgtgaatccaggcaagaacaaaaaataaaaataaaaaaatcagtaaaccagtgaatatttcaaagaggtgatccttccagtaaagttcacatttcttttcctggagtactgaggagtaagtctaaggctagaggagccagtgggtaaggactggggggttcaggatctcagttgtgtcctctttggagataaaagttggcaatcagcagttgttcatttagcaaataagaagagagaagcagcttaaagaaacacacacacatttattttaaaatttgacataatccttgggtaattattagcatttttcagaagtttccgagactgatatctcaactccaaaccaatagcaatagcttatttgattggtggaaggattagagagggtcccatgatccagatgaatagatggctatcaaagaagacagaaccccatagacacaggcagcattaactcataatttttaaattaactgtcacaaatatgaaacatctcaccagaccaatgataacgtccatatcataatttgcattttaccaaagtgtccacatagacagcacagaactaaaagttctgtagacttcagaatcatatttaaattaatttgatcctttatattaataataattaaaaactagattctacccagtgtcgtcccagtcttcacaccaacatgtatgtcctgctgtcggaatgccacctcctctgcactcagtgtcatgattcgaagattaaaatcagtgtgtcaaatcagaacataaaccaagccaggaattcatgggcccagagaggggtaaggggcttgtcctatacagcagttaagcagcccacgtgctccgcccattcccaagcagaatcagattggagctgcaggcagcgaggaggagggcgtgttctgtgttgtccactgctttgcatggtttcttgggtgttccaaggaggacagttgttgtctcccaataagacagttaattccctgaggacaggacctcttccacactagcctccgtcacagcagggtgcatgcagccgaggtgtgagcacagagcaggtccctactaaaggcaggaaggaaaccagcatgaactgagcacctactacgtgccaggtacagagccaggacaggtgctttcctgtaatcctcacaaaagcagtgagataggatcatcatccccactttacaggtgtggaaacaggctcaaggaagagcatttgcccagagtggcacagctagtcagtaggggagcatcaatttgaaaatccaggctttctcactccagggccctttctagctacataagctgagggtttggcagtaaatgaggagcccagctccgagatggttagtttggagcccaaacattagatccccttgagcacatggggccagccttgagagtgcagagccctgggtctaggaatcctggctctacagcatgacttggtgatcctgtgcaagtcttttaacctctccacaccagggctgcgctggtccagcaggattccctatcagggagaggggacttagtaaaaccatctgg

SEQ ID NO: 97506 - DNA, 14925 bp, Homo sapiens
  misc_feature (1)...(14925): n = A,T,C or G
aggaaataatgcaaattcaaaatttgaggtacagtttctactgaattcatattgctttcacaccatagtaatgtaaaaaaattgcaagtgtggggcggggcgggccatggggcgggcggaggcgcccgagccccgcttcccccgcgccattccacccccggccaggctcagcccgcggccacctacgccccgcccctgccggctgcgcccgagcccagtcccgcgagccgctccccggcgggctggctcttggccccggaagcgcgagcgttcacttcgcggcgagtggctccgtctccgcggacagagcgcgcgccccctggcccggcccgcgggggggggctccggcacggtccccgagcgtttcccgccgggtggagcgggccgagcccagcaggttgaccagccccgcggccacgcagagccgggagatctactgtttgagcgcggaagcgcagaggctggcggaggcccggctcgccgcaaaacgggaggcccgcgcggaggctcgtgagatccccatgaaggagctggagcggcagcagaaggaggtagaagagagaccagaaaaatattttactgagaaggggtctcgtaacatgctgggcccgtctgcagccacgctggcctttctgggtgggacttcctctcagagaggcagcggagacacctctatatccatcgacaccgaggcgtccatcagggaaatcaaggactctctagcagaagttgaagagaaatgtaagaaggctatgttttccaatgctcagttagacaatgaaaacacaaacttcatttaccaagttgacaccctgaaagatatgttgctggagattgaagaacagctggctgaatataggcggcagtacgaagagaaaaacaaataatttgaaagggaaaaacacgcccacagtatactgcagtttcagtttgctgaagtcaaggaggccctgaagcaaacagaggaaatgctcgagaaacatggaataatcctaaattcagaaatagttaccaatggagagacttccgacactctcagtaatgtttgataccaagatcctaccaagatgacgaaagaagagttaaatgccctcaagtcgacaggggatgggaccctaggaaagccagtgaggtggaggtgaagaatgaaatcgtggcgaatgtggggaaaagagaaatcttgcacaatactgagaaagaacaacacacagaggacacagtgaaggattgtgtggacatagaggtattcactgctggtgagaataccgaggaccagaaatcctctgaagacactgccccattcctaggaaccttagcaggtgctacctatgaggaacaggttcaaagccaaattcttgagagcgcttctctccctgaaaacacagcacaggttgagtcaaatgaggtcatgggtgcaccagatgacaggaccagaactccccttgagccatccaactgttggagtgacttagatggtgggagccacacagagaatgtgggagaggcagcggtgactcaggttggagagcaggcagacacagtggcctcatgtcctttagggcatagtgatgacacagtttatcatgatgacagatgtatggtagaggtcccccaacagttagagacaagcatagggcatagtttagagaaagaattcaccaaccaggaagcagctgagcccaaggaggttccagtgcagagtacagaagcaggtagggatcacaacgaagaagagggtgaagaaaaaggattaagggatgagaaaccaatcaagacagaagttcctggttctccagcaggaactgagagcaagggtcaggaggcgacaggtccaagtacagtagacactcaaagtgaaccctcagatatgaaagagccagatgaagaaaagaatgaccaacagggagaggcattggactcattgcagaagagaaagaacaagaaaaagaaaaagaagaggaaaaaatccccagtacccatagaaacccttaaagatgtttaaaaagagttaacttatcagaacacagatttaagtgaaattaaggaagaagagcaggtaaagtctactgacagaaagtcagcagtggaagcccaaaacgaggtgactgaaaatccaaaacagaaaattgcagcagaaagcagtgaaaatgttgattgtccagagaatcctaaaatgaagttggatggaaaacttgaccaagaaggcaatgatgtaaaaacagcagctgaggaggtactagctggtagagacacattagattttgaggatgtcacagttcaatcatcaggcccgagggctggtggtgaagaattagatgaaggtgttgcaaaagataatgctaaaatagctggtgccacttaaagcaatcctgaagaaccagagagcgaagatgcagatcactgcaccgtacccaaaaatgaaagtccctcacaggacattagtgatgcctgtgaagcagaaagtacagagaggtgtgggatgtcagaacatccaagtcagaccatcaggaaagctttagacagcaatagcctaaaaaaccatgacttgttggcaccaggaggagagccgggggacttcaatccagaaagcagagaagataccagaggagggaacgagaagggcaaaagcaaagaagaccgtaccatgtcctaagctgaggcaggcggcaggcgtggtgcacaggaagtctgagtgtgaggggctcttttctctccactgccaatgtaagtagaatgttctaaattcatagagatgcactgtatgccaatcaccaggtgatctactgctttaagttatagactgttacttgtagatttccatgtaatcattgaggttatcacccagattagaaagacatatttgttatcagtgtacattctaattgagagcatatatccagtagtatcaaacaataatgtctactgtttatagtccacttaataaaaatagaagcatttaccatttgccttaggctgataggaatgtgaatattcttgaccaaatatatcagcatctaattgaaatgaccaaatagcattcttagacttctgtattatgaatataattgatatttaaattaatgtcttgttcatatatgtgtactttcatatttgattttaaaatatacattataacctgtatggtattttatttaaaggagataaaccgccaaatagcaaataggtcactgaaaagatttgcaccttagaacaataatcattttaaggataacaagtaaaggtctgaaagcatgaggggctttatttgccttcacctcatataagtctttgattttgaaccaatgcttttggatctcattgttgatgatacttgaatttactttgtaggagattttaacttcatgctgatgatgtatcaaattcattttatacaaagtttaaagattttttctggaagtgatacatgtcaaattacatttcctactgcagtatttgagcagggacagtcattttttaaatgtttttggccgggtgtggtggctcacgcctgtaatctcagcacgttgggaggccaaggcgggtggatcacctgaggtcagaagttcaaggccagcctggccaacatggtgaaaccctgtctctacgaaaaatacaaaaaattggccaggcgtggtggtgggcgcctgtaatcccagccactccggaggctgaggcaggagaatcgcttgaacctgcgaggcggagattgcagtcagccaagatcaagccattgtactccagcctggacaacgagcgaaactctgtctaaaaaacacacacacacacacacacacacacaaaacaatgttttcatgcctgtaaccctagcacattgggaagccaagtttggaggatcgcttgaggccaggagttcaaggctgcagtgagctatgattgcaccactatactctagcctgggagacagagtgagaccctgtctctaaaaaaaagaaaaagtttttgaaccttaaaattacttctctttgtttgaatttctaatcatcattcaaaagaacagtaaaaaaaggttacttgttcttgtgcaaactacaaattagactggagtaggatattttaaagagctgaatcacttttggtattttgttataaatgttttcatttgttatgtcccagtatattcttattggaaaattcttgttttgatctgcctgaagaaaatatctgttttctatataaagaaacatttaaaaataattgtaaagttagatttaattgtaaaatataaaatcacaaaggaatgtaccttatgaatgttgacattttatgaaattatgtagattcatattactgttacaagatagaattgaatgcaaaaagaccaaatcctcattaaaatttgaggaaaacataagtgttattatgtaattgaaataaaaacattttatagttgtaaaaaaaattgcaagtggaaccatcttaagttgggggaccatctatatgtatttaaatctagtctgacaatctttatatttgaaaaacagtttttttagagatagggtctcacctatcactgaggctggagtgcagtggcacaatcaagcttattgcagcctcaaacacctgggctcaagcaatcctcctggctcagcctcctgagtagctaggactataggtgtgccactacaactggatggtgttttaatttttattgtgtagagacagggtcttgctatgttgcccaggctggtctcgaactcctgggttcaagtgattctcccacgttggtttcccaaagtgttgggactataggcatgagccaccacagcctgccctactctctatcttttaactggatcatttactccatttagttttattgtaattactgatatactgatgcaataacattattctatcatgttattttgtgctatttgtcctgactttttcatgagtttttccctcttctttattgccttttttggattgatttttttcccttccattctttgtttctctactagtttggaatttctggagtatcacctaaaagagtagagaaaggtgatatttctatttagcatgcatatttgaacttttcaacatgaaattaatgtctttatttttccccatggaaaaattatcactgttactccctctaaattatattctcttgtcatgtatttatcttttcttttaaccccacaagacataatagtaataagataattactattattattattttgtagaattaatatctttttttttctttgagatggagtctttctctgttgcccaggctggagtgcagtggtgtgatcttggcttactgcaacctctgcctcctgggtttaggtgattctcctgtttcagccttccgagtagctgggattacaggtgtgtgccaccacgtccagctaatttttgtattttttgtagagatggggtttcgccatgttgggcagtctggtctggaactcctgacgtcaggtgatctgcccacctgggcctcccaaagtgttgggattacaggcgtgagccactgtgtccagcctagagttaatatctttacttacctgtttacttctgtatttgctcttcatttctggttaaatatcagctgttatctggatttttttcgttctgccttgagtaaatacttgacccttttccttcagtgagggtctatcaaggacaaactcagttttgtgtttgaaatgtctttgtctgaaatgtctttattcattgagaggatttttttgtagacatagaattctgtggttactttttctcagtatattgataatattcttgccttatggcttctagtcttgttacagagaagtaagctctcagccaaattgtcattactttgaagttaatttgtctttttctttggcgactgttaagattttctcttgtctttgtagctgtgcaatatatctgtgatgtgtttaagtgtgggttcctctttattttattccatgggcttctggagtctgggaactgggtcttcaatcagttctagaatttgactatctttttaaaatattgcttctgacttatgtctcttttcttctggaattctgaatagatattatgttacactatttaatctatctttcatgtctctgaacctctctttaatactttccatttaaaaatctctctgkattatactctggctatttttgcagatccagctctgtgttcactaattatcttctcagatgtatctaattgagtgttatgtctgttcattaaatttttactttcaattattttatttttgatttctataaattcttttttaaatattagctctacattttagaattccttgatttctgacattttggatccttcctttatttctttaartatgttacagatgtgtattttatattctatgcaaatatctgaaatttttcgtggatctcattttgtggtctwttttttttgcactcaaacgccttgatttcctgtgtgttttatgacttttattttattttttattatktatttatttattcatttttttttgagmtagagtcttgctctgttgcccagactgaagtgcagtggcacgatctcagctcactgcaacatccaccttctgggttcaagtgattgtcccacctcagcctcccgagtagctgggattacaggtgcctgccactacacctggctaatttttgtatttttaatagagacagggcttagccatgttggccgggctcgtctcaaactcctgacctcaggtgatccacctgcctyagcctctgaaagtgctgggattatagccatgaactacctcgcctggctgttgtgtgttttatgacttctaaatgagtgcatatactccttggacatttatatacgtcttctttttttattttattttatttgagacgagtctygctctgtcgctaggctggagtgcagtggcgcaatcttggctcactgcaacctccgactccttgttcaaaggattctcctgccgcagcagctagaattacaggcacgtgccaccacgcccagctaattttttgtgtttttagtagagatagggtttctcaccatgtaggccaggatggtctcgatctcctgacttcatgattcgcccacctcgacctccaaaagtgctgggattacaggcgtgagccattgcgcctggcctatagaattcttttaaggcctaagttaaatgtgtgtgcctacagagaacatacgtatttaaatttgccaggttgcagagggcactacctacttaaacaacattacacgaaattcttagcttgagatttttgtattacccaggtagtatgaattcaggctgtaaactcccttgaggatccccttgaggattatctaaaatttcaggggagattgtagttttcctcttttagtcagtgttaaggtttgagaaaggcattttccttgccatttcctatggagtggtacggtgtgggtgaagggagaggggctatttccagttcaacctgacactgacttttaagtcctttggggtcccagctctagttggatggtatattaaactacatacctcggatagaccctggacattgtctcctgtccctgtgaccctataaactgtgaaacaaaagctcaagttcaccaagttccgcaaatgccctcaagttaaaacttgacttctgtccaccttcctttctgggttcctactttcacatagtttttgtcttttgagtatttccaattctttttaagctttggccagaagttttagttgtctgtagttagagtgggtgtctagtgtaccataccactgaaacagaagcctgttacttttacaataataaaaacatatctatgtgggctttttaaaaaaatttttaaatttatttatttacttttttttttgagatggagtctcactctgtcgcccaggctggagtgcagtggcatgatcttggctcactgcaacctctgccacccgggttcaagcgattttcctgcctcagcctcctgagaagctgtgattacaggcgcatgccaccgtgcctggctaaattttgtatttttaggagagacagggtttcaccatgttggtcaggctggtctcaaactcctgagctcaggtgatctgcccaccttggcctcccaaagtgctgggattacaagcatgagccactgcacctggccaaacctatctatgttttagttttttatgattattttatattatcccttccccacacatgaaataacttctttccaagtgacttatgaagttgtcaacttttcataaagccttggaacaaagtgggcagaaaaattataaataaaaagtcttgtctaggacagtacaggtctgtcttattcctaaattagatcagaatcgggttatgccggttttttataacataccattataattgggtatgttaaagaatgtattagagatgcattagaagagcgacctcattataagcctcttcacccatggattccaaggatatcttacaataaacctctgggataccttacgctacagagcaactaaagtccagctttagagcacaagggaaaatgcaggatattgggtcctggaaactacaaaaaccatcaaactctactttagggctaaaactttcttttaatcaatctgtcatatttattgataaattagaaaatgtggctgggtgcagtggctcacacctgtaatcctagcagtttgggaggccgaggtgggtggatcacgaggtcaggagatggagaccattctggctaacacagtgaaaccccgtctctactaaaaatacaaaaattagccgggcgtggtggtgggcgcctgtagtcccagctactcaggaggcggaggcaggagaatggcttgaacccgggagacggaggttgcagtgagccgagattgccccactgcactccagcctgggtgacagagggagactccatctcaaaaaaaaaaaaaaaaaagtacaggttcaaatttcattaaattttttttccatgccccttctctggtggtaggatgataggggatgagtaaaatatcaaagacaactaaaaattcctaaactagatcctcgggtcccaaagaagtgttaaccatggagtgccccaccttctgaggttggtgcttcctggcacaggctcttggaacattctggattgtctgacattccttttactcgctttagaacctaaagatgttgctgggggaaaagggagctagggagagggaaggggaaggatgtgggataaggcataaactatgcttgtgggaaaaaaacaaccagtaatttccttgatggggtttttgcttgactttaaaatgcagtaagcttttaggaagcttgatggagcctgtgtttctaccattagtgctgcatttgtttggcttaagatttcattaagcttcttaaaatggagatacttctggaactcaaatggctactgagcagggaatggcaaatcagtgacactgtaggaagtggagggattttggcaaactagagaacacaccttccacaggggcagccactgctctgctgggcccgctgttcatctgcagggacgtgcatcttgggattatttccaaagtcagaactcagcatttttatgagaaatgtcatgatttttaaggtcttaacaagttatcccacattaaaaaaataataataaaccaggccgggtgcagtggctcacgcctgtaatcccaacattttgggaggctgaggtgggtggatcatgaggtcaggcgttcgagaccattatggccaacatggtgaaacactgtctctacttaaaatacaaaaattagctgggcatggtggccggcgcctgtaatcccagctactagggaggctgaggcaggagaatcgcttgaacctgggaggcggaggaggttgcagtgaactgagatcgtacccagcctgggcaacagtgcgaggttccgtctcaaaaaaaaccaaaaaacacaaaaacaaaaaacgacagagaaggccaaacaaaacacatctgtgggctggatgccgccatgcccaccggtttgcgacctttgtgttggactcttctgttcaccagacaccctgccctgcgagaatgtatctcatcctttgctggagcaggtttgcaggcacagtggagagaggagagaagaaatgaagggacacttatgcagaaccatgagtggccagagaggaggagaaggagggtgagaggagcaaagaagccatgacaacttcataattctgagtggactgggcagtggccagaaattctggtggtggatatgctgcctttccaacaggtgaatatgaaagaataagtcaaaccctgttcaggacgctgttaattccaaatgtgaactttttgagtcattctttccatgtggaattcaaaggagaatgtaaacaaattttcaggagggacgtgcaatatccctgaaagataacaaagttcgtaacacttatttacatacaacattctctagttattgattaaacagatctctacagacttgcatgaggcaacatttcttaggcttgtttgctacaatatctttaaaaatacttgattacacatcactttagcttatttagatggacttttcaccaagctctgaactgggatttcattttgttgcattcatcctgctcacgagacacaggtaggcagcaaatgagattatccctccagtccccatggattggaaatgttcccccttctttatgagctcactgcagtatctccttctccctttccccaaaggacagcctttcctgcctcagggaagaagagagagacagactacagtgatggagacccactagatgtgcacaagaggctgccatccagtgctggagaggaccgagccgtgatgctggggtttgccatgatgggcttctcagtcctaatgttcttcttgctcggaacaaccattctaaagccttttatgctcaggtaagaaacagaggaaggaaatctagagtttccaattcagataagatccaggcacagcggtaaaggaggagaggctggctttggtttctcaatctgtgactctctgccatggtctagaaaaagaaaaatacaattcctcttccgctgtcagtgctgggggcagctgggtgtggaggaagaggtggcgagaaggtcaaagatatttccctgcactgcctcctcccatctcataatctatatatacctccaaacacgtaatccacaaattatagtttcttcatttaggtcataaatcctccccttaaaatgttggtattccaagagagagttaaaccttgtatgtgagcacaataaaagttttttgagtctgaattttttgagtttgacagtgtctacctggcacatagtagttgctcaatacatattagtttccttccttttaattaggttctttattcaatatatgtagtgatacagttgacctttgaacaacatgggtttgaacttcgggaatccacttataaatggattttcttctgtgcctgccacccctgagacagtaagatcaatccctcctctttctcctcctcctcagcctactcaacatgaagaggacagggagaggacctttatgatgatccacttccatttagtaaatagtaaacatgttttctcttccttatgattttttttcttcaatttttgttttaagttccggggtacatgtacagaatgtgcaggtttgttacaaaggtaaacgtgtgccatggtggtttgcagcacagatcaacccatcacctgggtattaagcccagcatgcattagctattcttcctgatgctctccctccccctactccactgagaggccccagtgtgtgttgctcccctctaggtgtccatgtgttctcatcattcagctcccacttttaagtgagaacattcagtgtttggttctctgtttctgcattagtttgctgaggataatggcttccagcttcatttcatctatgtccccgcaaatgacatgatcttgttcttccttatgattttctttccttttcttttttctgagacggagtcttgctctgtcgccaggctggagtgcagtggcacgatcttggctcactgcaacctctgcctcccgaattcaagcagttctcctgcctcagcctcctgagtagctgnnnnnnnnnnnnnnnnnnnngccctcgcaccgcgtccatcagccgcgctcactcttatcccgtgcgctaaaccgcgccgccaccaccgtctgtctgcggtcggggccgcggcgcatacccgctcccacggtgctggggcgcatccccgcgccgtagggcccgttgtccaaatcgcccgtccgggtggtcaccaccctcccacttctcccccgccgccccctcactcccccccttccgcccagcgcccccgtgcatcccctccccccccccgtcttccctcccgccccccccctcccccatcctccttccccccttcccccccctgccctgccttgtcccccccccttaccttcacaaccaccatccaaatcccccccattctccccttcacacccccttcccattcccacctctccccaccttccctcccctcacctgtgccacacccttgtcccctccattccccggcgggcgctccaacgacacacccgctcctcactccgcggctcccccccttctcttcccccctcccctcccccgcccccacatgccaacgccgccccccccccgtgctcgacctcccccccccccgccccttgccccactgcctaccaccctgggtgactgagcgagactctgtctcaaaaaaaaaaaaaaaaaaaaaaagagacggggtcttgctctgtgacactggagtgcagtggtgtgatcacagctcattgcagtcttgaactcctgggctcaagcagtcctcccacctcagcttcctgagtcagtgggattacaggcataagctactgtgcctggctattctagcttattttattgtaagaattcagtatataatacatataaacatacaaaatatgtcttaatcaactgtttattggtaaggcttccagtcaacagtaggctattagtagttaagttttttttttttttttttgaagcagggtgtcactctgtcacccaggctgaagtgcagtggttcaatcatggctcactgcagcttcgacctcctgggctcaggcgatcctcctgcctcagcctcccaagtagctgggaccacaggtgtgtgccaccatacttggctaatttttaaattgttggtagagatgggatccccctatgttgcccaggctggtcgtgaactcctaagctcaagtcatccttctaccttggtctcccaaagtgctgggattacaggcatgagccaccatgcctgaccagtagttaaatttttgaggagtcaaaagttatatgcaaattttcgactgcaggtttgggggtgtggtgttggcatccctaacccctgaattgttcaagggtcaactttagttgctacttattaagtatatgctgtatgctcaatacatactatattttatcctacttaaacctacagcagcccatgatggaagtgttattttagttttcattttataaatgagaaagctgaggctcagaaaggccaagtaacttgcccaagttcacatagccggtaaataatatgcctgtcattctgacgtaagacttgcttcttaatacctaaatgatgtttgctgaaatgaggggaatgggggttctgattagggaaggggaggggctatttaattttgtaggatggcccacacaacatgtggtactctggggccaggtcagttcagggtaaaaggaaggcaaggggtgctttttggacattgctttatttttggacagcccttttttttttggacagccaaagagcaacaggaggcccagggggagtggaagaggaaggcctaggagttcagtgagggaaaggggtcataaaaaaggaagagagtggcctacttctgttatttatgattcatctcctgccattcctaggttaccattgttaggggaaagatgtagaagtcaccatttactatagcacacagtgccactgttggaagaattccagaagaagcttctctctggtattagcaccaggagaagctgtgctgctcctgatcaaccagcttactttcatttaatggacgccaggagtcttgtatctggttgtgtttccttcattgctttggctgctaggaaacccagaggcaactttgtagctcggttctcataactacaagggatcttatggtctgcagattacatgtttgtacctcacttttttttaaacttttttttttaagaagtgggatctcactatgttgtccaggctagtctcaaactcctaggctcaagcgattctcttgtcttggctatacctcacttctgacttcattctgtctttttttcctctttttcatttactccttttcctctcatcatatatatatatatatgcattacatgtctatgtaatttgattgaatgtttgaatgtatgggaatgttgagtaaatgtccgtgtgtgtgcacaggcagatcatttttaaaaatgtgacatatttgggagatggcttgagggtaccttctgcaagctggtaccaaactgttgctcataattaagttttacttttctaagcattcctggaaattatttggttaaattaattaagtgaatgcctaagagtggtgagttctcatctctctcttgccttacatcttgtgccatctcagcgagtagttttgctccataaagggtggtagttaagaagccctgcgtagttcatacctatccccactccctcaacctctcatccctcaatcagatgatggattttgtcacagctgtagccaaatacacacccgatgctattgaaggaacatgcttattttttagccctaaatacatccctggttccacctgaaaggctctga

SEQ ID NO: 97507 - DNA, 13250 bp, Homo sapiens
ctcaaacaaacaaacaaacaaaaaaaaggtatttagaaataaagatctaagtagtatgtctacttgttactacttgagtgtcattgcttcagcttctgttagtgaacagaagtaggagatatatgtatgtatactaacccatgtatctacaatacctgtatttatgctcatatatctgtatacatattaatataaactcatgctgataaatgtgactctaatccagcaccacaggggtcattctaacctttcactcttgcccatttgtaacttctttctcatgtcagtgagaaacctggctctcattatttacaatatattttcttattcaatttttattttttattttttgttatttagtttttatttcatgatcataaatgtaactgtgtaatccagctagacatggaagggaataaggaaaatatggaacctaaagaatagcagagatagcacaaagattataggatactgtgagcaaatgggttggaggggtgctctcctgagctacagaagcaattctcttgtggttaacataaaacatgattcaaatttattagcgttttccacagtcagcaatgatcttcttgctggtcttgccattcctggacccaaagcattccatggcttccaccttattagtgcctgcttttaccttgccgaagaccacatgcttgcctaccaaccactcagtctttgcagtgcagatgaaaaaatgggaaccatttgtgttgagtacagcatttgccatggacaagatgccagaacctgtatacttcaggatgacgctctcatcatcaaatttctccgcatagatggactttccaccagtgccattatggcatgtgaaatcaccacccagacacataaatcctggaataatactgtgaaagcaagaactcttaataaccaaattctttctctccagtgctcagagcatgaaaattttctgctgtctttgtattaatagctttgtctgcaaatggatctaaggaaatgtggcccaaggactcaccactgacagtgatgtcaaagagcatggtggggtcgactatggctggtgtcaggggctctgggcagtgacagtgtttgcaaagcacttattcattttatatacatgtgtattaggttgattggtgatcctcaaaaatatatgcctatgtcttaaccactggaagctgtgaatgtaaccttacttagaaaaggggtcttcacagacataatcaaggatcttaagattcatttacattagattatcccagtgggccctaaatccaatgacaagtatccttataagagacacgcagagaagagaaacatagaggcaagacgagaagaccaggtaaagacagaggcagagactgtagtgaagcagccacaagtcaacgaacacctgaagtcaccaggagctggaagacacaaagaaggattctcccctagagacttcagagataccgcagctctgacaccttgattttggacttccggttttcagaactgtgaaagattaaatttctcctgctttatgccaccaagtctgtggtaatttgttacagcagccttagaaaacacaacatgtaaaagagtttcagaattgctaaccaagctcctgtgagaaacagatttaccaaccagagtgtagtgtttgtgtagttttgtctgccttgtagtatcaagtcaaaatattgcatttcaaagcttcttaggtcagctttatcagttagtgctcttttgtggtggggagtggtctggcttctttcattaaacatgattcactgttgttggatgtatcagatgtgttattttttattgttgaataatattccattatatgaatacatcacaattttctaatccatacctctgctgatggacatttagttttttaccagtttggggttattacaaataaagctgctaaaaccatttttgtccaagtgtttgtgtaaacatgtgatttaaagttccatgatagggtgtgggatggccgcggagccgggcggagctggcttgcggctaccggggccggctctctggccggagacatggcccgggggcccggcccgctaggcaggcctcgccccgatacggtcgccatgcccaagagaggaaagcgactcaagttccgggcccacgacgcctgctccggccgagtgaccgtggcggattacgccgactcggatctggcggtcgtgaggtctggacgagtcaagaaagccgtagccaacgctgttcggcaggaagtaaaatctctttgtggcttggaagcctctcaggttcctgcagaggaagctctttctggggctggtgagccctatgacatcatcgacagcagtgatgagatggatgcccaggaggaaaacatccatgagagaactgtctccagaaaaaagaaaagcaagagacacaaagaagaactggacggggctggaggagaagagtatcccatggatatttggctattgctggcctcctatatccgtcctgaggacattgtgaatttttccctgatttgtaagaatgcctggactgtcacttgcactgctgccttttggaccaggttgtaccgaaggcactacacgctggatgcttccctgcctttgcgtctgcgaccagagtcaatggagaagctgcactgtctccgggcttgtgtgatccgatctctgtaccatatgtatgagccatttgctgctcgaatctccaagaatccagccattccagaaagcacccccagcacattaaagaattccaaatgcttacttttctggtgcagaaagattgttgggaacagacaggaaccaatgtgggaattcaacttcaagttcaaaaaacagtcccctaggttaaagagcaagtgtacaggaggattgcagcctcccgttcagtacgaagatgttcataccaatccagaccaggactgctgcctactgcaggtcaccaccctcaatttcatctttattccgattgtcatgggaatgatatttactctgtttactatcaatgtgagcacggacatgcggcatcatcgagtgagactggtgttccaagattcccctgtccatggtggtcggaaactgcgcagtgaacagggtgtgcaagtcatcctggacccagtgcacagcgttcggctctttgactggtggcatcctcagtacccattctccctgagagcgtagttactgcttcccatcccttgggggcagcctcgagtgtagtccattagtaatcagattccagtttggacagggtggctggattgtatatctcgttagtaatgtacatgctcttcaggttctagggctcctgttaggggagggagaaatgttgaatcaagagggaaaacaactactatgatttataaacatattttaatgtaaaaatttgcattcaaaaggagtggccctgttttctgtgttaaaaccccatttggtgctattgagtttgttctttattcttttatcccagtgaaaattgttgatcttgctgtagggaaaaattaaactctttgaatctccaaacaaggaagtttcagcattcccttatggatcagaggaaccttagaggcctgaaattgttgcttccagtttagctgcccctcaaattcaagtgaatattttcccttctccctttacccttctccagaaataaagcaggtgacagggttttcagaatcttaaaaaaaaaaaaaaaaaagttccatgataaatacttaagagtacaatagctcagtcatatggtgggtttgtgtttaaaattttaagaaactgccaagttgttttccaaaaggctgtaccatattttacattcccattatcagtgtatgagtttgtagtataaagaaagaaattaaaaactttttgataaggtccaatttatcatttttttcttttgtgattcatgcttttctgtgtcctaattaagaattctttgcctaattcaaggtcacaaagacttcttcattttcttctagaaatattataattttagctcttaaatttaggttaggatcccctttcattttttgcagagagtgagatgtaagggtagaggttcatttttttgcacagatgtccagttattccagcactattttttgaaaaaattatcttctcccattaccttgacatctatttgaaaaagtgattgaccatacatagatctatttctggagtctctattctggcctactgacctgtatgtttatccttgtgccaatattacatatactgtagacttgatagccaatagtgaatgtcctccaattctgttgttcttcaagaaacattttcttggttattcttggtcctttgcatttatgtatgaattttattaacagtttgccaattttttctctctctgtctctctcactcactatctctcatacagacacacacacatgcacacacacataactgttgggatttcaaaatttctcattttaattatcacaaaaatacagaaaattgcaccagttataggtatatagcttgatgaatttccacagagttaacacatccatataaatagccctgagatcaagaaacagtactataacactactccagggcacccttcaaataatctacccaaaggatacactttatctggcattttttaactgtatgtttgtgagtttcattcatatgttgaaaatagttaccattatgtttattctcactgctgtataatattccattgcatgaatataacatttattatccatcctatttttgataggcatttgggtgtttccagtttggagttactatgaattgtgctgtgaacattcttgcagtcttttagggaagacatggaagcatttttacttggatatatatctaggagtggaactgtgaagtcttaggtttgtgtatgttcagttatagtagacactgcaagcatcatccaaaattattgtactattttacgcttctaatagcagtcagtgtatgtgttgttctgattggtaacacatggtattttctctctttttcatttttgccattctaataggcaaatagtgatattgcattgtggttaaacttcaattgtggtaaaatacacataacaaaacttactatcttaccaattttaaagtgtacagatcagtagaataaattctattcacattattgtgctaccattaccatcgtccacatatagaactcttttcatcttcttaaactgaaactctgtacccattaaacaataattcatttcctcctccctccaggcctggtacctccattctatttactatctctatgattttaactgatctaagtatctcatataagtggaatcatacaatatttgtcatttagcgactgacttatttcactaagcataatgtcctcaagatttatccgtgtcttagcatgtgtcagaattttcttcctttttaaggctaaataacattccattgtatgtatataccaccacttgtttatccatctgtcatggacacttgggttacttctaccttttggctattggaaataatgctgctatgaacatgggtgtgccacatctgtttgagttattactttcacttcttttgtttttatacccagaaatgaaacttctggatcatatggcaatcatatttttaattttttgaggaaccaccttactattttctatattggttgtaccattttacgttcccaccaagagtgcacagggattccagtttctccacatccttaccaacacttagtattttctgttttttttttattataatagccatcctaatgggtataagatggtgcaaaagataattttctttttcctggtgaataatgcagttgaacatcttctcctgtggttattggcctgtaatctcttttgcagattttccattcaagcctttgcccacttttcttacaaattgtcaccctttttctgttgtcctatagtttacttacatattttgaacgagtactatattagtctgttctcacactgctataaagaactacctgacactcagtagttcataaagaaaagaggtttaattgactcacagttccacagtctctgtacaggaggcatggctggggaggcctcaggaaatttacaatcatggcagaaggtgaaggagaagcaggcacaatcttcacatggtggagcgggagggagagagtgagcraagagggaagtggtacatgctttcaaacgaccagatctcatgagaactctatcacaagaaaagcaaggcagggagtccaccccatgattcagtcatcttccacaaggccctgcccctgacatgtgaggattacaattcaacatgagatttgggtggggacacagagccaaaccatatgaagtactttgtcagatgtatgtgttgcaaatatcttctctcattctgtgggctgctttttmtagtggaagggggaatcagtggcttatgctgtctctatgattttgaaaaccaaacttcagttctacccattccttaaggtctaacagtacttgggtcttttmtatgaaacaktgttttattagtttcttataactccagcctccattaattttcaccatctctgcccttctagagtgtttaccacctgattttgtgatctaatggtaatataattagttcatatccktgtttgcctctcacatactctacagccagaccacattgctcacgtgctttgcatgcattactttcctgcctgactttaaatcagagggcaagggcctttttaacaaatgttatccttaatacataccaacaagtacagcggtagcaagagctgcaacacttgytacctgtaacaagagctacaatacttgttatatgtaacaagagcaagagctcaatacttgttatatgacttgaaaaatgtaaatattaccaggaatatctactatccactaaaagaactgatagcaaataaattgttccaattaaatattttgttcaagaggtcttgaaaacaagccaygtaagtcatcaagtgagtctaacctctacaacataaaggcatcgtattgaaagtgtttcactttaacctccctggattctatttggaatttcagttattaacagtcctgcataccaccttcatcatctacttcatctagttactcacttacttctaaaaatacttayttttgacctcaggttggtaaaattagcctactctcatgtttgtttatgcttttgttctgctgctggtctctttggtcaatgtccatctattcatattatgagtttggatcagcctgaaatggtaaagtgggataaggtgtcaacatgatctttgacagtcttattatgtgcataattagctacctaatataaatttctcaataagaatgcgggtgctgtagctggtggtggtgaagtttacattctttgaaaatcaaatgatttagacatctatatatttgacattcacttttaaaatgcttgtaaatggaacacagccattgctcaatttacactttccttttagttctctgtcagtatgtttgtgaacccagaaagaatttttcccagaagtgatatctgagtttcattgggtaaaaataaaagattttaaaagcctcatttaatacttttttgggggaaacagctacttaattaaattttattatttgtcctctgggactgagatgaagaaaaattagacatgtaatctctttggggggtgttttgatggattgcctgcatttctctcatatcagataacaagatggccaatgtttttgtaggctttgtgcctttacccttggaattctacaaaaaacatctctcaagttcacatataacttggaatgaaatgctctacatgtgcttccagaattctcttttctgcatcaaatcagaaaaaatgagtcataactcataaggaattttctgtcagctaatgtgatatttagggaggtacacgaaatcgttgaagcctctagggcactatttaatgtattattgccaaaaaaaaaaaaacaaacagtagagcaattttctatgatatggctaattcagtcattattacaatagggatgcaatagatgtaaagcatttcctcaagagcttaactcattatggaaaagcaaaactggataaactagaatgcttagagacctgaagtgggatagcaaaatggatattctggttagagcagggtctggttgcacttaacacaggctgattacagtactttaaccaagtaaggagtttatttacccaatctaacaagagtctgggggtaggaaatgaatggatagtgaaggtccttgagagaacaggcccctttcccctcctgctccacaatgctcagcacttacgaatgactgccccactttgacactgaatcacaatctggacaagagaaaagacaggttaaaagtagaaagcttatgccagctgagcagtcctttacagaaagatataggtatcaaggaaaaaatagctttccatgaagtagcttttgatctagtttattggccaatggactagatgaccaccctagctggaagggcatttatggaggtattttaaattatttactattatctcaagcaaattcaagattctgttagcaaggaagaagagtacatactggataggcaaaccagcaatgtctatcacatttgattaactgaattaagtgccacacttcatattttaaatcttgccatcagacatttaaaagaatgtatttcatccatttccacacaattcaaagttcaccaccacacagatcataaagaagtttttttttggttattttttctcaacttacctgatatttcaataagaaatgataacttatgatacagccacttgatggactactgcacagtcattaacaatgaaaaatatgtagcaaaagatttgcacaagcacttcacaaaaaagtatctaaatgactaacaacaagaaaaagatgctcacctttgtcattggaaatatgcaaattaaagccataattaaataccataatacaactagcaaaatgtttaaaattaaaaagacacacaatatcaactgttggtgcatatgtggagaaactgaaatcctcatacagaaattattagagaaatcttcaaaatacccttttcctgccaaataaagggaaacaaatcttgagcagaaagcagagctgaagtctgtatgtaaccaggaaaaatggggctagtctgagtgcagatgcaaatggcaactatgtgaggagctgaatcagatactcctgcctttagggggcaccagagaaagggttaaagtgcccccaggttgcttagcaccctggacatatagtagaagcagatacaaactgtttttgaagaaaagtctccacactttaggccattaaatttcctacatattaagatcaatgaaatatcattcacaatctttaagatcaccaagcatacaaggaggcaagccactatgggtgaggtagatgaaaaacaacatacaacttgtttatatattggaatggtttcattgggcaaaaacaaaagattttaaaagcctcgtttaatactgactactgagatacagatacagagtacaaaataagtaggtaagaaacatttaaagaaatgaagtatggaaccacaaagatcgggaaggaatacaagagtatcaggaataactgggaagatacgcataacaataaaatggaacttctaaaatgaaaaatagacttttagaaattaaaaaagtctcaatgtatgggtttatcaacagatgaaacatagttgaacagtgatatggaatacacatctgaggaaattacccagaatagagcacagagagtagtaagatgaaaaagatgaaagaagttaagagatacggagaacagaagaggaaacagaaacatatgtattctgaactctaagacagtaaagagaactgagaaaaaggaattaattgaagagatagtaattgagaattttacagaagtgatgataaatataaatctattttcctaagtagaataaaagaaacccaaatgtagacacatcatagtgaaactgtagaagagcaaacacaaaaaggttccaaagtagccagaggaaaagagacaaatcatccatatgatacaacagcagtgacaaaaaccaaaatgaaatggaataacatcttcaaagtgtccattttgcattgtagatccaacccattgtcagaggatgaaagtgatataaatacattttcagataaacatagtttctcaccaacagactgctattaaaggaacttctaaaagatgtactttagaaagaaaaatgatcatagaatgatctgagatatgaaaaggaatagtaagtaaataaaatacaaacatgtaagtacatatatatacacacatacataaacatctgtgtaagagtctggagagaggtgtccagacttaaaacattctaaggtttttggattgtctaggggtagtgtttaagatatttaacttaaaactttattgtattaaatatgcaaggcaaaaatttaagggtaacactaagaaaaattggtagcataaatttgaaaaaaaaaaaagaataaaacacacatgcccgacattttttttaaaggcaaggaagaaaaaagcatagaaaaaaaaagagactaataaaattagttcaaacaagtccaaatgtatgtcaataattacaatgaatgtaaatggaataaacttgccaattaaaggttatactgccatattggataaaaaaacaaaatccagctgcgtgaagtttatgagacacaaaataaaaaggacagagaaaggttgaaagagaggtggggagcgaaaagatatataaggtaaacaccaataaaaagagagctgggatgttaccttaatatttgacaaaaattttaagacaaaaagcagtattggtgatcaagagggcaactactaaataataaagaataaattcatcagaaaggaaaaatataacaatttaaatttccattttcctaatagcctcaaaatataaaaagcaaaaattcatagaatttcagggtaaaatggccaaatgcagaattataagttctccttgttctttactgtaaaaatcatacatagtgaatacattcaaaagatatttgtattagcttgtgggattaaggatttttctccattttctaaactttattgctgtgatattgattttataattcatatacttttttcagaaatgaactatgcggtgaaatttttaaataactgatggttaattatggttttactaaatttgggggtaattactgtgtatagttttagatcctgctcccaatgattatcaggttgtgtacattttaaagataatttcttgtttgtgttttgctaaaatttcaaatgatttttacatggactcaagtggttcagacaccacttgacttacacattaaagaacgtggcttactacacagtttctgctttactcaataagaataaaataattctggaaagaatgcataataatgcactccaaacttaaatatgctactgattgttaatggctacattattctggctatttgtatcaacaacacagccacaacttttctaaacttctgcccagatattacaattatcctagggattacttactctcagaaaagtagaggaagatacaaattggcaattctttttctcacactgatactcctttggacttaagtgaaccaatattgttattactaaagctcagtattccacctctatttatactttctgaaacgtataagcaacacttagatgaaataggaagggatcactgtacacaaatggaaaataaagcagcatgcaaggaagctggttctaaagaaaacaagcacaggtggccgggcatggtggctcatgcctgtaatcccagcactttgggaggccgaggcaggcgaataacgaggtcaggagtttgagaccagcctggccaacatggtgaaaccccgtctctacaaaaaatacaaaaaattagctgggcgtagtggcgggtgtctgtaatcccagctacttttgggaggctgaggcaggagaatcgcttgaacccaggaagcggaggttgcagtgagccgagatcatgccactgcactccagccctggtgacggagtctcatctcaataaacaaacaaacaaaaaagcacaggttactttattacagtactgaaaaccaagacagcacatggactctctttgaatatataacctaaaaattgaaactgtaaaatttaatctattatacagaatttttttcatagttgtttaaattttactgtttgcaattctagaaaaataacatcatgttggaaaagtaagcagtaatttaaaatgaattatattttgaaaaatatagaagaatgacaagaattctaaatttttgtgaatattttacccaagaaatgtgttttagaatcttttgagatttgaattagaaaatattgttggtcaaattctttcactgtttaaagccaacaataaaagaataggaaaagaatgtagttatttccaactctgtgctataacaataagatagtaacgtctagaaattatatcttaaaaccttcagagtaaattaataaaaattcaacatacttcaagttatcactgtattttttctataattaccttttcgtttactgtttcaatttattgaattatacatacaatgaagagcacaataaatgtacatacagcttgatgaattctcacatagtgagcctgtgttacaagtaatctattattaacttttaagatgatacagtgctatgatcgaaggactaaaatgatcaacatcaccataaaaggcagagtcataaacaagaacaattaagtgtaattaaatcaggtgggaggcacacttacaaaaatgaaacaatttttggttcacattttacaccacacaggtattctgtatctttagaacatgagaaaatacatattctcagtctgataggtctctgacttgggggtttcttttactgtactttttttctctctagtagctgaacattttaaagcaatcagcagaaaaaatataaaacttcagaaccaattagacttttaaaagcaacgttcttgccctttccagagatacattccttaatcctcctacaaatcatgacctcacacgataactttaagggtgaacatcaacttatctacattttggtgctttctttcccttaagtggcagatggtttctattaacctaaaattgaagtcattgttgggggacccctaattccatgtctagtcctagtgcccagaggctacc

SEQ ID NO: 97508 - DNA, 27030 bp, Homo sapiens
ggccttggaccttcccccttctcctcccaaaccttgtgagaccccattccctttctacttcatcctgctctcaacctttgggctcctcagaggccctcacctctgactctctctccctacccactctggtcccatgaagccctcaagtactctggggatggatccttcccccttcaaaagattccttcttttgttctacacctcctgggtgtaggggcctggacaccctcccccaacgttccacctgccgctgcccttcctcttcctcctcctgagggtgggaccctcagacctggccaagatcctctccctccatgttgtcagggactcctcctcacccccaaatacagccctctagcccctgtccattttattccactcctttcctgtaacctagacagcatgttatgcaaccctttgcgacacatggggaaaccttccctccctttctctgttgtcaccaatggccccttaagaggagcagggccaccttgaaacttggaggatatggggtaacccagtgggagcgggcagggagggcccttggaaactgacagggctggagtatcctgctgggtttcagccccggttcctgcaggcacagctgccaggctctctgttcaccttcctgcctctggtttgccccggctccctcaccccccttaccctggagtccttccttctaggtgggagatgccatcccagcagtggaggtgtttgaaggggagccagggaacaaggtgaacctggcagagctgttcaagggcaagaagggtgtgctgtttggagttcctggggccttcacccctggatgttccaaggtgaggcccttccccttctgaagatcaggacctgggatcttttgtgttgctcttaagtcctccacatagtcctgataggactcctaaaaagcatttcagtgccatcacaaaacaagtagagctgggtagagctgggcgcggtggctcacgcctgtaatcccagcactttgggaggccaaggcgggtggatcacgaggtcaggagttcaaaaccagtctggccaagatggtgaaaccctgtctctactaaaaatgcaaaaaaatcagccggacatggtggcgggcgcctgtaatcccaggtactggggaggctgaggcagagaattgcttgaacccaggaggcgtaggttgcagtgagtggagatcgtgcctctgcagtccagcctgggtgaaagagcgagactccgtctcaaaatgaaaaaaaaaaaaaagaaaacaagtagagactgcaaaaagggaacagtaccaggaatgttggagaaaaacatactacaattaaatccaacacccctgttggtcctgctaaatgacaggcactgtggaaggtgcttgggactcagataaataagacatagatctgcccatggaaagttcacgtctggaccataaggcattaggtttcattctgagcttcctagtggccaaggcaaaaaggaaatagaatggtttagacagctctcattgtctgatcaaaggtgttgaggcagagcactgaggagggcctggagataaagggtgggctgggggtcagatgcagttatccctttgccgaccctttgttccccttcctcagacacacctgccagggtttgtggagcaggctgaggctctgaaggccaagggagtccaggtggtggcctgtctgagtgttaatgatgcctttgtgactggcgagtggggccgagcccacaaggcggaaggcaaggtgaggtgaggggcctgcagggagtcaggaccaggtaggatattcttcttgtgacctttactttctctgcaggttcggctcctggctgatcccactggggcctttgggaaggtgagtgttcccctgaccgccacagggacatggcagtgcggggagcagtgggggcccttggcctcttcaaggatttctgacacttttctctgtctcttcttaggagacagacttattactagatgattcgctggtgtccatctttgggaatcgacgtctcaagaggtaaaagtggagagtcctctgtggagagagtcctctgtgggagagagtcctctgtgggagagagtcctctgtggagagggtcctctgtgggaagagtcgtctgtgggggagagtcctctgtgtgggagagtcgtctgtggggagagtcctgtgtggggagagtcctctgtggagagagtcctctgtgggggagagtcctgtgtgggggagagtcctctgtggggagagtcctctgtgtggagagagtcctgtgtgggagagagtcctgtgtggggagagtcttctgtaggggagagtcctctggggagagagtcctgtgtgggggagagttctctgtggggagagtcctctgtgtggagagagtcctgtgtggtggtgagtcctctgtgggggagagtcctctgtggggggagtcctctctggagttctcttgggcccctggctgttcactgcctgtctccatgcccagcctccaagcccaggctgatgcagctggctgggcccctctttccggcaggttctccatggtggtacaggatggcatagtgaaggccctgaatgtggaaccagatggcacaggcctcacctgcagcctggcacccaatatcatctcacagctctgaggccctgggccagattacttcctccacccctccctatctcacctgcccagccctgtgctggggccctgcaattggaatgttggccagatttctgcaataaacacttgtggtttgcggccatctccttggttatgaatggctgtttcgctgagcgccaggcattctggcatcatcacagactgggtgagaatggtgagggcgcagatgggctgaaagggagaatgtagggggtcctgcttaattaagggggagctagggagggcctttcaagggaagttttttttttttttttttttgagacagtttcactctgtcccctaggctggagtgcagtggcatgatctcggctcaccacaacctctgcctcccaggttcaagcgattttcctgcctcagactccccagtagatgggattacaggtgtctgccaccacgcccgactaagtttttgtatttttggtagagacggggtttcaccatgttggccaggctggtctcgaactcctgacctcaggtgatcacccgcctccacctcccaaagtgctgggattacaggtgtgagccactgtgcccagccttgaggcaggtgttactgagcactgagaaggagccagcaatctgaagaggaagggaagaagcgctccccacagaggcagcacagagggcgaggcctggccgatggcatgtggcgcacagtgtggcctttgtacctgctctctgggtgctgcctgatgccatttagtctggaaaccccatggcgggaagcttggctcccagcattcctgccggggcccagccccaccatcctttcagacttgaccccctcctgggcacaccctcatcccaggaagagctcaggtcactttaggaccatctgatggacagggagaggggctctggcacagcacttgctcattccaggagggctccctgggggaagagtctaggtgagctgtggaggggagaagatgctggtgaggcctgaccagtggtggctgggtgtgaggggcctcaagtggggacaccagcagggtgtggggatgggggccattgccacggcaggccctgctcctgggcctctgccccttggtgcagggaagccacgcctgtgatggtgaggccccactgcgtggagtctagggggcctctgtgccctgcgcgatgctgcctgcctgcccaccccaggtgtggtaacagccctcacaagaattggtgaggtgtggactgctgctgcctctcagccacctacagggagtccgcattccatcaccgcgtggagctgccctgccatgaaccacatcaatacctggctcccaggcacttcctgcgtagtggtccccaggggtcagcccccactgctgactcaggcaggccacactcttgagaggtcagggagaaggtcaaagcagggcctcatagagcaaatgacccttgaggcagtgggagtggcgcctcaagtgggaggcggagggaggcccatagccctaggggtgagccccatagccctaggggtggagggtgggacaatcccatgctgccgcagcaaggtgggtagcaggagtagggggggaatgttggggacaagagaggatgcctggaggtcagtgggctctctgaagctgatgagcagcttgccttccaccctacaggcaccttggccatgggctaccgtgtgcagcccccaagctgggaggctgggagaggcaccagatgggcagcagggagcaggacccatgatgacagcaatgcccaggaggtggaggtggagatgtgttgggagggagggtgcatccagggagctgcttgctgaaggtggaggggctgggtgcttgtggtcacgtctgtgagaacagacactcagtaggaggggagccagcctccctgcccagggttgcaggtgctcagcctacccgagtcgtgctgcccaccaacctctgtcactgtggttctctcccacaacctgccaccccttcaggggtcccaggtgggggcagggaaggaggctgactgcacctcgagctgccctggtaaactgcctgcctctcctctcctgccaaactcgggggtacagtgttgtcctcatggacacgcataacacaaagcccctttctttcccggataccacctctttatcctctcatcatacaaatgagaaaacagacgtggagcttcctacagggcacctgtgagctaatgagtgtctccattagtaaatagggggtggtggtagcaaatagcccaccccactggctgtgcaccccacgctacccaggcagctccctgctatcggggaagcccagctccgtctctgtcactctgctgcctgtttcctctgctcctgggctattatctgggctggctgaggccaagcaaggcctctagaggaagtgtcccctccaaggtctgttgccactggctgggcctctaggaagggttgagagggcttccagggctggggtggccctctaggacagcctggtgtgggtggcggtggggctgtggcctcagtggccctgactgctgagcatgtggctgagcttgctggagtgaggacgtccttgggtgggggcacggaggactggccctggaagctgctccaggccctggagggcccaagattaaacagcacctggcaagagaaccttgcatagctgtctccaggttggacaggtggggcttcaggcctggagataagggcagaccaggccacggtgtcctggaccagagagccctggacatctgggctgcacctggcagagctgtgcgtgtggccttcctgggctcttggtggccgaaagaccaatgttaaaaaacataacaggccaggcggggtggcttacacctgtaatcccagcaccgtgggaggccaaggcgggtggatcattttaggtcaggagtttgagactagcctggccaacatggagaaatcccatatctactaaaaatacaaaaattacttgggcatggtggcgcatgtctgtaatcccggctactggggagggaggctgaggcaggagaattgcttgaacctgggaggtggaggttgcagtgagccgagatcgtgccactgcatgccagcctgggagacagagcaggagtctgtctcaaaaaaaaaaaaaaaaaaaaaaaaaagaaaagaagctgaaacatccacccaacaacacatgccccagtgaaactcacttgcctgtcctagcatgcccaaggccatagcaactgagaccagaaggccaagggtgttactcagcatcagtggttctgggccttcctgggtctagagtccctttgaaacgcagctgaacagaccccaacatgagcctgaagagtgttgacctaaaaggaagaagcctaggcaaaattaatatcagcggagactttatttgggccaagcttgaggattgcatcccaggagcacagattcaagttgccctgaatatacactccgattagcagaagttgaaatggattttaaaaggacaagagagctcctgagttgtttactaagaatttacattaaaataacaaactggctggctgcagtggctcaggcctgtaatcccggttcctctggcagctgaggtggaagcattgattcaggccagtttgagaccagcttggacaacatagcaagacaccgtccctacaaaataaataaataaataaataagtaaatatataaataagttgtcgtagtgcatgcctgtggtcgtagctactcaggaggctgaggcgggaggatcgcttgacaccaggagttggtgactaactacagttagtgagctataatcgtgccactaccctccagcctgggtgacagagcgagaccttgtctctaaaaaaataaaaataggccgggtgtggtggctcacacctataatcccagcactttgggaggctgaggtgggcggatcacctgaggtcgggagttcgagaccagcctaaccaacatggagaaaccccgtctctactaaaaatacaaaattagccaggtgtggtggctcatgcctgtaatcccagctactcgggcggctgaggcagaagaatcacttgaacctgggaggcggaggttttggtgagccaagatctcaccactgcactccagcctgggcaacaagagccaaactctgtctcaaaaaaaaaaaaacccaaaacaaaaacaactaaataaaaataaattagtgacaccccgtctctaccaaaaaaataaaataattgggtgggtgtggtagcacgtgcctatagttcgagctactccagaggctgagttgggaaaatcacttgagcccaggaggccaagactgcagtgagttatgattatgccactgcactccagcctgggtaatagagcaagaccctgcctcaaaaaaaaaaaaaaaaaaaaaaggctcaataaaaggttatttgaaagataaaaatcaggccaggcatggtggctcacgcctgtaatcctagcactttgggaggctgaggtgggcggatcacctgaggtcaggagtttgagaccagcctggccaacatggtgaaacccyatctctactaaaaatacaaaattagccaggcatggtggtgccatgcctgtagtcccagctacttgggaggctgagacaggagaattacttgaacctgggaggcagaggttgcagtgagtcgagatcacgccattgcactccaacctgggcaacagaatgagtctcaccacaacctccgcttcccgggttcaagcgattcttgtgcctcagcctcctgagtaactgggactacaggcgcgtgccaccatgcccggctactttttgtattttttagtagagatggggtttcattatgttggccaggctggtcttgaactcctggcctcgtgatctgcccgcctcagcctcacaaagtgctgggattatacgtgtgagccaccgcgcctggcctatcgggggagttttcaataggccctaagggagtcaagtctgggtttctgagacaaagaaaaggttggaggggtcctggtgttcctggcctagatcaggcttgggctgcagccatgaaggtgctgtgatcaggggcagtggaggctgctggccccaaagggacacactctactgggcgtggttggggtttggtgacacaggcattgagaagtgacagcagatagtgcaaagtgtgcatgggtataacttctggagaagttcaggtaacatctatgcgaaggcacagattcttggtgttaacgagcatgcatattggcctgccatgtgattatatttgtatcatcaactcgcactcctggagttgggaatcatgtctttttacttaacacaggtaaggagccctgctcagggtgggaaacacagataatacttaacacgttttgggaaggagtaaagaagtgaaggccaggcgtggtagctcacgcctgtaatcccagcactttgggaggcagaggtgagcggatcacctgaggtccggagttcgagcccagcctgaccaacatggagaaaccccgtctctactaaaaatacaaaattagcagggcgtggtggtgcatgcttgtaatcccagctactcaggaggctgaggcaggagaatcgcttgaacctgggaggtggagattgcagtgagccgagattgtgccattgtctgggcaacaagagcaaaactccatctcaaaacaaaacaacacaacaacaacaaaaaaacaaaggcttagctcacaggtatgcactagagaggttgagctagtatgctagctgtgtgattattccttctgtcttgctgctctgccattttaaacacgtctttaccttatgatccactgtggctgcttgagttccagccatcacattcatcgtccagcctgcaggaaggaggaaatgaagaacagaagatraaaggcccatgccagctgtctgtcaagaagctttttctggaagctgtcatatatcccttccacttacatctcactggacagaacttagtcacatggtcatactagctgcaaaggaagctgagaagtatcaacttcaytccagggtgccatgtgtctaaattaaaaattatgagtttttttagtcagggagagagagagaaaggatattgggtggacagcaagcagtgtggccacacagggatcacctctgagaagagggacctttgaggttccatgcttcccaggagatgcccacttccctgcctttcctgtcagccatggaagggcatggttaatacgaagctggcccagatccacgtgtggtcccctcatctccccagtgacttctctccaagcctctgtccccattccctgcaaccttggtcaccaaagtcaccctgattcccarttgtgggtcctccaatctcttccctttcagcatctaccagacaatgttccccgctgggatgcccctgcccagatcactctaaccttcagggccccaagtcagtttcactgctgaggacaacagccctctttcctggttccctgtccctttcctgaattagtttctgcgggaactgagccacatggttcggcttcatcaaagatagatttgccaaattgacatacaattcacatatcataaaattcagcctgtaaaattgtacaaaggctagrcatggtggctcatgcctgtaatcccagcactttgtgggggtgaagggggatgcttacttgagtccaggagtttgagaccagtctgggcaatataatgagaccttgtctcttttttttttttaaagtgtacaagtcggttgttttcaatatattcaccgagttgtgcaaccatcaccactaaggcacaggcggatcttttttttttttttttttgagatggagtcttgctctggcacaatctcggctcactgcaagctccgcgtcccgggttcatgccattctcctgcctcagcctcctgagtagctgggactacaggcgcccgccaccatgcccggctaattttttgtatttttagtagagacggggtttcaccgtgttagccaggatggtctcgatctcctgacctcgtgatccgcccgccttggcctcccaaaggcctcccggccttttttttttttttttttttttgagacagggtctccttctgtcacccaggctggagtgcagtggcacgatctcggctcaccaccagcctctacctcctgggttcaagtgatcttcctgcctcagtctccctagtaactgggactacaggcatgaaccaccatgctcagataatttttgattttttttggtagagacaaagtctctctgtgttgcctggtctggtctcaaactcctctgctcaagtgatcctcctgccttggcctcccaaagtgctgggattacaagcatgagacactatgcccgaccctaagacagatctttaatctcagtgacttctcaccaaaagaagctgcttttctcctctgagcattgcaattctcatgtcattatgagtggcccaatcaggtgttcagaggttccacttgctcacctgtgtctcctcacagtcacataggtatcttcccttcagtgcctctttgctgaaaatcatctctgcaccaggcactgtgcgaggcyctggggatacagcagtgaatatgccgtgcatgggccctgcaggcatcaggtaccaggtgggaagggtgttccaggggtgggaacagccactgctaaggtctgcaggccaggaagatgagggaggtctgggctgagcagtggtgaggatggagatgggatattgcccgcaagctgtggctcgcgtggtttatcttggtggagagctgggtgtttccagtgtttggctggggcagcttccagctttggacacacttctatttttgtttcctcttgggctccttctacagggcttattcccaaacgctggagtgctgggtcaaagggctccggaggttttattggtctcaggaaattctgagaccgtgctgacttgtacgcttttagagagtgaattttatgacatgtgaattgtatgccaatttggcaaatctatctttgatgaagctgaccagtgtggcccagttcccacatggaacaattcagggcagggacagggagccaggtgtgrgggctgttgcctctgagccacctgtgacctgtgctgtgttctctgctgcagttgccaactagagttgagttttaccttttggatttattttttgccagtttaatggatgtttaatggcacctcggagctgtctttaatgtgtgtgtctttaattacgagggcaactggcagccatggggcttggccctggatttccaccttgtttcctaattggatgctgggctccagccttgctgtcccacccgacagcaacaaggagtggagtggagccgggtgcagtggctcgcgcctgtaatcccagcactttgggaggccgaggcgggtggatcacctgaggtcgggagttcgagaccagcctgaccaacatggagaaaccctgtctctactaaaaatacaaaattagccggtcgtagtggcgcttgcctgtaatcccagctatgtgggaggctgaggcaggagaattgcttgaacccaggaggcagaggttgcagtgagctgagatcgagccactgcactccagcctgggtaagagcaagactctgtctccaaaaacacaaaacaaaacaaaacaaaacaaaacaaaatacaaaggaatggagtggaggaggtggcggggagcagggggtggagggtggggtggggttgtgggtagagtggggctgggagactgcgagctcttagcgccagaggaggactgagatttcagcctcagctgccctacttgcccccattcccttctgagctgcactttcctggcctctgaaataagagttcatttgttcaaaaacataaaaaaaaaaaaaaactgccttcagtatcttggctctgccacttcctggctgtgtggccttaagcaagtgacttaacctctctgggcatcaatttttttcattgtaaagtggggataaccaatagatcctgcatttttttttttttttttttagatggagtctctctgtcgcccaggctggagtgcagtggcgcaatctcggctcactgcaagctccatctcccgggttcacgccgttctcctgcctcagcctcccgagtagctgggactacaggtgcccgccaccgtgcccggctaatttttttttttttttgtatttttagtagagacgggatttcaccgtggtcttgatctcctgaccttgtgatctgcccacctcggtctcccaaagtggtgggattacaggtgtgagccatcgcgcccggccagctcctgtattttgcagctgaggaggggattaagtgattgagatgtgggaagtgcttagaatggagcccagcagagatcagtgggcagcggacatcggtgctctcatggacccagtgggctcagcactgcgctctctgcactgcagtcatgggtgagcccatgatggcttccacttgacaggggagcaggcaaagcaagcacgcgaaggtgccgggtgcatggagtggaaccctgctgtgggaggaggatgggggctgctttacaagagaaaggacttttcttttcttttgttttttgagacagggtctcactttgtcacccaggctggagtgcagtggtgtgatcacagctcactgtagccttgaactcctgggctcaagtgatccttctgcctcagcctcccttgttgctgggatgacaggtgtgctccatcatgtgaggctaatttttggatttttttgtagagatgaggtctcaccatgttgtccaagttggtcttgaacccctgggctcaagcaatcctcttgcctcagcctcacaaagtgctgggattacaggtgtgagctaccatgccaggtcatgaaaggacttttctgagaaagggacatttgagagaccagtatgggataaggggaaagggtgtgtgtgtgtgtgcgtgtgtgtgtgtgaatgtgtgtgagcatgtgtgaatgtgtgtaagcatgtgtgaatgtgcatgcgtgtgagcatgtgtgaatgtgtgtgtgtagggagttggggagtgtgtgactcagacatgttgagctccaagttgagtggtcggcgatgcaaaggtgccgagtgggggagagcgattgaggaaccagcgtggccagagtggaggagaggaggaaggatgaggtcagggtggtgaggcggcacctctccacggccttgaaggtcatggtgagctgctgagtcaactcagggagaagccactggagagctttaagcccggcatggccgtgagccaggcagtttctgaatgactccttcagtgctgggtggatgccccctggaggaggattcgtgcctgcaccccagcatggcttggaggcacagggtgaggcacagcaagtgcccccctggagcatgggagtgcccggggagaacaggaagggagagccggcctggtgtcaggtagtgggggctgggccgggcctcactctacagtagcgggaccccaggccgcgcaggctgcactctgagtcacggggcacctggacgggcactgggcaaatggccctgggccccacccttcctggctctggcttcccactgcctcctgccacctgggtagctctttgggaccactcccctgggcattactgctaactccacctccactatttcaccctcaagtggtgggtggggagacgaccccttctcagacacttgggtgggaaggagggggaccccgaagatctagcaacagagggtcagctgcccagaaggctttggaggctgttttttgttttttgagactggggccctgaattatctgcttagagagctgggccccagccaggccgctggggtgccaggcggagctccggggctgcctgcagcagggagaaagcctcactctgacctggctctggttggctcagggctcttgctggatctgggcccccacctgccctggcctccttggcttccccttccrcccaaaccccagagccctcctgcttctggcctttgagactgaaccagagctagctaaaaaattcgaacccaggccgggagtggtggctcacacctgtaatcccagcactttgggaggctgaagcgggtggatcacctgagaggtcaggggttccagaccagcctgcaacgtggtgaaacccccgtctctactaaaaatacaaaaattagccaggtgtagtggcgcacgcctgtaatcccagctactccggaggctgagacaggagaatcgcttgaacctgggaggcggaggttgcagtgagctgagatcgcgccattgcactccaacctgggtgacaagagtgaaactccatctcaaaaaccaaaataaaacaaaacaaaaaaacccccaaaattagagcctataagaggactgggagatggagtccttcccagccccgcctgtgtggatggagaagccgattccctggggaggagacagaggctgactgtgctgtccctctgtctgtctgtctttctcagcttcttgcccacctccggggtccccatgctgggcagcagtggacaatgagcccccctactttttttttttttgagacagagtcttgctgtatcacccaggctagagtgcagtggcacgatcttggctcactgcaacttccggctcccgagttcaagcaattctcctgcctcagcctcccgagtagctgggattataggcatgtaccaccatgcccagctaattttcgtattttcagtagagatggagtttcaccatgttggccaggctggtctcaaactcctgacctcaaatgatccacctgcttcggcctcccgaatagctgggattataggcwtgtaccaccatgcctggctaattcttgtattttcagtagagacagggtttcaccatgttggccaggctggtctcaaactcctgacctcaaatgatccacccgcttcagcctcccaaagtgctgggattacaggcatgagccatcgcgcccagccgacaccgagcccccttaaaagctgcaaggaagagatatctgagaaagccagtcattatggcactgtagtcatagcaaaatatgcaaacatttaaaatatccgtcagcagaaggctatttaaatgatgacgggatagccacgtggtaaaatactacacagctgttaaaaaggtcaaggttctgaacagaaatgaaatggactgcaaaatacattgtgaagcaaggaaggtgtgtggctgtgtatgtggttgcagccacttgttacaggctcacacatgcagccatttgtatcctcaggaaggacacaagaaattgcctttggaaacgggatggggacccggtgaagggatgggagacaatttatttttttctctatactcttatgtatttttttttttttttggagacggagtctccctttatcctccaggctggagtgcaggggagcaatctcggctcactgcaacctccacctcccaggttcaagcgattctcatgcctcagctccctgcctgggattacaggcacctgccatcacacctggctactttttgtattttttagtagaaacggggtttctccatgttgtccaggctggtcttgaactcctgaccttaggtgatctgcccgcctcagtttcccgaagtgttgggattacaggcgtgagccatggtgtccggactctgtgtactctggatattggtttttctttttcttttttttttttgagacagagtttcactcttgttgcccaggctggagtgcaatggtgccatcgcggctcactgcaagctctgcctcctgggttcaagcgattctcctgcctcaagctcccaagtagctggggttacaggcatgcaccaccaagcctggctaatttttgtatttttagtagagacagggtttctccatgttggtcaggctggtcttgaactcccgacctcaggtgatctgcccgccttggcatcccaaagtgctgggattacaggcgtgagccaccacgcccagccgacattgtttttttgttgagacaggatcttgctctattgcccaagctggagtgcagtggtgtgatcacaactcactgcagccttgaccttcctggctcaagggatcctctcacctcagcctcccaagtagctgggaccacaggcacgcaccaccatgcccagttagttttttagtgtttttgtacagatggggtcttgctatattgtccaggctggtctccaactactgggctcaagtgatcctcctgcctcagcctcccaagatgcttggattacaggcatgagccaccacacctggcctcattcttgacacttttgatcatgtgctgtatctgaaaaaaaattttaagggaaaagtccaaggtaaagggaccacttccaccctttaaagaacacccctgaacacctaaatgggccttggaatccccggatctcagcgtcagctgatgagcaaagcccctctccagcctcccctcctccccacagattccctctgcctgactcagctgaggcgagtcagataaccagatggaggtgcagccaggcttgtctggagtgacagatgtgagagcaatagagacatggccctgcccctaaggcctgaggaagggtgtgactcagatattgagcaagacagaggccctcagtcaccaggaggtgagcccctgtcaccacacttggataaccccgtgggagctgctgggcgcgcacaggacaggtgctcctgagggatgcccgtgcgggggtgggtatgcaaataggaacaagctttgcagagtggacggatgcttgrtattattattattattttaatattataaaatactttattaaaattcaggaagggttaggtcaggtgtggctcatgcctgtaatcgcagaacattgggaggctgagtcacttgaggtcaggagtttcagaccagcctgggcgatatggtgaaaacctcatctctacaaaaaatacaaaaattagctgggcgtggtggtgatgggtgcctgtagtccctggggaggctgaggcatgagaattggttgaagccagaggtggagactgcagtgagccaagatcacgccactgtactccagcctgggcaatagagtgagtgagactccatctcctcccaccccaaaaaaaaagtaaaataaaaaagtaataagattcaggaagggttagtatttttaattcagtatatatatacatacatatatatacacatacatatatatacacatacatatatatacacatacatatatacatacatatacatatacacacacatatatacatatatacacatatatacatatatacacatatatacatatatacacacatatatatacacacacacatatatacatacacacacacacacacacacacacacacacacacacacacacacacatatatatatatatatcggagttttgctgttgtcccccaggctggagtgtagtggcccgatctcggctcactgcagtcaccgtctctgggttcaagcaattctcatgcctcagcctccccagtgactacaggcatccatcaccaccatgcctggctaatttttgtatttttagtagagacagggtttcaccatattggccaggctggtctcaaactcctgacctcaggtgatccacccacctcggcctcccaaagtgcagggattacaggcgtgagccactgtgcctggccaggtatagaattttaaaaaaacttacattttaggttcaggggtacacatgcagctttgttatatggtaaactcatgccacgggggtttgttgtacagattattttgtcacccaggtattaagcccagtatccaatagttatttttcctgctcctctccctcctcccaccctccaccctcaagtaggccccagtgtctgttgttcccctctttgtgtccgtgtgttctcatcatttaactcccacttatgagggacaacatgcggtgtttggtttcctgttcctgcattagtttgctaagaataatggcctccagctccatccatgtcccacgaaggacatgatctctttctctcttttctttttttttttgagatggagtttcccttttgttgtccaggctggattgcagtggtgcgatttcggctcaccgcaacctccgcctcctgggttcaagcgattctcctgcctcagcctcccgagtagctgggatgacaggtgtgagccaccgtggctggctaattttgtatttttagtagagatggggtttctccatgttggtcaggctggtctcgaactccggacctcaggtgatccgcccgcctcagcctcccaaagtgctgggattacgggcgtgagccaccgtgcccggccttgatcttatgatattattaatactaaagataataatcaggttgggtgtggtggctcacacctgtaatcccagcactttgggaggctgaggtgggcagatcacctaaggtcgggagtttgagaccagcctggccaacatggtgaaaccccatctctactaaaaaaaatagaaaaattagtcaggcatggcagcgcatgcctgtaatcccagctctgtagggagctgaggcagaagaaccgcttgaacccaggagatagaggctgcagtgagccgagattgctccaccacactccagcgtaggtgatagggcgagactctgtctcaaaaataataataataataataataatcaccccagggacatttaatgaaggcttgtgctgggcatcaaggcctggaattctggcaacaatgagaggatcactcccatttccagaggtatttcaaaagggctgaacagctggctgtgctcctctgctaccaatcctgcatggcttcctgtggcctggtcaagcccagctcaccttgactatgggtgccccttgctccttgcactcttgccccactgccttcttttagttggctctgccacttaaaagctgtgtgaccttaggcaaattacttaacctctctgttccctcctctataaaatggagataatccatagtccttatttcacagactagtccagagccaacacgttagtaagtgtaaagcacttacaaccatgcctagctcaagggaagcccgtgtttgctatgatgtcattattacgccatatttcatcaaatctaagatgttggccagatgtagtggtgcacgcctgtaatcccagcactttgggaggtcaaggcaagcggattgcttgagatcaggagttcaagaccagcctgggcaacatggtgaaaccccatctttacaaaaaatacaaaaattagttgggtggatggtggatgtctgtggtcccagatactgaggaggctgaggtgggaggatcccttgagccagggaagttgaggctacagtgtgttgtgattgcatcactgcactccagcctgggtgacagagatcctgtctcaaaacaaaaaacaaaaaaaaactaagatgtcatcgattataaaaatgtcactaagaaaagagaatgctgccagttaacgatgtcccaaggttctttcatcactagaatttttcttttgtatttctcgaaagagctctgtttcacttaaatgtagattcttatcatatataattctcatgcacacataaaaaggataatagaagcaaaataaattggttaccatgttcagaaaactccttcacatttagagtccaacttgtttgaatcatttttggtctgagagtcgtgatgtctgtgtctgcctgccacctccttctctgagtccttgagagttctacrgagagcagtactgctccaaacattccataaaacagccaggcgctcttaagccagctttacaattgtgcagatgaagtggagccgagttttcactctgctctaggagtgtcactgacaggccgggcgcggtggctcacacctgtaatcccagcactttcagaggccgaggtgggtggattgcctgaggtcaggagttcgagaccagcctggccaacatggtgaaaccctgtctctactaaaaacacaaaaaagcatctgggcgtggtggcaggtgcctataatcccagctactcaggtggctgaggcaggagaattgcttgaacccgggagacggaggttgcagtgacccgaaattgcaccattacactccagcctaggcgacagacacagcgagactccgtctcaccaaaaaaaaaaaaaaaaaaaaaagggagtgtcactgacaagcctggttcccttcccctggggtttcccaccatttgagtcccagggctaaaaagggttctgcttgcctctaggatttcttccaagctgctgacactcttctgaaggatttgatgctggtgcttttcaggtgtgggtcctgacagtgatgttgggacggcagctagccagacagcaactgtaccatgtaaactcacttcagaggtgtagaatgggggctgcgtgaggcagctcatgccgtcatctcagcccttcaggaggccaaggcgggaggatcacttgagcccaggagttcgagaccagcccgggcaacacagcaagactctgtctgtacaaaaaacaagcaaaataattagccaggtgtggtggcacacacccgtagtcccagttactcagaaggctgaagtaggagaattgcttaagcccaggaggttgaagttgcagcgagttgtgatcttgcaactgcactccagactaggtcacagattcagactctgtctcttaaaaacaaaacaaaacaaaaagtgaaacgtgaacattaagcatcttggaatagataaaacatgcataatttccaatctttttgctgaccatgcttccagctgcytcagagcagttgcacattctgttcctgctgcctggaataccctcccttcctttccactttgccctgttaacccagccatccctgatctcatgcgtactccaggatgccttccctgatcatcctgccgaggtcaaatcccctccccttcatagcacctagtayggctacaacagtctcgagtgtatagaggatggggtggggtgaggtcacaggaatgatgctcccttctatctggggttcaagggaggcttcttggaggagcatctgaaccaggcttcccaggggatgtggtttgggtaactttgagaaatactgaagggaaaagaaagaacgctgtagtgagtgaagcctggcatttgggaagatgggtgtgtgggtgaccaaactcaccacgcaaggcccagagcccttttgaggccctygaaggtcccaggctggggtcatcctctccagtttcagtttgagaaaacaaggcccagagaggtgaagggctgtycggtcattgcccatggagccaggggagctgtgggccttccgccrccaacctctgggctagccctgcagagatgctaggaggatgcagggaggtgaggtgggggctgaggtaggactcagactgcccaggcccgcctgcacccggaaggaggaagctgcacagggtgtctgtggctggccccgggatcccccactcggggacttcctcttcctctcagggcaggtgcagctgccacagtgagacgggcaccccgacccgggcatggaggggggcaaggggcccaggctcagagacttcctgagtgggagtctggctacctgggtgagggggcaggtggcagcgggttggggaggggaagtgagccccagccaggggctggtgttggcgctggccgggggagggtgaggcagaaccaggccggaggggagggctgggttcaaatgtgggggatggagatatggtgtggggggctgtggtgagggaagaggggacagaggcactcagaggacgggtgagaaggggtgcttgggctcactggggcaggtcggaggggctcagggttcactctgctggtcggctgacccctctgggctcctcacaggcgctgggactggccgggctggtcggggaggcggaggactcggagggggaagaagaggaagaggaggaagagccgcccctttggttggagaagagattcctgcgcctcagcgatggggccctgctcctccgggtgctgggcatcatgtaaggggcatcgggccggggcggtggcggggaaggatctgagaggaggggaagcgggtgggcggagcctgatgctcagtgggcggggcctgagggacggtgggcgaggcctgttgacgggaggcgggtcctcgagcccacctccggctcatagtgcccccagctcccgagggggacctcggatgctcagaggccttgacggacctgctgcctggcgagtgtggaacctgaaccacctgtggggccgactgagggacttctaccaggtaaggggtctcgagggaaaggcggagacaggaggggaagaggagccccttcgggaaggcgcctcatatagtctgcctctctgcctccaggaggagctgcagctgctgatcctgtcgccacccccagacctccagacattgggatttgaccctctctcaggtgctctccccacccacaccctcctgcctctgcccccgcactactctaccttccccgccccagttaaccccttgtggcatgtgccttgcagaagaagcggtggagcagctggaaggcgttcttcggctactgttgggagcgtcagtacaggtgagccggcggtgggaaggaaaggttagggtcgagctttggcggtagaggagggagatcctgcaccagctccccttcctgtctcccctcagtgtgagcaccgggaactcttcatccgccacatccagggcctcagtctcgaggtccagagcgagctggccgctgccatccaggaggtactgagacggttcggcagcccagactggtatggcacctgggacgcccttgccacaccgcggcttccactgaactgctcttcctgcgccccaggtgacccagccgggggccggcgtggtgctggcactgtctgggccagatcctggggagctggcacctgccgagctggagatgctgtcccggagcctgatggggacactgtcgaagctggcacgggagcgtgacctgggggcccaggtaggggcagcaggggcatcgtggactcaggttggggaactggaggaccatcagtgcagccggttgtgcaccgcaaccccagaccacaaccccatgtctggtgttgtggttgggggtcgatgtgcagaggcattggataagttagtcctgacccttgacccctgacctacagcggctggctgaactgctgctggagcgagaacccctctgcttgaggcctgaggctccctctagggctcccgccgagggcccctcgcaccatctggccctgcagctggccaacgccaaggctcagctgcggcgtctgcggcaggagctgtgagtgtgcgcagcctgggaaggggactgagtggagaggggcagattaagcctggatgggaccctagccctggtggctacgggaggggtcaggcctgggaagggctgggggttgtgggcccccagaccctccctagactccccttccctccagggaggagaaggccgagctgctgctagactcccaggccgaggtgcagggtttggaggccgaaataagaaggctccgccaggaggtgcgctcacatgctccccgccaccgcggcattccctaacctccccgcacccggtcccattgcctccctcccaacccggctccttcccgtccctaatccctctggcccgcggctggctgttcccagctccacaccgtctggcccaggcccaggcgctgtcgggacaggccaagcgggccgagctgtaccgcgaggaggcagaggcgctgcgggagcgggccggccgcctgccccgcctgcaggaggagctgaggcgctgccgcgagcggctgcaggcggctgaggcctacaagagtcagctggaggtgaggcggagacggagccgcggggcggggcgtgcgcgagggggcgggccaggaggaggggcgagattgggtcccgagggcagagaggcaggttctctggaggggacagtcacaggtggagaaatgggtgaggacaaattcagggaggtggcgtctgggaaagggcctccagaggatggggcaggtgtaggggagtgggggggctgtgtaagtgatgcagccttggaaggagggctgttcccgggggggaggggcggggcatggacagaagggcggggcctgcacaaagggcggggccaggggcgagggagaaagtacctgaagagatcttggtgggaagaagatggaagggagtggcggggcctagagactgatggggtgcagggtgggggagggaggcagggtctgtgacaggctgaggggaaggagtttgggaccctcaggcgctggagtgcatgggggctgcgtggctaccggttctccctgctctcccaccaggaggagcgggtgctctcgggggtgctggaggcgtccaaggcgctgctggaagagcagctggaggctgcccgagagcgctgcgcccggctgcacgagacccagcgcgagaacctgctgctgcgaacccggctgggcgaggcccatgcggtaaggtagccagagtgatcccacttgggttgccccgtcaccccatgaccccattgattccctagtggtccctagtgattcttgcaacctctgctcttggtgacctctagtgaccctccgacctacacactcggcctggccatggtgtggagggcttgtctgacccttccctcacccccaggagctggactctctgcggcatcaggtggaccagctggctgaggagaatgtggagctggagctggagcttcagcggagcttggagccacctccaggatcccctggggagggtgagggaccccactggaagggctggggtgggggcttcctatgctttccagcagtgtactggggagagcctctgactccctcccttctcccaagcctctggggtgtgtatgtgaggagccaggcagtaaaggaggggtcctgacctcatctctcatcctcagcacccctagcaggagcggccccctcgctgcaagatgaggtgagggaggcagaggctgggcggcttcggacccttgagagggagaaccgggagcttcgggggctgcttcaggtgcttcaggggcagccagggggccaggtaagtcccctcccccagggtcctggccggcccttcccctagtccctccctgggcctgactgtccctctcgtatgccctcagcaccccctgctggaggcaccgagagaggaccctgttcttccagtgctggaggaggctccccagactcctgtggccttcgaccacagccctcagggcttggttcagaaggcaagggatggaggcccccaggccttggacttggctcccccggcattagactcagtgctcgaggcatcagctgagtgtccccaggcacctgattcagacccacaggaggcagagagtccccttcaggcagctgccatggacccccaggcctcagactggtccccgcaagagtcaggctctcctgtggagacacaggagtccccggagaaggctggccgtagatcctctctccagagccctgcctctgtggccccacctcagggtccagggaccaaaattcaggccccgcagttgctgggaggagagacagagggaagagaggctccccaaggcgagttggtgcctgaggcctgggggttgagacaggagggccctgagcacaagccagggccttcggagcccagctctgtgcagctggaggagcaggagggcccaaaccagggcctggacctggccacgggacaagcagaggccagagagcatgaccagaggctggaagggacggtcagggacccagcctggcaaaaaccacagcagaagtcagaaggggctcttgaggtccaggtctgggaaggcccaatcccaggggagagcctggccagtggtgtcgcagagcaggaggccctcagggaggaggtggcacagttgaggagaaaggctgaggcccttggagatgagctggaagcccaggcccgcaagctggaggcccaaaacacggaggctgcccgcctctccaaggagctggcccaagcgcgaagggcagaggccgaggcccaccgggaggcagaggcccaggcctgggagcaagcccggctgcgggaggcagtggaggctgctggccaggagctggagtctgcgtcccaggaacgggaggcgctggtggaggcgctggcagcagcgggccgggagcggaggcagtgggagcgtgaggggtccaggctgcgggcccagtcggaggccgccgaggaacggatgcaggtgctggagagcgagggccgccagcacttggaggaggctgagagggagcgccgggagaaggaggccctccaggcggtaggtcaggttggggctcaccgctggggttgggaagcagagttccaggctgttgggagttactgattccatcagcagctgttcagtgggtgcccagcactgagctggggctggagatagaaaggccaagtccacccctgccttccaaaggtgtgcctggcctggggcacagagccatgtccactgtgtgatgggggcgctgtgggagggggtgggactgcctagtacacatcttggctctctggctgcagcagtagactcacctccaccccaggcatccttctgtaaaacaggggtactattcctggccacctggggtggtcttaggaggaccttgggagacagtagctgtaaaggtctggttcatgctggcaagggtatgttgtaagtgttcaagcactggttattcagagccaagtgctacgagagcccatgggagggtgagctgatgcccaagtggaggcaaggaggctttaggaggagtgaccataatgtcactaggtggggaggacattttgtccagagggaatggcatgtgcaaagacaaaggcattaaagacgctcaggggctgggtgtggtggctcacacctgtaatcccagcactttgggaggccgaggtgggtggattacttgaggtcaggagttctataccagcctggccaacatggtgaaaccctgcctccattaaaaatacaaaaatcagccaggcgtggtggcaggcacctgtaatctgttacttgggaggatgaggcaggagaattgcttgaacccggaaggcggaggttgcagtgagctgagattgtgccactatactccagcctgggcgacagagcgagactgtctcaaaacaaacaaacaccatccaatgaaacaacaacaaaaaaagaatgctcagggcccaggaggaagggatgatgagggccagctttgaatgtgttggtcctccctccccaggcagggaaagccagggtagaactgtgtggggctgcgcttgaggag

SEQ ID NO: 97509 - DNA, 12982 bp, Homo sapiens
tttatttatttttgagaccaagtcttgttctgttgcccagcctggagtgcaatggtgcgatcttggcttactgcaacctccacctcccaggttcaagcgattctcctacctcagcctcccgagtagctgggactacaggcacacaccaccacgcccagctaatttttgtagttttagtagagacggggtttcaccatgttggccatgctggcctcaagctcctgatctcaggtgatcctcctgccttggcctcccaaagtgctgggattacagacgtgagccaccgcgcttggcctaaggactgttattaatgtgacccttcagattttgatcttaggatgtggaacttctgacatccaagggatctatagtactgataaagaaactccccccacagtgtgtagtgataaaatgacaaatgccacgtggtgcatctctttcattctcattggagtaaattgataagaaagataaacaatagccacacaagaaagtcaactttgtctaatgaagagacgctgcagcataaagcaaagacatggaaataccaaagggccagtaaagacaccagcacaattgcagggaaccgagatcacagaggagcatggcaggaaggaatgccattttccttggagcttttgattttcaaagtttaacggactcccggggcatctgtgagaaggctgagagtggatgtgtataacatgtcaacctctgggctacggattttgctgattcagcttctcattaacttagcaggctgatatccaccatgtgacattcattctttagatttaatggaacttccctaatcaattgagacactgacaccttggctggtaccaacatcagcagggattccagatgcagctaaaccaatagctggagagcaggtcaggcttcaacaaaagtccagatctgggaaacctagcctcttacacagatattttatataaggaagatgaatttcctgtttttagtacatcttagactagttgagcaatggattagtaataacaatttgcataatctggttctcgaacttgctgtaagaaatgatctaacagaatctacaaagcactggcagaaccatgctatcttttggccaagtagtaggcaaagatagagctgactttattcgggaataaacaacagcaaccacaaaaaagaatatcaaaatattatacaacataaaaggagagaaacttagcatgagaaagatagaggaataaatagaaattactacaggaaagaaaaaacacttttaggtttaggtctagacactttaaatgggaagattttctttccatctcaaggcagtaaaatcaaacatggtttttatcagtcaaggcataaaagatgatggctgggtgcagcggctcacacctgtaatcccggcacttgggaggtcaaggcaagtggattacctgaggtcaggagtttgagaccagcctgaccaacatggtgaaaccccatctctactaaaaatacaaaacttagccaggcatagtggtaggcgcctgtaatccaggctactatggaggctgaggcaagataatcgcttgagccagggagacagaggttgcagtgagccgagatcgcaccattgcactccagcctgggcaacacagtgagactgcctctcaaaaaaaaagagagatatgatagcaaactgagaagaaagaggaattggacaaaaggaaggcaacaacttgaggacactaaagtggcataactaattataaacatttagacgtttcccagacggtcatcaactgcaggaaatttaaacaatgaggtaaagaacaaggtagaaagtttctttcaaaataaagatgaagaagaagaaaagacatgaaaaccaacaagaaaaaaatagctctttatcaggcaacaaagatctggtatacagataactaatatttctgaagaaagaacaagaaaataaaaataaaactcattagttctattattattatttttcaaatccaccataccccattattttgggctacaagatatgttaaagactgaatggagtacatgtaattcactgtggttgtgattttgatccctttttgactatacttctaactgcttcgactttatagatttcactgctaatatttggcatagtatatttgatatacaaagagcacctataaatcaattaaaaaaaagaaaaatcagccgggtgtggtggctcatgctggtaatcccaacactttgggaggctgaggcaggtggatctcctgaggccaggagtttgagaccagcctggccaacatggtgaaaccctgtctctattaaaaatacaaaaaaatttgctgggcgtggtggcaggtgcctgtaatcccagctactcaggaggctgaggcaggagaatagcttgaacctgggaggcaaaggttgcagtgagccgagattgtgccattgcactccagtctgggcaacaagagccaaactccatctcaaaaaatttaaataaataaaaatttttaaaaaatcaagaaaaccctaatagaaaaagtgacaaggaaagtaaatttattctataaatatgaagaaatgaaaacacacagtaagtagattaaaaaaatatacctcgctatccatcaaaagtaagcccatgaaaatggtaatgacaatttttatcaattaagtcagtaagctttaaaaattataatatcctgttgaattaaagatgtgggaaaatagatactttatatatattatgtggaagtataatcaatacaatcttcctagaaagcaatttggcaatatatttaaagagctgcaaaatattcatattatttgaccttccaattaaataatattaaaaaccggaaaaagaaatttactcgctattgtttagaataaatatactttatatgtcataaggccatctctcatatattaacatatatatgtgtgtatacatatagatattaaaagatgggaaggggaatactcaaatttctgaatggctgacttttcttcttatattacaggtaattcattttattttttggatttctcaatagctaccaggtctccccaaataaacattcattacttttattatatatgaaaataaatgagcaaaaatggaataataaaaaataattcccaagtaatagtccttatggatgcaagttcatgaaagataaacaaggacctgaaatatttctataatataaattatacagtcgatccaataggaatcaacctttggatcctgttgatagaataaaaaccttccatcaccaaattttttaaaaaattacaagtgattcatagaagacattagatcatgagtaagtcctcaaaagttccaagttttcccatttttacactgcatactttttaccacaatgtgattgaaatagaaatgcttattatagtgaatatataaacaaagaaaaccataggagttacagatttttaaaaactgtaaatatctacttgtctgacttttatgtgtgtggcttacataaagattcaaaggctatcaccaagctgagctcagagataagttattaccattattattattattagactttattctttttaaaaatgtaaactaaatatccatctctgaaaatttgaaaataatctaaaattctaccaaaattgagatatatgtttaaatttatgaattcctaaatataaaaggagcagtgttgacaagtagcctcaatagctagttttgaagaaaatataataacaaaccttggttaaatttaattgcagtgaaagagaaaatatcattaatgaaattagacataagatagataatataaccagaggtagacttttaaaataaaacagtaattctctgctcaatccaaacagacctgcctcctaaatgagtcacttgaggtttggggacatcttaaaatgagaaattaactgaattatagcaaagataacgtttagcatttttagtttcatgattcaagttgcctaatgctaggaaggattggatatgttgtacctgatttaaacactagagggaagaaaaacaaagaaaaccaggaggcatgccagatccaacccaaggaatagcgactgcatgaagaagggaaggaagtccagcttcagagacagacctcacgaagcagccacaaacacggccctgggagattccaggtaacagcaaaaatagtgcttatgccttcttgagcagtgtctattacccatctcaccaccggttagttctaggcaaaggcaggtataaggagctcactatgaagatgaatctgtgcattaatggttttgcacatttttggggggagagcagattaatctgtcacccctcggtgctgatgggacaaaagctggttttactccttgctctcgtctccttctagcccccttctgtaagagtcgcttcctaacaagtaatgcttgcttttgtttttgtttttaaaacctgctcagaccttagtttagggtattttgggccatacaatgggataggtgttattaaagggaagagaggtagtttgggagtcatatgtctttagaagttgaagagggtagtggttactctgaagtagtgcaaggtcgtggggctgagagtttccccagaaacagaaacttaggtcttgggctggctctgccccctgaggtgacaggaccaggaaagagaaagtgtgtgagggtgagggctggagaccagggaggtggtcttggaagccctgttactagaagggcctgcttgagtgcttttctcagaggggaccattctgtgggtgtcctgacaccagattagaatagtgatgtctggatagcatgtgtgagagaaggggttctccacccatcttcctagacctcgtgagcccacaagttcttatctttagaaaatagggggaaatgctctgacattgcattttggctaattttggtgcccggatttcaaagctagcttcaatactatttacattccaatagatgatcaaggttaagaaaggaaataatctaaagaaaatttagctttatcattaatggtataacttaaactgtgaattataaatacaacttaaaattaatatagtcttcaaaagatctgtggaaacttgttttgttttccttgatttatttgtttaattaaacactggggcactaatgaatgatgaaaatatgaccaaaagtctaaagtcaagaaagatttaaactaaacaatgcagaaaggctagagaaatatttgacaatagtatttcatttcacaaatttaaaactttaatcttatttgataacatgttttcaggccgggcaaggtgcctcacatctgcaatcccagcactttcagaggctgaggtgggtggatcacttgatgtcaggagttcaagatcagcctggccaacacagtgaagccccagctctactaaaaatacaaaaaaaattagccgtgcatggtggtgggtgcctgcagtcccagctactcaggaggctgaggcaggagaattgcttgaacccaggaggtgaaggttgcagtgagccaagattgagccactgcactccagcctgggcaaccgacaaagactccacttcaaaaaaaaaaaattcttatgtccacatagatccttaatattaccttgggaagaagttaggagagggcctattatgcccatttttcagacaagataaagtgaggagagtgagtgcttgaggttcaagcacctgctcatggttagtgaacagcaaacaacatgagggtggtggagcctccagatctttccattactccacatgttagtgggatcacccaataaatgtcagcatccaagatgaacaactcgaagggaaaaatgaacgcattactatataaatgtatgactctgtaataaaaaaaaaatacccaaaacctgtgtcatgacatttgtcagtcattccagaagtgagtgtgtgaactcgatctggcacttataataatcacatttgcaaagagtttcttttgctgagtgtctgtaattcatttggttgcgggaagcttttctatggtagctcagaccaaagaccacatatctgcaaacagtttgyaggcacttgttttctccaatacatcattgaattctcaggtttcctgagggagaggagagaagtgaggaaaaagaaaggaagctaagaaaccgatttcatttrccrccaaactcaataagccacctcttcttgaggcatgtgttggtggttaccagtggggactggaacaagttgagagctgaacccactggggctgcgaggatgtgggtgaggacccagygtggcaagagttccaggcttcgacctccagctgcacagcttggtgatggccaagggtgcggctgcatttggaggcttctgtaaagaggcaggggtgccaccaaccagctcccttgatgcccctgccgagaaatgctaactggaaactcatggctggattgtctgcctcatcttgggttaacaaaagggtccctattgcttcaaccctggtcagttcagttcaaatctattgagcctccttatgcaccagacattttgctgggctctgcacatccagtagaggactcctggtttatgactctgtaagaagctagaartggccactccatcctaaaagyagaaagctgaacaaactgaaaaatcaactcatcatagggaaaactgctgcccccaaaattggaaggaccaacaaaaagttgaaaacagagaatcacaacttactagagcagaaacacaggagcagaaaccataatgagaacccrtgccagggtagggaaacctgaactgtaatggatgaatggctggaggcttcgtgtggacacatctgagggttaaacactccaggggactcagtcataagggcccccaacactgtttggggttttacctccaggascttgaccaggttctcacagagaagatgagagaaaaattcccttatgcttcctgtaggttgggggaggaaagttgccatttwaaactatgctagaacattctattttccctaaccaggcctgcgctcaagtggaattgttttaccagaccctaacctgttggggtttcattggaacttaactgacctgggccccggatgggaaatactcaacttcagtccactttagccatcctgtcccaccaaagattaggggactgagaagctcttgtgaggtcacagttcagaaacacaggctcagcaaaagactgacatctaataataggacgataggagactccccctcctcccatacattaccgttgccttaataagggcctatttactgcagtttgttttgcccgctacatcatgtgcagctagcaagaaaatagtacaagccatcctcaaaggcaaataaacaaacaaactcagcttgaggaaatagaccaaatatcagaactggagttaaatatggcaggaatattggagttatcaaactggtaatttaaaacaattatgatgattatgctgagggctgtagtggataaagtggacagtatgcaaaaacagacaggcaacgtgagcagagagatggaaatcctgagaaagcaccaaaaaggaaatgctagagattaaaaaaaaatgccatacgaggaatgaagcgtgactctgacaggcttattagcagactggacgctggaaaagtagatgttctcaagctggggaaagaatccctgtgcttgaaggttattcaacagaaaccctcaaagctgtaaagcaaacagaaaaacagactgagttaaaaaaaccggaaaagaatattccaaactgtggcacaactgcaaaaggtgtaacgtatatgtaatacccataccagaaggagaagaaagagtgaaagaaatcattatataaaaagacatctgcactagggtgtttatcacagcactattcacagtagcaaagatatggaatcaaccaaagtgttcatcaacagaggactggataaagaaaaatgtggtgtatatatgtaacatatataatgtatatgtataaacattatatacatgtatatatgttatacgtatatacattgtatgtataatgactgatatgtatatgactgatatgtataatgactatatgtatgatgactgaaggccattagcctaagtgaaataactcaggaacagaaagtcaaatatcaaatattcttgtaactgggagttaaacaatgggtgtgcatggacgtacagaatggaataaaggacactgaagactaaaagaggtgggaagaagggaggagcataagggttgaaaaaccatctattaaatacaatgttcactatttgggtgatgggtacactaaaagcccacacttcaccattatgcaatatatgcttgtaagaaaatgtgcttgtacccccataatatataaaagtagaaaatatatatagaaaacaaaagaaacagaagatatttgaaaaaataatgatgggaatttcccaaaattaatgtcagataccaaaccacaggtccaaaaaactcagagaacaccaagcaggataaattagaacacacacacacacacacacacacacacacacaaacacacacacacacaccctttacctaggcatattattttcaaactacagaaaataaaaataaagtcccaaaagaagccagaggaaacagacacattaactatcaaggagcaaaggtaagaattccatattacttctcagaaacaatacaagcagggagagagtagagtaaaatatttaaagagttgaggaaaaacaaacaaacaaaatgccaacctaaaattctataccttgtgaaattatctttgaaaactgaaaaagaaaaaaaatgctttcttcaacaaacaaaaattgaagaaatttgttgccagtagaccttccttacaaaaaaagtcaaaagaagttccttagagagaagaaaataatatgtcagaaactcagatctacataagaaaggaagaacattgaggaagaaataattgaaggtaaaataaatactttttttattcttacctgatttaacagaaaacaatttgttcaaaatcatcacatcaacgatgaattcaattacatgtgcttatgtatatgtcttatatgtattttatacttaacatatgcgtgtgtatgaatgaaatcaataacatagatgaatcaagagacaagagggaggaactgggtgacatttgaaaccagacttggattagttgtaaatgtatattgcaaactttaggatagccactaaaaaaagtgaaaaaggaattttaactgataagaaaggggaaaaaaaaagcattatacaaaatactcaattcaaaaccatgggccaggcatggtggctcatgcctataatcccagcacttcgggaggccaagaggggtggatcatgaggtcgggagtttaagaccagcctgagcaacatggcaaaaccccatctctacaaaaaatacaaaaattagccaggcatggtggtgcgtgcctgtaatcccagctactcaggaggctgaggcaggagaatcacttgaacctgggagacggaggttgcagtgagccgagattgcaccactgcacagcctgggcaacagagcaagactccgcaaaaacaaacaaacaaacaaataaaaaacatgaaaggcagaaagagtgaaagacaaaaataggaatgcagctgggtgtagtggctcacacctgtaaacctagcactttgggaagccaaaccaggcaaatcacttgaggcctgaagtttgagaccagtctggccaacataggaaagcccttttttctctaaaagaaaaaagagaaaaagaaaaaaaaaaagcaatgcaggacaaggaagggcaataaatagaaaatagtaacaaataagatagatactaatctaactatataaacaatcactttgaatataagtgctttatatgcaccaatgaaaacacagagattgtcagagtggataacagaacagtagccaactatatatcatctacagaggtgaagaaaacagggtcccttcccttggaaacctgacatcagaaaatgtttccaagggttcccctttttccaatagtgtgtgctatagagtgacggtggttctctctctgcctctgtcctttaggcacccacaccctgaggaactgcaggcatcacactttagcagtgatctagtgtccagagtcagagacccagagaaattaaaaatctcattaaaaacaagcaaacaaacaagtattctccccttgtaaatgttctcgttattattgtgtcctaacagtaactgtaggatttactctttgctgttggcttggccttcagggtaatttatcttgcatcgtctcatagattcaatcattatccttgaaacaataatgaagtgggagttaggagaccccaaagatgcttctctgtataggagtgaaaaccctggtggcagcagcaacactggtttccttgctgttccttgatgaagccaagcccactcccagccttctgcatttgtttttgttttacactctgcctggaatgatcttcccccccggcacaactgtgtgtcacttaacaacaggaatccacattctgagaactgtgtcatcaggcaattttgttgtgtgactattgtagggtgtacttacacaaacctagattttatagcctactacacacccaggctatatggtgtagccattgctcttagactataaacctgtatagcaggttagtgtagtgaatgttgtaggcaattgtaacacaagagtatttgtgaatctaaacgcagaaaaggcacagtaattggatatgcagtctgctgttgactgaaacatagtatgtggcgcatgactgtgtacacatggatagctctgaaggaaggaagagtttccaaaaagaggcaaccacagctcatttgagtgaagcctgttgtgacacagcatgggttgaaagtccagacactcaactcatcatcttaggctctgtgcatttgctaaacaatctgactgcattgcatcatctcagatgcctcacaatctctggtgaagccatatgcttcttcttgggtgtcgggtcacccctttatctctgtatccatgtatactgcaaattccttctttactcgccagttcctcctcatcttatagctccaatgtagcttcttccgtaaaggccttcctgctcctctgcacccctcgccatgctatgggtgtcctgatgccttctctcggctcccccgatccctgggcttaccctgtcacagcctgacactccagctgtcgatccctggtatgtgtctgtctctctcttccactgagtctgagaggacaatgctttgtcaccagagtctgggacaaaaccttcaccaagggggggagtctgtaaatgcgcaccaacttcaataactgcatcctcagcgtctttgggaacacagtggagatgtacctaattcatcctgggaaagtaaaaatgggagggagacatggaggcttaactcagccttaaatgaatgaataaataatggccaggcagtggggagttgggaggagcttggaggctttacctaccacagtgaaagtcctataactatatttcaccatgattttccggtagtctaggagctccccagagaccctggcctggggtggatcctgtgtggtcacgttcatagaccactaagaacaaaggcgccttcctccatcatttccaccttgctgccactggagggagaccccagcccatttatcacgcccattcctgcctcctggaggcccctcccttcatctgctcctgcctgatctcctgagtggggaggctcgggatttatggcaacgctggtgccaaatcgcagaattgtcctaaagcccagctctctgaataagtgatagccttagaataatactaaccacattaaaaataatgtattgctactttttgcctagatcttataatataccagagaccgtgctgcgtgttctataggcacgatctctctgcactctcacaaaagccccatgacatgaacacatttgttatcccaaatttgtcagatggaaaaagaaaaagtgaggcacaactctattaaatgccttgtctaaggtcaacaagtccgttagggttggaactaactgacgacagacgaagccgtcctaacccctgaaatctacaagtagtccaggaagagggggagaagatccctttaggtgtgaaggaagaatggactggaaagtagagaccctgagatccaggacggaaggagggaagaggctcgcttgactgtcataagcttcattttgctgaaacagaccccagaaagggcagtgatgagagatgaggccacaatacaggtaagcaggggccctggagtgccaagcctgtgtgccaggatgaagagtgccgttctatttcaaaggaaaggggaatcctgcaagtgttttaagctgggaaagataaaatccagtttgtgttttgtgaaaattaggtgagtttctgggtggagaaaagacaggcaggggacccagtgctggtgagaaatccatgaggaacccgcagcaccatcttaatgagagaaggcgaggaccaggacggggcagaggccggggatatggaaagcaggggacatgagacctctctagcagggttgttgagcctccacactgttgatgctggctgggtaaactgtttgggggaggggaagggcagaccgccccatgctttgtaggatggtcagcaggatctagcctctacctgccagatgccagtagcacccccaaatgtgacagccaaaaatgtctcagacattgcccagtgtcccctaggagacagaattgcccttggttgagaaacactgctgcagcgatgtcacctagcacagtcttccagatagaaactgaggccctgatttgggtgacagctccaccccttcctagctccatgaccttggaagagacgacttcatcccattggactcttttgctcatcagcaaagaaggacacagcgctttcctgagaatgtgcctgtgaggctgaattagac

SEQ ID NO: 97510 - DNA, 13271 bp, Homo sapiens
tttcatgtgaagctatgtacagatatgaaaagacgtctaaggtatttttaagtgaaatgagtacacacacacacaaataaatctgtcttatatacagttctgagactcattctcaatactcacatatacactggcataatgcttacaatttttctagaatgatatatagataagagagttaagagaggttactgaaggcttaagatgttcaaggaaagcaactaatttatccaacctgacgacagattttgaaagcaaagcacatgggaccaatagagcccctgatctctcaggagctggtaaagaactctcggaagaataggcaagaaagcagctcactatgtaaaaggagtcttgtttagaaaaataaaaggcagtgggcatggggagagagctgttgagtcaagaagtactaatagtcaagaaggaaccaggtaccagcttcccaagttcagttctcttctcatctgagactctagtagcaagagagatggcagctactcgacgaggctgggtcacagcaatgatgccctggcggctgatccctccttcatacaggtactgagggatctgagttgtcttcccagagccagtttcccctaggagagagggggaaaaaaaaaaaaggctcactgaaatgcaaactggggctcggcaccagggctggcacctataatctcagcactttgggaggccgaggtaggaggctctcttgagcccaggagttcaaaatcagcctgggcaacatagcaagaccccgtctcaacaacaacaacaattagcctggtgtggttgcatgtgcctgtagtcccagctactagggaggctgagacagaaggatcatgaggcccaggagttcaaggttacagtaagccatgattgtgccactgcatgccagcctgggagatagtgtgagacactgtctcaaaaaaaataataaaaataaaaaaagaaatgcaaatcggctgggcacagtggctcatgcctgtaatcctagcacgtggggaggccaagggaggaggatcacttgagcccaggagttgctcctgggcaacatagggagatgccgtctctacaaaaaatacaaacattagttggacgtggtggtgcacgcctgtggtcccagctactctgaaggctgaggtgggcatattgcttgagcctgagaggttgaggctgcagtgagccatgatcacaccactacactccagcatgggcaacggaatgacaccctgtcttagaaaaacaacaacaacaaaaagcaaattgacataaatttcaccaaacaaacagctcaaagtcagaagtaaaagataaaataccctgtgttggtaaagcctcaggagaatgggcattcaggtatgtatactgctggtgaaattagctggttaattggtattgtttctcaggtggtcaaattatgttttttaaatctttaaaatgtttatatcccttgacccacaattctacttgcagaaattgattctaacaaaataagtaaacatgtgtataaagatacagcttcaaagagattttattcaattttgctcctgacagaaaaaaattggaaacaatataaatgttcaaaaggtaatttacatagttaaaatataaaataaaatacaaccgttacatagatttctgcatactgactgacatgaagagacatccattcatgcactgctgccttcaactcctggccactccccagcctgctgcctcccttcaaaccctctgcctctgcccacactatgggcagaacacctgccctcacactgcctgcctcgcaaactctaagatgagttaggcctcaaacacgctcccctggctgcacagtggccctcctctgggctccgtagtgccttgttcatctctcttccagcactgaccatcctgtgttgtacagaagcgtttaaatgtgtccgtcctcctccaacaccagaagggaagctcccagagggcagtgctctgaatgtccctctcgtgtacttgagtattttgcatacaataagcacgcagtaaatgttacttcctaccctgtgtgaattcctttaacagtgcctgattagagcaaagaactcagtaaacctgcgcttccttcccctccctctagctaccaccaggcctctctgacttcaaaaagtcctccagtcccatgatttgtgggtttttttccctgtcagtctgtcagccccctctgactgctcatccttcctgacccagataagaatcagacaaaggatttgattattctgcaatcttcctgctgaatccactaggcaaaaccccaaactttgatccatgtctctatctttcatgctcctataccagggcaacagagcgttgctaaagtaaaatacaaaatgcttggaaccagaagtgttttgaactttggattctttcaagttttgtaatatttgcattatacttactggctgagcattttaaatgtgaaaatctgaagtcctaaatgctcccaaatccaaaactttttgagcatctgatatgacactcaaaggaaatgctccttggagcccattcttgacttcggattttcaaatttgggatgttccacctataatctggctgtgcagaagcaaacctgagtttatagtgtagccgaaatgcacctaggcaccactactgccatcgatcttttttcttgtttttgcagcctgtctcgtctccatcctccccaagggcccacttgaagcccagtgactcccattctgagcagggctcctgaacctgtctcacagaagtggggttctaaaatgtggtctctccctaactgcccctagaagcccttctgcagtgcaccatccttacatccgttctctagccctgcagcctcttagccttcctcctcttccagaccagccctgcatctagcccttgtggccaagttcccccgtcccccatgcctcctgatctttgctctgttagctcgattctatcttctgcctccctccctactgagttcttcccctcaacctctgaatacagatggtccctgtcttagaactgtttgacttcaggatggagcaaaagtcaaaatcgtacagtagaaactgtacttttgagtacccacacaactgtcactttcagtatggtattcaataaattgcatgaaatattcaagactttattataaaataggtttcatgttagataatatcacccaaccataggctaatgtacatgttccgagcacactgaaagtaggctgggcatattaaatgcatttccaacttaggatattttcaacttatgaggatgggtggattcatccacacataaccccatcctaaatcgagcagcatccataaagtttctctcagcttccctcctttttcctcaaaacagaagcctcttccccctgctttcagccctcagctcaatgacaaatcagctgttacccacacagctttgttgaaatagctctcgatgggatggatccacgatcaatagtgtcagagatagtctgtgaaagtcatgaaaaattttatgagaggaaatgtatgcaagaaatgttttacaatttaaaagtgattaggcctcctgaatgctttataaaatgtcaccataactcttagctgtagaacttgcctgctttgcagctaggtaaaacctaggacacatggagctaaatgctgaaataagccagaccttaactgcacttctgtctaagtcctaggctgtacacctagcacataattaaaatcccgaacttaccaaggttttcaacaaaggtaaaggttgctaaaagttaacagtgtaacatgtatttaaaactattgaagagacactttatgtgcaaggtgtgtaaggaaagtaaagtacactttcggtaaaaagattatcaggagggataagaatgcacatttttacctacgttaaaaggttaaataattgttttgagggggccaggtgcggtggctcacgcctctttctatatcaaccaatcgggcctagtaaaaagcgctgctaaaaaacgtaaagaaaaggctaaaaagctaagggagtaccaaaaccaccaaatggactcttggtttgaaaacaaaatcatagcatgggtcatcccattcctgggccctctcctaataatatgcctggaactaatgttcttaccctgcctaattaatctttttcaaagatttttaactgacaggatcatggcaatttcacaaacaactacccaaaaacatctacagacggcattgctcctagtcaacccgagaccaggaaactctccatcccctcgttgcaggaagtagccagaaagaacatgccgtccctcctcctttttataactatagggtctggattgacaaagcaggaacatcaccatcttggacaagcccctcattcaaaagttcaccttaataaaaaaccgcctaaatccaaaaggtatcagcctaatggctaaggtcagcacgaccataaaccacaaataacatctccagccagaaacattccaaactcctccccgaccagagacatgttaagggataaccccactctggccgggaatatgccagccgggaatatgccagccgggagataaaccccctcgggccggaaaaatgtctgccccaagataacatcccctgctcccaaagagtccaaccctgccaaaaacttctccacacatataaacattccaagcttgtgataagccccctcaccctaacaccaatatatactcttagtctgtaagagaaagggctcctgaccgaaatcggccaggagcgcctctcaggttttaactaaagaaaagctgtctttaactgccagccgcgtttcgtgtttctttcctttttctttaactcttacaaatagctcacatccaaatccagtgggcatcacatccaagtccagtataaccggacttgactgctgcatctgctcactctctattcctttgactagcagcactcatgggtctccttcctctctttggctgctcatcctttccgtccttcagtatctcctctaacacgttggggatcataagccccatgaaatcagtccctgccccacaactctgcctcttttcatgcaccagaaactacaccttccctttcgaccggaatgtgttcaggttcccatctctcaaacgggctttcccccctgcctagaatgccctccctcccacacgacctccccagccgcctcctcacaaaccgggtcagatccactcttctaagatccgcaagcccccggtacgtttctctacccttttacgcggaaggtgagtctttgcctacacacgttggtcactctcaccgggctgtccagcgcctccagggcagggctgccggactcttcttcgaggcccctctccaggtctggcccagaaaaggtattcaggtttgttgaagccacgaacgaaagggattgagaggcatgtaagaaaaactgctctagctaagccacggacgaagtgcaaggaagagcccgccggcgcggccactcaccgatgaggaccgcgttgtccaggtttcggagctgggccaacagttgcccccgcgcttggaagatgggcagactccggcgctgcagctccacagcttcagggtagggactggccgagggctgggccaggggcggctgctgcctccggcctcctcctcctcctctgccgccgctgcccgcagtcagcagcatcaccacttgcctcccgggagggaaggacccagcgcggctcggaggtccagagcctggccggaatctcttggccggcgggaagcccgcctcctccggcatgtcgggagggcaccgcggcgggaggcgcaagcgccgagagctcctgccccctctcaggtgcagacaacaggagcacaccgccccttcctcgccgccacgtgctggcggctcccggcgaccaccgatgacctcacggccgccccagtctttagaaaaagggactgcatctcccagcatgccttgggggcttgggaaggctttcacttcctgggggtgggaaaagcagggcctgaggtacaaccaggaaaaggcccggagctacaaccgggaaacacaggatgtaaggttccgtgggactgtagtcttggttaacgaggtttttctcattgttttattttttttttttgagatggagtttcgctcttgttgcccaggctggagtgcaatggcgcgatctcggctcacactgcaacctccgcctcctgggttcaagcgattctcctgcctcagcctcccaagtagctggggttacaggcgtgcgccaccggggcccgtctaattttgtatttttagtagagacagggtttctccatgttggtcaggctggtcttgaactcccgacctcaggtgatccgcctgcctcggcctcccaaagtgctgggattataggcgtgagccaccgcgccccgcccattgttttgttctagtagcattacttcttttcagtaaacccgcgttttccccttctctgtccaaataacagtcactcttcaaggaaagtacttaattctgtaaaatcaatgagaagcgcaaacgtgcattgtctaatcctctaaacaacttataagttatgtggtatatactggttattagattatctctaatttacagattaagaaattgagtcatcttagtcattcagatgtccccaaatcataattttgtgatcatcttgtgttacagaaaggaaaaccaattctgatatacatgaatttaactcagaaaatgactcctccaacggatgtggtcgcctccagtaatacaagcagagaaaggagggagttcaatgaaattaaaattgtcttttatctttcctttcccccaaccattccagccagactctcaagttctctacatggctgtgcaaccccatcacagacacttcagtgaagattcagaactgcagcagaaaaaagtaggattataactagttcttccttaccctcctaaaagttcttagatgatttgctaatttaccacggagaatgccaagtagctgtttgctcttacaggaaatgtgatttccagagwatacaccgtaagcttcagctcatgtgaagggtatcttctgaagctcgtttccatgaaactcgccctgttaaatatctcccttcccgtgattcgtgagagagctagtctaaaaacaaaaaacctcccctttgcyccaggtcggagataattttcctctagttgctgacagtttggtgaccaggcattactgaaaatgtgcacgttgaaccagcagcagatttgtgtttaagaataaactgacaaattttcacttcctaccctgaaatatttagaaaggcaacccaaaactacaagggataataaatgttaactctcaaattatggactttgagtaaagacatcccagtcctttttcccagtgtgctttccagagtaacttaaggtaggagtccgatgttccaaatgattacaataatttaggtaatgtaaatgggtggacttatttcttgatggagcacattccacctctacatgcagcccctaatcatttctaggcaatggctgtcatgtagacctattattgccagatcttccaattttctcaagaaaagccaaaagtgaagatttttatctgtcaatgttaaatacaggtttaaacttaaaaaaaaaaaaagtactgtcaaaacaaagcacataggtaggtaacaaatctgtaggtaactcatccataatctctggcctaatgatccagctattctatagcctcaaagctaagaggaccaaagagtggaaaaattaagtcctatatatgcatcaagccatgctgctcacatttctcccattggtagactgaaatctgctgtttctcctgaagaagtctcttggggttcaccagctttcatatgtagatactgacaagctaataactattcagagaatatcctggttcttccttcaaacgacgaagtgtcagacacatttcatttttaacttgtctgggatggtctgtggacttaactggtctgatcacgaccataacagctggtggtcacctttgcttttccgaccaccaaattactgcccttgatcatgttcagtttccctctatcccactttcagagacaaccacaagcttcagcaactaggctcaagcttgcatgcatacactttaatccctctataattaaaaataccagataatactttgctgatcaataaacaaaggtatttattcagcacccatgtgccaagcactgtgctaggcactgtggtggatacaaaaattaagacatggtccctgcccttaaggagcttacattctcatgagggagacaagactaatatacatgtaccagctaggaacagtacaagacaatatataatttggcgttaagaatgtcatacagacttgaagctttatagggattcagagacagacaataaaataggccttagagtcaagattttttgaggaatcaggaacaaggccaggccttgaagaactgaagagacttaagttgaggtccctgttaggtagaagtgggagtaaagttaagaaaaaaacaagtatgcatataatgtaggggcttactaagaagtcactgtggatttctgagcagaggagtgacttgatcatacaagattcaacaattttattgcaaactcataaaatatgtttaagtagcctggagacatcctacagaacacagaaaataatggcaggatcatgactaacaacatagctggaactcacctgtcaaagaaaaacagctacaacataaaacactggcaggatagatgacaatagttctaggaagcccattactcaacatggcaatagctccaatgcttccttattttcagaggccccagagactgagggtttcattatccagacccaggacttaggtgttctgcttctagagactacacaagaggtatgaaagatatgaggacatacaagagtgacacagaaaaaacaagaggaagagagaaacaaatagaaatccatactggaaaaaaacgcaccgaaatgtatataaaatgtatctcctaaggagatgcaatttgtatgtccatttatttttaaatgaacgtataccgtatttccataacaaacaaaaaacactatgctttagtcaagtgtgcttttcagtatcactagaagaatccaggaatccctcaaattatgtgtaaggttagttggttggtctcaaaattccatgtatcaaatctcactttcagtttatttgcattgtgaaagggaagtgtgttctggaagaactaagattgagaggtaaattggggagaaagtaaggacttttccttatgtccattcaagcacaggtatcctgtcaagcaacacagggctaggaatggtggttgtagggctggccaaactgatgagaggtgattgaaattaccactgctcaggacacagtgtagtcagtcacacagcagggcatcctgccactgggaacttgcaccctataaaatcggagaaatcaaaaaccctgtaactgcctgcctttaggctgtatattcaaaatgtatttcctgttttacctagtcattaatgtatacagatattccctacttaaatgaacagtgagttaacagattttaggattagtattttaccacaaaaatgccattcattgcataactccaactcagggagaacaaataaaactagagaaactcatttctagcccaaaaacaatttaaaaaaaaaaaacaaaaaacaaaattctaacaaacgtcactgataaagcgttcttgagcaaaaacaagataggataaaacttaagaatcccataaggattatacatgctaagattggcttttaaactttgaaaaccttttttaaactgcttaaaaagcagtcccatagacccaggttccataaaattgcaacaatcatattcaaagttattagcaacatgtaaaatacttaaataccattagttatgcaattccatttaaagacattaaaacacttttcacttcaaaaacaatctgaaaattcctatttaggatgtccattatgtttaagcctatgtctatctttctgaggacaatgtcacattctggaaagctaccccttaacaaaggttgaatgaactactactaacaatccacttttgggaaagggacctgtgcctacatgccgttaatgaaagctgtttggaatcatctctttcctaggggtgctctttcgactcttccaggttctggaagttacttaagcagtgtgaatgcaaacctgctgagactcagggaagacttaatatttaggggaagtatttattgaaccacagcattaagtgtctacttctgtggaccctgtctaatttctacctgattgggaaggtaatccaggtacttggctctgaaaaggttcttgaattttcacgaagcaaatgactaatgttaactagccaaagaccctggaagaacatatgcctagctaactggtatctgttcgtctggctccaaagtcaacattctaacttggtttccaaatctaatgaaaatctgagaccctgtctctattttttttttttaattaaaaaaacaaaaaacaaaacaaaacaaaaaaggcaaaaaaaaaaaaaatggctgggcatggtggctcatgcctgtcatcctagcactttgggaggctgaggtgggaggattgcttgagtccaggagttcaagaccagcctgggcaacacagtgagaccccatctgtatttaaaaaaaaatttttaattaaaacttttttaaaaataaaagaaaaaaaaagtctaatgaaaatcttcctagttttacaaaaatgtggcccttaccaatctttccctggatacttcttaatggagaaatgtaagtaaagcaaataagatgccacattagcttacagctgactttcctatagctgaattcctactgctacaagaaccatcctccctccttttttttcatgttgtctgacaaagtttggcaaaacccagatgcaaaacaacctatccagatgacagaaataaatcatcttcctgctgaatcttgcattctgagttagtaagatgtacacaaccacagcatgacagccacgtatttccaatcctgaaatgaaatccagttaaaagttgtgaagacacaggaagaacagctgtgtaaactgttctgagctcagatctacgcaggagggctacaatacattatcagaatttaaaagatcacacacaaaagctttaatacagtgagagaaaaatggaattccgttttattttgtcctctctgaaacttccatttacaccatggcctcatctatcaagaagaggaagaaaaggctctgccttataccataaaaatcaagtactcatgtacttgttagaggtggcaggatatttgtttctccagttttttggctctaagaaattacactttcagtaccagtgtagtgaggaaccactggcaaactgttggaaatgtcttctggattagtcagtgtaccatttcataaagtgcttctggagttaaaatctgccaagctgtcaaaagtgtccacacttttgcaacaaaggataaaagatcccagtgggtatcaccgagtccttcccagctgggtctcattattggcactgctgctttaacctccaagccgctggccctcaccccaggcgaagcctcctggccgttcctcaggtagtggattgtaatttggatcctcatctggtgtatcaaaaatagctttcctaaaagacaagcaacagatataatttggtcccagagtcatctcaggtccaaagtactacaaggtcagttcaggccccatagggtttccaccaataggtaagcattacacctgcctgccaattaaacagttaacatattgtaagagcatctataattattaacatttacattagcttttatcttttactgatttttactacaaaagcaatccaaatcataataattacagagaaggaggaaatagagatgagcaaaatatcctcaatttccagaggtaactattgtcaatgttttagttattctttgggaatttttacattatgtcattttacaaaagttagatcacactacatgttttgtaacctgactttcacatatttatcattaatgtttccccataaccaaggtatcacccaagtgtgcatcaacaggtgaataaacaaaatacggtacacacatataatagaattttttttttttttttttgagacgggagtctcactctgtcgcccaggctggagtgccatggtgcgatctcggctcactgcaacctccgcctcccggattcaagcaattctcctgcctcagcctcccgagtagctgggattacaggcgcccgccaccacgcccggctgatttttgtatttttaggagggaaggttttcatcatgttggccagactggtctcgaactcctgaactcaggtgatctgcctgcctcggcttcccaaaatgctgggattacaggcatgagccactgcacctagtcaacatggtgaaaccctgtctccaccaaaaatacaaaaattagcctggcgtggtggcgcatgcctgtaatcccagctactactcaggcggctgaggcagaagaatcacttgaacctgggaggcacaggttacagtgagctgagactgctccattgcactccagcctgggcgacagagcaagactgtctcaaaaaaaaggaaggaaattcaggcacatggtacaacatggatgaaccttgaggactttacgctaaatgaaataagaaataagccagacaaaaaaggacaaatattgtatgattccacttaggtacagagtagtcaaattcagagaaagaaaatagaatggtgatggctggggtggggagttgtttaatgagtacagagttgtagttctgtaggatgaagagagttctatggatggtggtgatggcagcaaaacagtatgaatatacttaatgccactgaacatttaaaatgagttaagatggtgaattttatgttaggtattattttaccacaaaatttttaaaaaattaacaaggtatcccaagaaaaattactgcagaacataggaggggatagtaaatgtccaaaagactccctaagtactatgatgtagtaattcaaaacctcactaaagaaggaaccattaaagcagcatcctcaatttgcacttatatttctacttgtaatcctccacagttgataaaattagaaatgtatctgaaaacttctgatttatactggagtcagaaaatagtataattcaaaatgagtttttaaaattcttacaaattaaca

SEQ ID NO: 97511 - DNA, 13177 bp, Homo sapiens
cacctgcctccactctctctcttgctcctgctttcaccatgtgagacgcctgctcccgcttcaccttccatcatgagtaaagcttcctgaggcctccccagaagcagatgctagcactgtttcctgtacagcctgcagaactgtgagccaattaaacgtcttttcttttcttttttttttttttttttttgagacagagtctcactctgtcacccaggctgaagtgcagtggcaagatctctgctcactgcaacctccacctcccaggttcaagtgattctcctgcctcagcctcctgagtagctgggattacaggtgcccaccaccacgcctggctaatttttttttgtatttttagtagagacggggtttcaccatgttggtcaggctggtctcgaacttctgacctcaagtaatccaccggccttgggctctcaaagtgctgggattacaggcgtgagccaccttgcctagccaaatgtcttttcttataaattacccagtctcagctatttatttatagcaatgcaagaatggcctaacacacctaaaaccaatcctggtggctgacactgaggaagcaaagccacagtttggtcggaggatccacatacacctctgtgatcgacagctttgctccttcacctggagctgttgcttccagatgtgggatggagcggtgcaaacacatgtgcagacacctggtgtgcagcatgacactctacaaacatctgcccaataggcttctcctgaggacagtcatgtttattagcaaaagctctggaaaatgggactagcaaattggaaggagtcacttagaagctggcagacagacgacctcagctggagtttcctaagtgctagtcactgcatgtgtggtagacagccctcctatacctatcacaaccccattgccaagtgggcagagctgccctcatttcaaaggagaggacactgacactttgagaatgaagttacctacccaacatcacacaactaggacatcctggtgccaaaattcacacttcggtctaatgccaaaacccatctttattttgctagtccagacagtgagaattaaagggctgtgtttaaatgtggcccacagacatgtatataaatacctaattttcttgcttctcctgaaaaaattcttaagatctagcaacaatcagctagaacaacaacaaaaacggttccagttcattccacctgccttaagtttcctgctcctgaaaagactgggtttgtgaccatcgcaccatagtctacacactgtcatttatttatttttgagacagagtctcgctctgtcactcagcttggagtgcagtggtgcaatctcggctcactgcaacctcggctaactgcaacctccgcctcccgggttcaaatgattctcctgtctcagcctcctgaatagctgggattacaggattaacttgcccagctagttttaatatgttttgttttttggagacagagtctctgtcatctaggctggagtgcagtggcacgatcttggttcactgcaacctctgcctcccaggttcaagagattcttgtgcctcagtctcccgagtagctagcattacaggcatgcaccactatgcccagctaatttttgtatttttagtagagatggggttttgccatgttagccaggctggtctggaactgctgaccgcaggtgatccacccacctcagcctcccaaagtgctggaattataagcatgagccaccatgcctggcctagtttttattttattttcagacagagtttcgctcttgttgcccaggctggaatgcgatggcgcaatcttggctcactgccacctctgcctcccaggttcaagagattctcctgcctcagcctccccagtagcttggattacaggcgcctgccaccatgcccggctaatttttatatttttaatagaggtggggtttcaccatgttggccaggctggtcttaactcctgactttaagtgatctgcccaccttgacctcccaaagtgcttggattacaggtgtgagccaccatgcccggcccatttattttacaaaataattccctcaaagtatatgcaagcaaaatactaagccacgtgggcccttgttgtttgggctgctgtaacaaaacaccatagactgaatagttaataaacaatatagctctatttcttaccattctggaggctgggaagtccaagatcaaggtgtgatttggtgtctagtgagagccagattcctggtttatagacagccatcttctcattgtgtcctcacatggcggaagaggtaaggaatttctggagtctctttgataaggacactaatcccattcatgagggctctgcgttttttctttttttgagacggagttttgctcttgttgcccaggctggagtgcaatggcgcgatctcaggtcactgcaacctccttctcctgggttcaaatggttctcctgcctcaacctaccgagtagctgggattacaggcgcccgccaccacgcccagctgatttttgtttttttagtagagatggcgtttcaccatgttggccaggctggtctcaaactcctgacctgaggtgatccacctgcctccgcctcccaaagtgttgggattacagacgtgagccaccatgcctggccgggctctgctcttaagatctaatcacctcccaaagaccccacctctgataccataattctgggagttacgatttcaacataggaatctggggggacacaaacattcagaccatagcagctctcatctttcatgaaggaggcacagagccgggcggcaccacctacctgctttagcacaggtgagtgagcactgtcatcagagctggtttaactgcacttgccactccatcaccccgactgccttctcccactgtcagctggcttcacagcccagcagttactgacatgttagtaaagaaggacattcacagtggcactgggtaagctgaagaacaaaagtacagcatgaaaatgccagctgaaaaggcattcactggaggtcaaaaaggttcacaagaggcagcaataaacagggaagttgatgaaactttgggttgggggatgcacgtcccgaaacttacattaagaaaagctctttcaattaacaaaatcgaattcagagcaaacgggtgaactggactgagtgtgcctctattgttgggtaaagcttagtaatactgcccacagtatcatttgccagagatttcttgagaggttgcacagaaaggtcttgttgttgaactgaagaaaaatgttgggaatggctctgtgatcctgcctgttgtcaggttggtttcaccagcaaggggcccaccgtacctctcctgtggagacactgcttagtttcaatgtgcttttcattctcttggctgcctgagcaaatggccatcactgtttccattgtgagctcttccccttccggagctgagcccaagtacagggaacatgtgctggagaccaacatttggcagcctgggtcccacttggagtgactttctgccactccctttcctcccacagagacatttccctgcatttggtcactgaaaagcagtgccggacaggcttgttctaaaagctgattcctaaccctactggctcatatgaatgaggggcaaaaaatccatacccaaattcagagcccaggttagtcgattgagacaaaatttattttcaggccgggtgcggtggctcatgcctgtaatcccagcactttggcaggcagaggcgggaggatcacctgaggtcgagagttcgagaccagcctgaccttcatggagaaaccccatctctactaaaaatacaaaattagccgggcatggtggcacatgcctgtaatcccaggtactcgggaggctgaggcaggagaatcgcttgaacccaggaggtggaggttgtggtaagcccagatcacgccggtgtactccagcctggacaacaagagtgaaactctgtctaaaaaacaaaaaagttattttcatccctcccttgtcaccaacatgactgaggccatatgtagtcacatcaacaatgggcagtttcctagagaaaatttctctttgtattatctatccaattaataatttttatgagaatcctacctaacagttgaaaaaaactgagcatcctaaatgcgaggatctaatttggtaggacagatgagaagttataagtagaggttacatactttccccacatacacatagaagttagtggcagaactggtactaggacacaattgcttgagtatctaggcccagttttattctactacacaaagtaataagggctatgtttttgtttttttgcattttaaatttgaggtataattacgtaaagtacacgaacattaacgtgtagacttaatttcgacaaatgtttacaccaatataatcaacgctccaatcaaaacacaggatgtttccatctcccagagggtgctcctgtgcctctttctaactcaaccgcctgctccccatcccccaccacatcaggcaataaccactcatctgacatctatcccttttgattcattttgggtccccagttttaagaaataaaaattgaattcaaacaactttgcctgaagcccttaaatctttacagaattttcctaccacttttggaccataggtataaagatttgttttggattcatctggatggtgttacagcaagtcagtctcagccccagtacagacacgtttaagtttaaaaggattcacatttataggatgtgaaggtcaacaattcttcaatatggggtattaaaaaaactactctttctggaaaataaatgtactttgtctaaaatatctgcctccttggctgtttctgtattcaaccattccttcgggatagccgcctatgggaagagctgcttgagctcttgaaagtaagcacttagatactaagtatttttccagttggaagctgtctcctggtttcaatagcttttctgctgcggtgggactcattttaacagctcctctggctttcccagacaccatctcaggaggcagtggcagttgaaaagataacactgtcctaagccatttaactagccagcaagggaagtgggttttaggagctggaaaattttggctaaggcttgctcagaacactgtcttaaatccaaaaagtcttgccaaggtccaggtggaggcagctttcccccagccacagacactaccaaatcagacagggcttgcatttcttccgaccagaggcactggcagccagggttggtcattatctccatagcagccttgtttccccagacagtgagctcatgcttggcgctgatcaactccataaaacaaggcgtttaaccctatgcagaaatgactacatgaaacctatacaattatttaaatcaagccaagttttgaaaattatgaagaaaatacaaattatgcaacacagtcataacattagaacccacttatgggcacagaataaacagcaatgctgaaagtttaaacttccctgaaagagccaaattccagaagacagtaattctgcggaattcagctgcctaaagcagcttgtgaggttcctcttccctatgcaacattgcctctacgtgttttctggtgttaatgcagtttaagatagagaaatctttttccactaatttttatttcatttaaaaaatttatttaaaaaatataattaacatggttcaaaattttaaaagggtaaaaccaaacacagcatattctcactcataggtgggaactgaacaatgagaacacatggacacaggaaggggaacatcacactctggggcctgttgtggggtggggggaggggggagggatagcattgggagatatacctaatgctagatgacgagttagtgggtgcagcgcaccagcatggcacatgtatacatatgtaactaacctgcacaatgtgcacatgtaccctaaaacttaaagtataataattaaaaaaaaaattttttttaaaaggtattcagtaaaaagtctccctcccactccttggaccccagccatcctttttcctgttcgatgactggtttcttgtaagtcgattcagagatactttagtatatacaagctaaacagttacatatctttcatgccttttttttttttgaaacggagttttgctcttgttgcccagcctggagtgcaatggcctgatcttggctcaccacaacctccgcctctcgggttcaagcgattctcctgacagcctcccgagtagctgggattataggcatgcaccactacgcccggctaatttttaatttttagtagagacgaggtttctccatgttggccaggctgctcctgaactcccaacctcaggtgatccgcctgcctcagtctcccaaagtgctgggattacaggcatgagccactgcgcccggcctctttcatgcttttttaatataaatggcatggttgtaatgctgttctgtgctttgctttctttggattcactgtatttagaaacagaacttagaagatatatttaaatcaagcaaaattatatgtttatttaatctttgacccaacaatcccacttctaagactatccaaaagatacagtggcaaaaatacaaattgttgtatatatgatatggatttatgactactgctagagtgaagaaaaaaccagggaggggacaaggatgaaagacctctctgagtgtacctttcttcaaagaaaactagttctagccaggtgtggtagctcatgcctgtaatcctagcactctgggaggccaagatgggaggatcrtttgaggccaggaattaaagaccaatctggccatcatagtgagaccccgtctctattttttaaaaaacaaacaagggggccgggcgcagtggctcacgcctgtaatcccagcactttgggaggccgaggcgggcggatcatgaggtcaggagatcgagaccatcctggctaacacggtgaaacaccgtctctactaaaaatacaaaaaattagcygggcrtgstggtgggcgcctgtagtcccagctactcaggaggctgaggcaggagaatggcgtgaacccaggagacggagcttgcagtgagtcgtgatcgcaccactgcactctagcctgggtgrcagagcaagactctgtctcaaaaaataaataaataaataaaataaaataaaaaaataaaaaacaaaacaaaactagtttcaactttggaatcatacaaacattttacataattttttaaaaggtatccctaaaaactgaaagtaaaattatgtacagatttggagcaataactagagaggaactatttcaagtgacttaaaagacaattgttagaagcagggtttcttaacctcagcatgactgacattttgagccagataattatttgtggggagtgggggtggggacagggcagttgtcctgtgcatcatgcgacgttagcagcatccaaggctcagcgagcttctataattggcaacaactggcacatactgccatacatcattgctgggaggattaagtgctgtctgtgcgacaccactgggggagtgttttaaaatataggttttaggtggcccgacgtggtggctcatgcctgtaatcccagcactatggaaggccaaggtgggaagatcatttgagctcaagcattcgagactagcctgggcaacacagcaagacacccgtctccaaaaaagtaagataaaaaaatataaaatataggttttattattattcaagtatggtgagggcaatagatcaggtgactgccattgacaagaaagcttgttgtacttacagattccaaaaggggcatggcacgccacagggagccacactggaagcccagggtcagtgaggaggtagagggaacgatgggatcaagtggagtaagagccttgtgatctccatgggaaggaaggggcaaggccgagtaaacagactggcgagttcgaataatttcagcaggctgtggggcctaggggctgtccctagctttctggtacctggccctgcggtgattagggcaggtggatatcccagagtatgggatattggctcagagtatgagacgtcctgtaaaggagagattggggtatgggctccagattggttggtttacatatgaaaggagcagtcataggtgagtcatttactctctccaggaattggctagccttgggaggaacaatctctccaccgagtgagcaaggcccctcccatgtcaaagaatcaaacacgcacggttcatattgagggtacaactggaagcttgtgcttgttttctgctggacttcgctcacgcaccttctccgtttgctgattttaatctgtatcctttcactaaaataaacaggaatgatgtgtatagcagcttttcagagttctgtgaatctatcttgtgaatcatcaagcatgagggtggtctcagggacccctgacacggctgctagaaccatcaggtggaaggttagtggggtactttataatggaaaagaccagactgacaccacagaccccattgctcagtcacagcgtgtggaaccaccagatgtcacgttcctctccatatgatgcaaaacaaagatgcagagtcactcaggaagtacttatgtcagatcaaccgcacctgaatctaatcaaggctctttgtgtaactgcacatttttaggaaatactggggagacaggaacctttaaacaacactgggaggaaatgagcagtgaaatacaaaatgtgggaaattctacaggacaaaaaacccacctttcaacacagaaaaaagggtaactgttacagatttaaagagacaaaagaccccatcaatcaaatgcacagtgtggctcttatttagatcttaatttgaacaaataaacagtcaaaatacatttttgagacaacatgggaaaactgagcagactacatattagatattaaggatattaattctgttgggtgaaatacgatggttaggatttgctttaaatggtcaaagaaaaaaatattggcggggacgaggcaatagatcaaacaagagcagcaataaagctgacgtttgctaagtttgagtggtggttcagggagtccactgtgctagtctatatttgtgactaaaaatttccataacaagttcaaaaaagaaaatgtatttaaaaattagaagcagttatcagccaaatataggttaagaaacattagtaaaataaaaatcctttcacttgccgttaaaaataaaaaacagtaaaaacacattttataaatatatgaaatctgagagcctgccaagattgcagagatgtgattgtaaggcacagatgagattttaaacctgggtttttagagattaaaataaaatgtaggatggtttaagcacctacttttagctcttgagaaaacaggtacagtccaaagtgaagctgcctttagtctctagccttcatgttttttttctagtctctattctgaagtctaaatttgttggtttttttggggggtgaaaatttaacataaaatttaggcataaaaaacattatccttttacgttttaatataagtctttatcctttaaactaagatctcataagagagagacgcatcatcctttagataaaagctcccgacagcccaggtgtcccagctgctgtcataatgtaagatttggggccaggcaaaagaaactgattaaagcagaatactggagatcctggccttcaagtagtgatatttttgctttttttttttttgagacggagtttcactcttattgcccaggctggagtgcaatggcacaatcttggctcaccacaacctccgcctcctgggttcaagcgattttcctgcctcagtctcccgagtagctgggattacaggcatgtacaaccacgcccagctaattttgtatttttagtagagacggggtttctccatgttggtcattgcctttttttttttttttttctttgagacagagtctcactttgttgcccaggtttgagtgcagtggtgcgatctcagctcactgaaacctccgcctcccaggttcaagcgattctcgtgcctcagtcccccaagtagctgggactacaggcatgcgccaccacgcccagctaatttttgtatttttagtagagacggggtttcgccatgttggccaggctggtctcgaactcctggcctcaagctatccgcccaccttggcctcccaaagtgttaggattacaggtgccactatgcctggccttctttctttcctatctaaaaggatttcttatggaaaaaaattcaaggataacttcttatgacatacatgtattatttctgtaattaaaaaaacattttaagaatatatgctcacaggctggcagcggtggctcacgcctgtaatcccagcactttgggaggctgaggcaggcggatcacaaggtcaggagatcgagacaatcctggttaacacggtgaaaccccgtctctacaaaaaatacaaaaaattagctgggcgtggtggcgggcacctgtagtcccagctactcgggaggctgaggcaggagaatggcgtgaatccagagcttgcagtgagccaagattgtgccactgtactccagcctgggcaacagagcaagactccatctaaaaaaaaaaaaaaaaaaaaaaaaaaaaaaaaagaatatatgttcacacaaaaacttgtacacaaatgttcatagaaaccctatgtacaagacccaaaaagtgaaaacaacccatatgtccaacaacttatgactggataaacaaaacatttatatccatacaactgatttttattccataaatagtaataaagtactgattcatgctacaacataaatcttgaaaacatgttaagtgaaagaagccagtcacaaaagaccacatattctatgattccatttatatgaaatgttcagaatagacaaatccaaacagacagaaagtagattactgattgccctggggtagggggcgttgaggaacgggaagtgactgctaatgggttctgcaatgggttgagtggtgtcccccaaaacttcatgtctacctgaaacctcagaatgtgactttagttggaaatagagtctttgcagatctagttagttaagatgaaatcagactggattagggcaggccctaaatccaattactggggtccttataagtaggccatggaaagacacagacacagggaagaaggccatgcgagacacagacacagaaggccatgtgaagacggagggagaaactgaagtgatgcagccacaagccaaggactgccaggagccatcagaagctaaggaggaagcatgaaagagtcttcttcagagcagcagtccccaaggcacgaaaaagtcttccttagagcagcagtccccaacctttttggcaccagggactggtttcatggaagataatttttccacagatccggggtggggatagggggatagtttcgggatgactgaagtgaattacatttactgtgcactgtatttctattattattacatcgtaatacatgatgaaataattatacaactcaccataaggtagaatcagtaggagccctgagcttgttttcctgcaactagacagtcccatatgggggttatggaagacactgacagatcatcaggcattatattctcataaggagtgtgcaacctagatcccttgcatgcacagttcacaataggattcacgctcctatgagaatctaatgccactgctggtatgacaggaggaggagctacggcagaaatgtgagcgatggggggcagccataaatacagatgaaacttcaagtgctcacctgttacttatctcctgctgtgtgaccttgttcctgacaggccacagacaagtaatggtctgtggctctggggctgggggcccctgccctaaagcttttagaggaagcagaagccccaccaacaacctgtttggacttctagcctccagaactgaaaggggatacagtcttttcttcttattttttgagatggagtcttgctctgtcacccaggctagagtgcagtggcacgatcctggctcactgcaacctccacctcctgggtttgagagattcttctgcctcagcctcctgagtagttgggactataggcgtgcgccaatacacctggctaatttttgtatttttagtagaaaggggcttcaccatgttggccaggatggtcttgatctcctgacgtcgtgatctgcccacctcggcctcctaaagtgttgggattacaggcgtgagccactgcacccggccaggaatacatttctgttgtcttaagccacccagcttgtggtacttcgttaagaaacagctctaggaaactattacaggcacaaaatttgtgatgaaaatgttctaaaattgatggttgcacaactctgtggatatactaaaaaaattttttttttttttttttgagacaggatctcactctgtcacccaggctggagtgcaatggcatgatcttgactcactgcaacctccgcctcccaggttcaagtgattctcctgcctcagcctcccaagtagctgggactacaggcgtgcaccaccatgcccggctaatttttgtatttttagcagagacggggtttcatcatgttggccagactggtctcgaactcctgacctcaggtgatctgcctgcctcagcctcccaaagtgttggaattacaggcgtaagccaccgtgcccggcctaaaaacttttaaaatgtatactttagttgggtgaattttatggtctgtgaattatatctcaatacaactgttatttaaaaatatttatagccacaaaatgctgaagaaccaataaggaccttgagtaaccccaacatgggagcttccattttcagtcaatcattcaaggtctgaagttgagtgttaaacattcgatgttaaaacaggattggctgctgggtctattgctgatttgctgcagggccttttggcttctttttttttttttttttttttttttgagatagggtcttgctctatcacccaggctggagtgcagcggtacgatctttgctcaccactacctccgcctcctgggttcaagcaattctcctgcctcagcctcccgagtagctaggattacagg

SEQ ID NO: 97512 - DNA, 18133 bp, Homo sapiens
tgtcgcccaggctggagggcagtggcgcgatccgcctcccaggttcacgccattctcctgcctcagcctcccaagtagctggtactacaggcgcctgccaccaagcctggctaatatttttatatttttagtagagatggggtttcaccgtgttagtcaggatggtctcgacctgctgacctcgtgatctgcctgtctcggcctcccaaagtgctgggattacaggcgtgagccagcgcgcccggtccacccacctgagttttaaaggcagagccagggcacagacctacacctctggccccaagcctatgctcttttctttatattattattattattattattattattattattattattattatttaatcttcccagaatcacctgtgagtgtgaactggctccatggctgaactggtgttctctgtgtgtaacattctggtcactggggtggaggctggagtcacagagttcactgtgccctgcttttgaagagctcatggtttagtggagaaaatgaacaaatatagaatggattcaagaatcctgcctgagaattcaggaaaggttttgtggtactggtgtctaatgagtcttcagatgtgaataagggcttccaggtgggcagaggtaggaagggttccaatcagaaggaccagaggaagccataaataggtgtgtgcaggaaatggagatgagacttggcagggtgtatgtggctgcaaggcaaagaaactagggcacttactcagtggttctagaggggtctgtgaagatagcttttggttgtggctgtgactcttttgtctggtacttgcttctctggcctcagaagttgggaaggggacgaagctcaatcctgatgctagaagggacactccagaggggaagctgccaccccattcccaccagctactattcaccaccactaccactattcacgacaacattggtaacaacaatccctggcatttattaagcacgtaataggcccaggccttgtgtctagatttattaagcacgtgataggtcccggccttgtgtctagtcctttgcatgcgatatcttcttaaatccttcccctaaccctatgaggtataggtatttttattctccttttaataatgagaattctgaggcttggagaggttaaatacctaccccaggcctccctcccgagaaactgccaggctgggatttgaacccagactcttcagatgctagatgctgagatcctcactatggggtggttcatgcaaataaggaacatcgacaggtggtgggcctttccctaattttcttgaaattttgttttgttttattttggcctttctatcttttgttttattttgttttgctgattttcttttgagtacagagagagatttctatgccgtaagaaaactgacagcacacagatgatgataaatggcagccaaccctcagctctggggacacaacagggagtactggggattgtggcaaacccaggagaggtagtggcttttgaaatccagccagttgttaccatattggaatatagtcctagggctgctgatttgcagttctattaatttttttttaaagagaagagaagctgggaatctggactttaagtgaagtctgcaagttgttaaagtctgctcagttttttaagcaagctcagccaacaataatgggttatgataaaagcacagtgtcctagtgagtggtctctatgttgtgccatattgctggagaacctcctgcagcctcactggtgtccctccccctgccccacaccctcacacctgcaaaagggggccttctaagctacctggtagtgttctttcctggattgtctagttgttaagggaagatcccgcctgggctgtctgagccaggaattattcccagtctgtcttgggcacttggcttcctttgccctacattcttggggttacttttcctgtcttcagtactgatttagaacagtcagaagattccagaatacttgagaggatgcaaggaaaattgcttagaattcacactttagaaatctggctgtaagaagagaacaagaggtcactactggagtcggtgccaaatggaacatttcgagcttgtctaaagaagcctttttcttcccacagcacaattcactactgaattcatagcgcttgggattataaagtcagatctccctgggtcagcaggataggataatttggtatcaatttattatgttctcagcctgtgcttttgctcagacagagttggattttagtcccccatcatttgcggattgtcatgggaatggggagtaattgcccttattttcacgcaggtacagcccagcattttgtgcaggtacctgttggagcccaggggagaaggaaggtctcgggaacagagctagtcttctgaggtttgcttcctttccatccactctttacattccaaggacctgtgtgtggataatacagagacaagtgcgagctttaccttctgcctgcagcagccttgctgattgatagcaggagggggtatcctgacagtcacagggctgtgtagttgggtcgcggccacgtgttacttcttgtgggtgaaccagtggtgtcactggtaccccctgcccttccctgtcttctgggtcaagagggacaacataagtggaaggtcgctggagaaacccttccaagctgtcctggtcatagggaggattgaattgactccaaatttctccagaggcatcacagagcaatgctatcattgtggtattttgctaccaaaagctaaatctagggcagaaatcacctcttgctccaggttgataacttgcgcactgtcatctctttgtggtagtagtaataacaacaataattataacagctgacgtttactcactgtgttcctacagtacacagccatcatttgaagtgttttaatcctcacaccaactccatgaagggggtactgtttttatattctttttagggatgaggaattgaaggcacagaaaggtctggtggctttctcaaggccacacagctagtaagtgtcaggctgggattatgtactgcgggcactcttgattccagtctactggactgcttgttgctgtgggtatttgagtatttatgtgtttcttttggctcctgtttgcatggtcactggctgtcatagggaatggtgatcggcttttccagttgctcaggtgacacaaaagaggttggctggtgtcatggacagcacatgggatttggagttagaaggtctcagttaaaaaccctcaggcccctgcattctagctgggggaccctcgggcagtttgcttgaacctctcaccttgattggtttgttgaacttgcagggtgctagcagcacctgcccccagcgtgggggagtggttttgcagattaaagtgttgtgaatgcacttcctcgatggagggcctctagcaccatggtttcgtcatcctgtatctgtcactcaccctgtaggtcaggggtttttcacatttgtggcatcagagagacccttaggtttctgtttacagaggcatcccaggcctaggggagacaggtggctcagtggcactggttcctactgctaggcttgcagagctcactgcaggaggactgtgggtggggatccaggactgtccacttccttctcctgggggacatgctgccagctgtcacagagataacattaccgttctgttcctctgtcaactggaagagagcttgaccagaaaattcctttgctgtgttgacccatgccactaaaaccttagtttggtggagacccctatatggcctttgactgtaggtcttacagagctggaatattacctatcacatgggcaagttgcttaacctcctagagcctcagtttcttcacctgtattttgaagacaatgacattttcttgtaaggttgttgggaggattaaataaaatgatggaaataaagtaccttctatagggtgctcctacatgctaatttctttttttccttcttttggtcatcaccttgttgctttctcaggtcaggaggtctgaacagggcttcctgcagaaaggatatcttcatggtgtcagtgtaaagctggtgttaaaggatgcaatgtgtgaaggggaaagaaatctctgctttccagagctgtgctatggttaatagagttgcttagggaatggggaggtgaaaataaaggcaaagaggagcaggcctagggagcaggatgtcagcagtacacatgtgctaaccagacccagcgtgtgttccccagggctcctgccttttctgcgtctctggacttagaatcacactgatctgatctcagtcttttgctgcttctgtgtagctttgatgagttgctctaacttctctgtgcttcagtttctttattttccaaacaggaataatgatacctaattcctgggggttttgaacatattaaatgggtgaataaatgaatgaatgagtatcaggtgtctatatgactcactccagtagggaggttcccttttccctttgcagaagcagcagaagaggcaggaggaatagtacagtcccaccaccaccgcaaccactaagtgatctctttaccacttactgggtgccaagcctgtgttcaggcactttatcagcaccatttcttctggggagaccaggatgttgctttcagttcttacttatcttcatccttaattgattttgaaggggttaaattaaaaaaaatactaaaacaatttgaactgatatatattatagaaaatcttgatggactgagatgaaaggggcaaaaaaacccccaaaaaacaaacaaacaaacaaacaaaaaacagagaaaataatcttacttgcattaagatgacaacaaattaagatagagctcacaatgtctggggtttctgggggctaatgccaatcccgcttcactgggatgtaggtgagacctgtggctacacaagttttaagaaacatctctcctgacccattcatacaccccagttccaggttgaagtgctgctacttctgttagagctgatgaatcactgcagacagctgtggggctttttgtctgtggttccttgagatttagactgcaaataaagactttcacactttgtgacttcttttgaattctctctattttataaaacgaagagattttaagaacttaagaagataacactttctggtttgagggctccctcacaatgtctgcgcttaccatttaaggttttacttctgggagcagaagtattgggttttgctgtgtaattgtttcctgttttattgagggcttaacatggaacctggaggtttgcctaccatgaagttgatgttcaatacatgtaagtggaaacaaaaatgacgacatgctaccaaaggaaggttttgtgatttagaccatcaatgagtccgtccgtcggtccatccctccatacagccatccacccacctacccacccacccaccctcttacccatccatacatttattcatctttgtactcacctatcgattcatccacccattcatctacccatccacctatctgtccttcatttattcatccatccatccatccatccatccattctttttccatccttcacccatctacccactcacccattcatatatccactcatttatccactcaaccacccagtctttcattttacatctgtctatttgtcagtccatccatctgcccatctatccatcaatccatctatccatccacccactcactcacccacctaccctgtcacccatccatacatctcttcatccatgcactcacctacccattcatccaccctttctacccatccacctatctatcctccatccatccatccatccattcatccattcattctccatccatcctccacctatctacccactcacccatttatatatccactcattcatcccaacccacctactctttcattcatccatctattcattcgttagtgtatccatctattcatccatccatccatccatccatccatccatccatgcatccatcctccatccatcctccacccttctacccactcaaccatttatatatccactcgttcatcccctaacccacccactgttttattcatccatccatccatttgtcagtccatccatccatcccatccatccattaattctgtcaagtgaatattctggaatgtgtttaatcaatccttgttgttggacattaggtagtgttaaagtgtttcctgttgatgttgatgcttctttagtgacatcttagtggttaagagtctgggctaggtaggcacactgcctgggtttgcattctgaccccacctcgtattgtgtgaccttggatgattcttgatctctgtatatctcagttttctcatctgtaaaagtagagattacattaggatctgtttcttattttttaaagggttaaaatacacaatccatttgaagcatagaactgtgcctagtaagtgcacatggttcccataacgtggtgatgttgaaaccttgcacattgttctggttatttccttaggctgttttctgaaagtggaattactaaccaaaacatgtaactctttcaaaggtttttcatgggcgttgccaaattgtccttcaggaatgttgtaaattagtccaacattaacagctcccccgtatgagaatgcccattttacctgaacatctgccaatgctgggcgattatttaatttttgccaattttgtgaaaattgccaattcatttttttcaatacttttattactggtgaatttaaatatcttttatttgtttactggtgaatttaaatatctgttgtttgtttaaatatcttttgttttatttattttatttagatatcatctattaccctcacacacttctttttcgtgaccttttccattaatatgttcatctgtttcttagatcatagaattcatttcagtattaaaaataactttaccacctatgctgcaaatattttccccataatgtttttttaaaacctagattatgacactttttgatatatgaaaatttaaaatgtttaataaaagcttttatgtttttctgtaagcytagaccttgtctgtctctaaatcacaagtgtgtgtgtgcattttttttttacatttaattcttgaggtaaattggattcatgttggttaatgatataaggtaggcattttataatttccctttacttaaccagttgtcccaatcccactttattgaatctagaatctaaaataccattttattatatataaaattcttatacacacatcttatatagtacatgttatatatatattatgtatatatatgtttctgggctttttatgcaatttggttttttgtctatgcttacttactaccttattgtagctttattttttaataattggcagtagaagtcttgaattctttttttgtttgtttgtttcagaaatttctgggctattcctgtttgttatttacttaaaataaacttgtcaagtttaaaaaatccagatggggttttgattgaaattgctttaagttgaaaaaattaacatgtttatagtaatgaaacttcccatccacaaatatagaagtgtctctatttggtaaaacctctttttttttttttagtgtatcacagttaagttttgtggattgcttcatttaatcctgcacatttctcattaaatatatttctaagcattttctattttcgttgcctttataaatagactttttttctactatattttctcactggttattactgattgttgattagatctgtatttgggaactacacatctttctgaatatttaaattcattctaaagtatttcagttcattcacttgggctgtgaagatatatgactgtgtatgcaaataatattttagagattcttttgtatagatcacttctcatttttatttcctgccttattgcattggctagaagttctaaactgatattaaaaataatggttttgaatgtcaggcttgaatttttaatgctgaaattttgtgtactacagaacttggatgggtgggtggtcatagttgtacttttgaattaggccttttaaatggttctcaaatacatatgtctgttcatatgtctggctgtttctatactcacttcacaacctcctccaccgtagaagtgaaaataaagaatgagaatatatctcagtaggatcatgggctacatgatggaagttttagtggggaaaacaagtggcaagtttcatccactctggtttttggtgcatcttcctggacgtgctcattccacagagcaaggttagcaaggaacactgaactgacaaacttgtccatgtggttgtcaatcctgcccgatttagtcagcctctttttctgagttagagacctgtaagtagcttttctgtcttctgtaatttctctctgcacccgtcccctcctctggcacccaccaccctccacagccacatggggaagaccctagcaaagacagtgacattgcccccaagtcgtttcatcctgggcatcaatgtacgtgactcagctttgtgctccacagacttgggctgctttgttggtatagcccagatcagcatttcaggtaattgggctgtaattggcctgccgtggacagcaggtccccagtgtgaggcttctgtttttggggagtttccctgattggcagggagtaaggcagtgacctctctgtctctctgagagcagcgcttctatgactcattctggctcccacctcccacacctgagctctgagctggtgcgtcttgttccatgggctggtgtgggtggcggtgtggatggcagagcaggatgccagcacactcctgggaggcagtgctagggtctctctggtgtgctgggtgctatcctgggactgctggtgcccggctgctgtgtgaatctgccccgctggggcttagctcctgatcttttgtcctatgacacctccaaatttctccctccttcccactgacatttctttctttagctcttgcatctccccattctattcttttttagattgtgataaaatacatataacataaaatttaccatcttaaccatttttaagtgtgcatttccgaggtattaagtacatttacattgatgtgcagtaatcaccactgtccacccacagaactcttttcatcttgcaaaactgaatctctgtccccattaaacactaatcccacattctccccttctcccccagtccttggtaaccacgattccactttctgtctctatgaaataaaatactctagggacctcagataagtggaatcatacagtcttttcatgaytggcttatttcattcagcgtgacgtcctcagcgttcatccatattgaagtatatgtcagaatttacttccctttaaaggctgactatactccattgtgtgtgtataccacgttttgtttatccattcatccaytgatggaaaatcgggttgcttccacctttttcaccttgtgaaatactcctctgatcttttacagctgaagacaatagtggtcaaagcatgtagcgctttttttacaaagttgttcctatgaattttcacaagaattagaaatttgccactatcatcatctccattttatagatgaggaaactgaagcttggcgaagttaaataatttgcccaaagttacctttaaaaaatagcttaactgagatatgttcacataccatatgactcaccaattgaaagtgtacaagtcagtgatttttagtgtatttacagagttgtgcaacatcaccacagttaattgtagcatatttttatcacctgaaaaagaaacggtataccctttagttatcacccgcctattcttgtgtccccaccttagccctggcaactgcaaatctgctttctatccctatggatttgcctattctggaatttcatatgaatagactggcacaatgtatagtctcttgtgtctggcttttttcacttagcataatattttctaattctcctagttgtagcatgtagcattagtactcatttctttttgtttcctaaaattcctttttttaaaaaaaaaatagacatgggattactgggtatatacccaaggaattataaatcattctaccataaagacagatgcgcatgtatgtttattgcagcactattcaaaatagtaaagacttgtaaccaacccgaatgcccaccagtgatagactggataaagaaaatgtggcacatatacaccatggaatactatgcagccataaaaaaggatgggttcatgtcctttgcagggacatggatgaagctggaaaccatcattctcagcaaactaacacagaaacagaaaaccaaacactgcatgttctcactcatagtgggagttgaacagtgagaacacatggacacagggaggggaacatcacacatggggcctgtcggggggctgggggctaggggagggatagctttaggagaaatgcccaatgtagatgacaggttgatgggtgcagcaaaccaccatggcacatgtatacctatgtaacaaacctgcacgttctgcacatgtaacccagaacttaaagtataaaacaacaacaacaacaacaaccagtccctaaatgcattagaaaaaagaatctctcccatgaggctgggcattctttagagaaatggttctcaaagtgtggttcccagacctggggacttggaaatgcagattctcagccttaccccagacctactgaatcggaaactctggatgtgcagcccagccatctgtgtcttaacaaagccttcacctgatcctgatgcacaccaaagtttgagaaccagtgctttggagaaacttgccaagaaagagacaaagagaaaaccaccaccactagcagcagcagcaacagcagcaacaacagtccaggcaacagctggtatgaagagccatgctcacggtacctagagcaaggtacagtttaatacagtggctgaagagctcacgctctgcaattctcacagccctgggtttgaaccccagctttggtacttgctggctgccacttcccttaacccctgaatctgcaaaatagggataatgattcctcccttttaaggttgttccaaggactcggtgagaccttacctgtaaggcacttagcacagagcagcacattaagtaaaagccactataccagaaaggaaactcaagcaaatccatcctctgcaaaagtgttaacatctctgtgagttcaacatcctgtggaacagcagtcyacatggggtacttacacactggtaggtacaagcagacttggtctgggggcatggatagatttgtgaggctcaatttcaagatcctcagttttcctacaggctgtcctgaaactgatctgcctgcaaagggggcatgaagcaaattctctttccttgtcttctctttccacaggagcccttctcccacgtaacaaaagaaaggcagagtctcagccatcccaaatctgaatacgatgcatcatgtaatataaatttccagggctccaacagaggataaatggaaatactgaggttgtgaacaatgattagataataaatccatgtgcaagtgaacagttcaaatgactgggtaacaagtccttatccaagtcaagtggttcgtacataattgaaggaagccctaattgggctgtaagttgatagatcattaaaaataatttttgatgattaaaaaaatagagatgacgtctcactatgttggccagtctcatcttgaactcctagactcaagtgatcctcccactttggcctcctaaagtgctggggtgacaggtgtgagccactatacccagccttattttctgagattactttttgaactcagacatctgagtccacagtcccagtgttcagccacattgctgtcctgtctcctccttcaaacattgtatacaagttcatgtttacctgttgatatcttcccagcttcccctcatattcaagagactgggggttcagctttgtacctctcttgctcactgtcatgttgcacataagggcttcgtaaattaaaaattagtaacttgaaaawaagtgcttagtctgttgaatgctgtgtgttggacagtgttgcaaactaaactcacgcaaggagtcacttgtgttagtattctgtgcatgatggttacgtatcgtgttttgccgttagaaacgagaacagacaaatgagaacatgttcgttaaagggctctgaaacagtgtgaattataaatgtattgatggtggggatgtgtcaccatttgcagttaggttcaggagctgatgaacaacccacgagatggaggtttgcacacagtggccttgggcctgtggccagctgtgacagctgggagttccacagtctcaaggtcactggcctatgtcataaaaggctggttactgaggacaagctgggaaggtgacccttagtccagcggatggagccacctggggtgaggagtaattacttgcttgaggcccctgagctactaagtgcagacccgagtctctgtgattcctaagtgcctgccttgccctgctctctctagccttggatgtggacaggctgtgttggaggctggttagggaccaaaacattctctgaaagtaggagctgtttgcagctccctgactgcaggtttcttttgaagaggcaatgcaaatggaaggggtggtctgaaagcagtgccatggcttcagagtactctgtcgagagtccagtgattattgctatgtggtccctgagaaaaaaaggtctatgcacaaaacttcccggagcttttctagaatagacaccagagctctagttggagcctgggggccattccctgggggtctgggctgcctctgagaattccctcccttccctctagccagatcactggagccttatagtatcaaacatggggatggtattaatcactcacattcagtgagtgcccattcagtgccaggcacgtaactaagtgctttgcatcatttagctcattaatttttgacaatgtcgtggttattattaacttcattttacagatgaggaaactgatgcatagagaaggggaaaacttgtaaaactctttaaggatgtcactcagactgtactttatttttctcagaaaaaaatttaatttatgtaaagactcattgtaacatggagtagagacaatatgaattttctttgtggcttactggcaaatacagtagcttgggcatgatctattcttggttgccatgtttctcacttttgtggttcatctcactttgtttatctaattggaatctctttttctgccattattttgtgttcttctgagaagttctcacccttgagggtggacagaggtaagcaagaggcatggctgggagaaacaactaagtatcaaggaagaagttaaggttgggagataaatgtggcttttgtgatgatttgacgcagggcaccttcatggaattgatgaaggaaacagaggaggaaactcagtgctcagggatcactgggaagcctttgaatggaggggcatcaacagcatcatagcctgggaggaccaaggattgtcagtcattggaccatatcgtggtggcaggtccattatgacttctagctttaaattgaaaacaccgtagcagcaggttacaaaattaggaaccagttctagagggaatgtgtaatagtatgtggcagtgatccattcaacacctgcatttcctagaatgcattcctaagcttaagcaggtatatctgtgctcccagggcccaacatggtgtctttcacatagtgggtgcttatgcagtaaacccccttgaatgagtaagttcaagccccatgcctttaattgtcaaataggctgactccctaggagaaaggcttctccttagctgccttcccaaacctgcttccctattctgagtttctctccagttgctttccacctagatgtcctctaattacagctactctagatccacaccatgtctggtttccaaatcttccatcaccctcaatgcattagtctttagtgttgttgtcctcatggctcatggatctgtcttaactatctcaacctcgtgcctatggaaagtgttcctcaaaaacttcatggtacagacacaaagatgattatgaccccgaagtcctactccatgtagcgtggctaccatggttctaacttgaaatctccttgcctttccccggcccccaaccaggaatatgcaacaagatttatatattggccaaataaagtctctgggtaactctattgaaatacggagctttgcatgatgggattccctaatatagtccatcagaagataactgatatgagatgcccatccaagtatctaaaggaagtatggggtcttggtattactaaattccttgactgtaactttttatagattttctaatctgttaccttaattcctggcaatgattagttagcaaagccagtttcccattcagaataatttctgaaaggccttgtgggtcttgccatgaggagtagacttaatcctgttggggagtcattgcagagttttaagagggcaaaaagacaatacaatttatattttagaaagctcatcctggcttctgagtggagatgagattggaggaaggagattgaaggcagaaaatgagttgggagccattgcaatagttctggttaaaggcaatcactgggtctgtgatctgttagaagagcttcttctaacatcctgacagttgcatcactgcattactttatctttagagcacctatgggcagcttcctttgtggtgacaactgctttacttgagtttattgagaaagcacttgcgaagaggcacatccaagatacttcatttcctcttgctcaggcatttctccatcttggcatagtgatgatgtccccagggcaaggggacttaaaaactgcagcttcctactgcgtataaagagaggacacagatgtcttcaaggaagcctccataaacctgtccagggaaccttggagaatgtccagaattttcaacatttttggaatgttagtatagggcaaagccgttgcaagcccaaatggcaagatgaaactattcacagtgcttctacaagatatataaaatgatttccaactcattccatccctgaccgctccccagcctgctgcaactatggcccctttgagattcttggggttacttgaaatgcacacagtggagattctgcagtaatatttaagagctttttttgaccactgattttgtgaatccaacttctttgtctcctcctaactctatacttctcccagggaactgcctcaaccttgcccacaagagacatcagctgttcagggttgtggggtagaaatggctgtagaaagaacgttatcagtagatataggctacattggcttgttgctataacagtcactcttttctgtggatctttgagtctgttttgatcaatggctttatcacatcttttgggacactaaatagataatgatacttcacgacacaattcaaaataattaaaaaataatagatgtgtgtttatgtgtgtgtgtattttccattcatcaactttcccaacttgacccttgtttagagaggttataaccaatccaaagaaaatgtgcagaccttaagagaggttagtgttgtttttggtaacaattggaataaaaggaaattcttacatcacagtctgccaattcaaagtcatcttcaaatctcatgtaatgcccggattcttaggcttccttgtaaatgttttcatacattaatctacttagttatttcaggtattttaaaattgtattcattctttggtaggtaaaacatgctcatggtacaaaattcaaaaggagcaaaagggtaaataggtaaagtagttcccttcagacatctcccagacataactagagttagttaccagttttgtgaacttccttccaaagatattctgtgcatattcaagcttatatgtttatagagaaacctttttttcttgtttgggacactgtgtttttttccgtattgcaacctgtggcaatcagaaggctctttccaacacgatgactaaaagggcctccaaacttgagtgtaactttttatgcaagggacataccatatgtcaccgaacccaagataagaggtcccactaagacagaaaactgtgcagcccattaaactatgatactctctcagttgtagaatgtatcctgatttcagagatgttaaaatgtggaaaaagtgttttcatcatcagtgaaatgtggtacttcatgttctcattattcagtgtcatccacacactgtcatcattatggatttcgtcaataaaaatgatgactctcataatttgcattatgactgtctatttaattctggagagaaaagtggctgtgaatacagagccttgcactatccttggccagaaaatttctatcctgtttcaatctgtgctgactttccttgcggcctagtgcatctctgtcaccctggatccccttcaccatcagcttggggatcttttgcctttttttttttttaactgtgctgcatctcttatgtgttgggtttcatgtatgctctttgttgatttatatccttgttatggtggagcacatcctcaagtagattcttcagagagttagatggaaagttaacctttagagatttcgcatttctgaaaatgtcttcatcctgctttcccatctgattgatgatttggctaagtatagaattctaggttgagaatcatttttgttaagattttgaaagattgcttccagtgttcaatgttgctgttgagaaatctgaagccattctgattcctggttcttccactgtaaaactattttgctctccagaagatttcacagtcttatctttgaaatcccattctgaatttttatagggatatgtgctgggttaggcctatttttggtcattgtgtggggttcctggtgggctctttgaatctggaaacacatattctttgttgtgggaatttttcagaattatgttattgattttctcctttttagttatctgttctcacttttttgaacttttgttattcagatgttggatttcttggtcctctaaatttcttgcatttcctctcctgtactccttctgattgtgttactgtcttatatttcagaagattcctcaatttcatcttctaatccttctgcttttgcgctgatgtttttagttttcaagagcttcactttttggttttgttaatattccttttttatttcatcctgttcttattttgcatgtcaattgttttctcttgtctctggaaggatacttatttaatagctttatggaagtataatttatgtacaacaatttgtacatatttaaagcataacatttgataagctttgacatattttacctgggaagttgtcacctctgtcagtctaatgaacatatctatcattttccagatgtttcctcttgcctccttgtaatctatctactctttccactccttcctaccctcattaaccatactgatctgttttctgccagtgcagattagtttacattttcacaattttatataaatgtgatcatacaatgtgtgctcccttttgtctggcttctttaagtataattactctgagattcatccatgttcttgtgtgtatcagtaattcattcttttttatatctaagtaatagctcattgcttagatacacccctacatatttatccatcacttattgccagtattttgttgaggatttttgcatcaatgttcatcaagggtattggtctaaaattcttttttttggttgtgtctctgcccggctttggtatcaggatgatgctggcctcataaaatgagttagggaggattccctctttttctattgattggaatagtttcagaaggaatggtaccagttcctccttgtacctctggtagaattcggctgtgaatccatctggtcctggactctttttggttggcaagctattgattattgccacaatttcagctcctgttattggtctattcagagattcaacttcttcctggtttagtcttgggagagtgtatgtgtcgaggaatttatcc

SEQ ID NO: 97513 - DNA, 12899 bp, Homo sapiens
tgagggaagagggactgggggcccagactcccagatctgagggaagagggactgggggtccggacccctgggtctgagggaggaggggctgggggctgggacccctgggtgtgagggaggaggggctgggacccctgggtgtgagtgaggaggggctgggggctggacccctgggtgtgagggaggaggggctgggggctggacccctgggtgtgagggaggaggggctgggcctctggggtcctgggggaggaggggttcggatgtcctgtgccaccattccctccctccatttccagacgatgtacctgtcccagctccagccggtgaccagaaggaggtggacacttcagaaaagaaacttctcgagcggctccctgaggttgaggtgccccagcatctgtgatcctccgggaccccagccctcaggattcctgatgctccaaggcgactgatgggcgctggatgaagtggcacagtcagcttccctgggggccggtgtcatgttgggctcctggggcgggggcacggcctggcatttcacgcattgctgccaccccagatccacctgtctccactttcacagcctccaagtctgtggctcttcccttctgtcctccgaggggcttgccttctctcgtgtccagtgaggtgctcagtgatcggcttaacttagagaagcccgccccctccccttctccgtctgtcccaagagggtctgctctgagcctgcgttcctaggtggctcggcctcagctgcctgggttgtggccgccctagcatcctgtatgcccacagctactggaatccccgctgctgctccaggccaagcttctggttgattaatgagggcatggggtggtccctcaagaccttcccctaccttttgtggaaccagtgatgcctcaaagacagtgtcccctccacagctgggtgccaggggcaggggatcctcagtatagccggtgaaccctgataccaggagcctgggcctccctgaacccctggcttccagccatctcatcgccagcctcctcctggacctcttggcccccagccccttccccacacagccccagaagggtcccagagctgaccccactccaggacctaggcccagcccctcagcctcatctggagcccctgaagaccagtcccacccacctttctggcctcatctgacactgctccgcatcctgctgtgtgtcctgttccatgttccggttccatccaaatacactttctggaacaaatgcatggctccatgcctgtgtatctggactggtccctccaaaacgctattgccacgtcacctgccggagtcctcatctttgaagactggattcaagcatcacttctgagaggctcaatcctggtatttttccatctgcccctgatgagtctgcagccttcactcagggtcccttcagccacaaggacagaaaacccaaacctgggattaagcaattttttttttttttttttttgagatggagtcttactctgtcacccaggctggagggcagtggtgtaatctcagctcactgcaacctctgccttttgggatcaagcgattctcctgcctccgcctcccgagtagctgggattacagctgcctgccaccacgcccggccttctaatttttgcattgttttagtagtgatgggggtttcaccatattggccaggctggtcttgaactcctgacatcatgatctgcccaccttagcctcccaaagtgctgggattacaggagtgagccactgcacctggccgggattaagcaacttttaaaagatgaatttggccaggtgctgtggctcacgcctgtaatcccaacacttcgaaaggccaagataggggggatcacttgaggccaggagttcaagaccagcctggtcaacatggcaaaaccccatctctactaaaaatacaaagatgagccgggtgtggtggtgggcacttgtaatcccagctactcgggaggctgaggcaagagaattgcttgatcctgggaggcggaggttgcagcgagccaagattgcaccactgcactccaaccggagtaccagagcaagattccatctcaaaaaaaaaaaaaagaatgtaccaggtatggtggctccacctgtagtcccagcactttagaaggcagaggcggatagatcacgaggtcaggagatggagaccatcccggctaacacggtgaaaccctttctctactaaaaatactaaaaaaattagctgggcgtggtggcaggcacctgtagtcccagctactcaggaggctgaggcaggagaattgcttgaacccaggaggcagaggttgcagtgagccgagatcatgccactgcactccagcctgggtgacagagcgagactctgtctgaaaaaaagaaggctgaggcaagaggatcacttgagcttaggagtttgagaccagcctgggcaacatagcgagaccccgtctcagaaaaagaaaaaaaattagctgggcatggtagtgtgtgcctgtagtctcagctgcttaggaggctggtgtgggaggatcccttgagccctggagtttgaggctgcagtgagccatgatctatcactccactgcactccaggctgggtgacagaatgaggccctgtctctaatagaaaaaagaataaataaaaatgaattatgataaaaaccaagatgtcccaaggcaggatgacttcagggaaccaggttctcgcatcccctagctgtgccaaggataggtttgggggctggaccccccctcatggtcccaaggtagctgcagctgctccagatgtcaccaacagccagtgaaggaagaggccgcattctgttctgggcattgttaagtgggagaaaatctgtccccggagttccctctcctttcagccctctcctcatgttcccttatatcccactggctgtgaggcacaggtcagtgacagctgcagacagatccaccaagctggcatccaccagtggtgatttcatcctcacctgggatggggatgctttccttggaccaagttggggtctggtaaaaagcaagcggggaatatttgtttttgttttgttttgtttttggagacagagtcttgctctgtctcccaggctggagtacgatgacgcgatctcggtttactgcaacctctgcctcctgggttcaagcgattctcctgcctcagtctcctgagtagctgggattacaggtgcccagcacacacccggctaatttttctgtatttttagtagagatggggctttcaccatgttggtcaggctggtcttgagaactcctgacctcaggtgatccccccgcctcggcctcccacagtgttgggattacaggcctgagccaccacgcccggccaggagtatttgtttaaatgaaattctggccaggcacagtggttcatgcctataagctcagcactttggaggccagggatgggcagggtggggggtttcaggagaggatgacaggaggatgactcaagctcagagctcaagaccagcctgagcaacatagcaagacctcatctctaaaaaaaaaaaaaaaaaaaaaaaaaaaattagccgggtgttgtggcatgcacctgtggtcccagctactcaggaggcttaaggacagaagaatcgcttggccacagaaggttaaggctacagtgagccatgaccacgccactgcactccagcctgggagacagggcaagaccctttctcgagaaaaataaataggccgggcacagtggctgatgcctataatcccaacgcttcaggaggccaaggaggaaggatcctttgagcccaggagtttgaggccaacctgggcaatatagggagaccccatctctatgtaaaaaaataaataaatagggccaggcgcagtcactcacaactataatcccagcactttgggaggctgatgtgggcggatcacttgagggcaggaattcaagcccagcctgggcaacgtgaaaccccgtctctacaaaaaaataccaaaattagccgggcgtggtggtgtacacctgtaatcccagctactcagggaggctgaggcacaagaatcacttgaacctgggaggcagaggttgcagtgagccaagatcacactactgtactccagcctgggtgacagagcaagactccatctcaagaaaaaaaaaaaaattagctgggtgtggtggcacatgcctgtagtcccagctacttgggaggctgaggtgaaaggatcgcttgggcctgggaagcggtgattgcaacgctgcacatcagcctgggtgaccaagcgggactctgtctcagaacaaaacaaaacaaaaatacatattcccagatcctggaatgtcctgggaagctatatgtgtgtcatgccctcccagctgcacctgaacaatgagcatagcaaacatcagctgcagcctctctttgcctctctcagaaaatgaggggagttgagcttcagtgacccaatctggaaaacgggcctaaatggtgttctttgaaaggttcatataggcaaagcggtccccaaatgccgaaggagccaagaaaccaaagaatgaggccgacccatctagtttgtcaatacagggtggtttattagggggaaacttagagtgtggtcttcgccaggcatggtggcttatgcctggaatcccagcactttgggaggccgaggcaggtggctcacttggggtcaggagttcgagaccagcctgactgacatggtgaaacttgtctctactaaaaatacaaaaattagccaggtgtggtggtgggcgcctgtaatcccagctactggagaggttgaggcaggagaatcacttgaacccgggaggtggagactgcagtgagccgagctcacgccactgcactccagcctgggctacaaagcaagaccctgtctggaaaaaaaaaaaaaagaagtgtggtcttgggcagcagcaagacagatagatcacaccctgcaacccccagacacagggcttctatctcgaggaaagcatatctgtgctctggaagaaacgcgtaggtggctatgggcgatacatcttgtgatggatgtgacaacatcaaggcttgttctggaggaaaggctggtaagtacgtgtttctacataaagagtaacacatccgttagacatgttggaggcattcccagtttcgggttagtcagaagtcacacggcaggctgggtgcagtggctcatgcctataatgccagcattttgggaggctgaggcaggaagaccgttcgagcccaagagtttgaaaccagcctgagcaacatagtgaaaccccgtctctttttttttttttttgagacagagtctcactcttgttgccggtggctcgatctcggctcactgcaacctccgcctcccgggttcaagtgattctcctgcctcagcctcctgagtaactgggattacaggcgcccaccacgcccagctaatttttgtatttttagtagagacagggtttcgccatgttggccaggccggtctcaaactcctgtcctcaggtgatctgccctcctctgcctcccaaagtgctgggattataggcatgagccaccgcgcccagccaaccctgtttctttctttttttttttttttttttttgatacggagtcttgctgtgtcccccaggctggagtgcaatggcacagtctcggctcactgcaacctccacctcccgggttcaagcaattctcctgcctcagcctcccaagtagctgagattacaaaccccgtctcttaaaaaaggaaaaaatcacatggcagagtagcattttaaaataaagtcacgaggctgggcgcggtggctcacgcctgtaatctcagcactttgggatgctgaggcaggcgaatcacccgaggtcaggagtctgagaccagcctgacctacgttgagaaaccccgtctctactgaaaatacaaaattacccgggcctggtggcgcatgcctgtaatcccagctgctcaggaggctgaggcaggagaatcgcttgaacccaggaggtggaggttgcggtgagcygagatcacgccattgcactccagcctggacaacaaaagcaaaactccgtcttaaaaaataaataaataaataacattaaactacgtcactcagcctgtgaacaatggctcacgcttataacccagcaatttgggaggccgcagcaggtggatcacttgaggtcacgagttcgagaccagcccggccaacatggtaaaaccgcatttctactaaaaatacaaaattagctgggtgtggtgatgggcgcctgtaatcccagctactcatgaggcaggagaatcgcttgaacccaggaggcggaagttgcagtgagctgaaattgtgtcactgcactccagcctgggtgacagagcaagactccgtccaaaaaaaaaaaaaaaaaaaaagggaccatgttctagtgtaggggtaagtggaytgttttggccccaaccccaagaggatcaagggagaccactgcagctgcccgagaaattcttgccctctgacaagaaacaccctatccrgtctggggaatttgccagtccaacccctccccttggctcaagattctgggaaatcctaaatagtgtttaccattggccttttatcagctccagtataaatgcrtctggccagacttgctttacaactatgcataatggatagttgggccaggcttggtggctcatgcctagtgctttgggaggccgaggtgggaggatcacttcagcccaagagttggaggccagcctaggcaacatggtgagacaccatctctacaaaaaaaaattttattttctgttttttttttgagacggagtgtggcgctgtcacccaggctggagcaacagagccagactttgtctcaaataaataaataaataaataaaacctgcaaaaaaaattttttaaatgccatttttctttctttctttctttctttttttttttgaggcagagtcttgctgtgtcacccaggctggagtgcagtggcgtgatctcggctcactgcaagctctgcctcccgggttcacgccatcctcctgcctcagcctcctgagtagctgggactacaggcgcccgccaccatgcccggctaattttttgtatttttagtagagatggggtttcactgtgttagccaggatggtcttgatctcctgtcctcgtgatccgaccacctcggcctcccaaagtgctgggattacaagcgtaagccaccgcgcccggccatttttctttttaatcaatcctgccacttgaagattatatggtaagggaaatctgcagtctatacacaatactgagttgctccaagcccttgaggattgtgagggacccagtgttctaattcttgctagagtgtctacctccatgttaccagaggcgagtctgaccgggtactgacatgtgatataccattaagtgtgcagtgggttcttttagcctttcccaaatgtctttccacatggcagcgccccacagcattttctttttcttcttttttctttttcttttttttttttttcttttttttcctgggcaacagagtctcactctgttgcccgggctagagtgcagtggcgtgatctcggctcactgcaagctctgcctcctgggttcaagcgattccagtgcctcagcctcccaagtagctgggattacaggtgcacaccaccacgcccagctaatttttgtatttttagtagagatggggtttcaccctgttggccaggctggtctcaaactcttgacctcaggtgatccgcccgcctcggcctcccaaagtgctgggattacaggcgtgagccactacgcccgccctcttttttcttttttgagacagagtctcactctgttgcccaggctggagtacagaggtgccatcatagcttactgcagcctcaaccttcccagctcaagcgatcctcccgcttcagcctccctagtagctgggaatacagatgcacaccaccacacctggctaattttttgcaggttggtctcgaactcttgggctcaagagatctgcccgccacagtctcccaaagtgctgggattacaggcatgtgccaccgtgcccggcatattttcttttcagtgtttacctttttgcctcctctgaggtgctggagtgcagcaataagaaagtaataattttaggccgggcgccagtggctcacgcctgtaatcccagcactttgggaggccgaggagggcggatcacgaggtcaggagatcaagaccatcctggctaacacagtgaaaccctgtctctactaaaaatacaaaaaattagccaggcgtggtggtgggcgcctgtagtcccagttacttgggaggctgaggcaggagaatggcgtgaacccgggaggcagagcttgcagtgagctgagatcgaaccactgcactccagcctgggtgacagagcaaaccttcatctcaaaaaaaaaatatatatatatattatatatatatatttttttttttagaccgggtcttcctctgttgcccaggctggggtgcagtggtgtgatctcggctcactgtaacctctgcctcccaggctcacgccactctcctgcctcagcctccagactacaggtgcccgccaccacgcctggctaattttttgtatttttagtagagatggggtttcaccgtgttagccaggatggtcttgatctcctgacctggtgatccacccatcttggcctcccaaagtgctgggattacaggtgtgagccactgtgcctggccgctgagtagtattttgttgaatccactggcagcttaaaggacatttgggcttgagctatgtacagctgctaacacctgtgcactggtttgtgtgcaaacatgttattttttctttctaggacaaatacctgggagtatcaaaattattttttgatatttattattaaatgattttttctttttcttcatagtaatgatattgtgtcctatgtggatttccctccccctaaacctttttttttttttttttttttttttgagacagagtctctctctgtcacccgggctggagagcagtggtgcgatcttggctcactgcaacctcctcctcccaggttcaagcaatttacctgcctcagcctcccaagaagctgggattgcaggcgtccgccaccatgcttggctaattattttgtatttttagtagagatgggggtttcaccatgtttgccaggctggtttcgaactcctgaccttaagtgatccgcccaccacggcctcccaaagtgctaggattacaggcatgagccactatgccctgccccctccccccactttttttttttggtagagatggggtcttgctttgttgcccaggctggtctcaaagtcctggcttcaagcattcctcccatttgggcctcccacagtactgggattacaggcgtgaaccaccgtgcctggtcccatttgtgtttctattcagcagtttgtgtaaacttgaagtctgtgaatccatgtgtgacactcaggtcttaattattgtctaccaagtaagagaaagtgacaatatcctgccctgtgtgaagctggccagccagttaggaattatcatgtcccaaccagcctgggaaacttggcaagaccctgccttgataaaaagtttaaaaatcgactggacacagtgtctcatacctataatcccagcactttgggaggctgaggcaggaggattgcttgagcccaggaattggagaccagcctggacaacaaagtgagaccttttctgtacaaaaaattgctgggcatggtggctcatgcaggtaatctcagcactttgggaggccaaggcaggcggatcacctgaggtcaggaattcgaggccagcctggccaacacagtgaaaccccatctctagtaaaaatacaaaaattagtcgggcgtggtagtgggcgcctgtcatcccagctactcgggaggctgaggtaggagaattgcttgaaactgggaggtggaggttgcagtgagccaagattatgccactgcatgatcaccccagcctggatgacagagcgagacttcgtctcaaaaacaaaaaacaaacaacaacagcaacaaaaattagcaggctgggtgcagtggctcatgcttgtaatcccagcactttgggaggccaaggcaggcaaatcgcaaggtcaggagatcgagaccatcctggccaacatggtgaaaccctgtctccactaaaaataaaaaaaattagctgggcatggtggagggcgcctgtggtcccagctactcaggaggctgaggcaggagaatcacttgaaccagggaggcggaggttgcagtgagctgagatcacaccactgcactccagcctggggatagagtgagactccgtctcaaacaaacaaacagacaaatagcggtaagtggggcacatgcctatactcccagctactcaggaggctgaggcgggaagatagcttgagcccaggagtacaaggctgctgtgagctattatcacgccactgcagtccagctaggtaacagagtgagaccctatctctaaaataattaataaataaaacaaaataattagccaggtgtagtagccagtagctactttgggtcccagctactgtagtcccaggtactagggtggctaaggcaggagctaattccttgagctaaggaatttgaggctgcagtgagctatgattgtgccactgcactccttcctgggcgacagagcgagaccctatatcaataataattataataatacagtatattttacataatagaccatagagctcaatgaatcctcctcacaaccctatgtaggtagatgttatcatgatctctgctttccagaatagaaaagtgaggaccagagagggcgacctcttgtccaaaagcaatacagccaagaaggggcaaggagggttttgaaaccagtcggccaggctctggggctcctaacaagcaaagcagcctggtttctaaaactatagcttctggaagcagccaattcacaggtctttacctcctgactgtgagacctccaaaaaatgaccagggatcttggagtctgtttccccctttgtgaactggggacaatagaagctacttcccaggtctgcggggagaaattaggaacgaagaaggtaaagcgcagagctgaggagctggtctacaggtgctctatacatattagtaataattattaagtttgctgttacaatcctctctctctctgtgaacaacccctaatgatgcgtggctttgagagcaaaaaagtcagggcaaagttttgccacaaagtccagagggcaagacattaaatctaactctcaaggattggtgttggcaagaaagcaaacctctcctccccacgctgtccttaccccgcgtatccgacgagcctaaagtcataggtaagagatctgtagaagcgacgtcaaggtgtggttccctctgtaaggcggagctaaacggtgcattcgcccagcggggaagctagaactaaatgaccgctctgccgactggagccaacgagaatcggcgtaggcgcaatacgggcggaggatggggacccgcccccggggtgggcggggcgtcaggtacttaattcgcgcctggagggaccgaaggtgccgagggctccgcatcgcaaccatggcgctgcgctggggcatcgtgtctgtcggcctcatctccagcgacttcacagccgtgctgcagacgctgcctcgctctgagcaccaggtctgcccgccctccggattctggggaagaggaggcggggggcgggactccagagtctaaaggaggagggagtttagggttcaggactagtgagtgggtcgtcattgcagtgaaacgtctgtttccttgctacctccttctccatctctgttctgcaaacctgtggggaaaagaaagatcagattgttactgtgtctacgtagaaaatgaagacataagaaactccattttgaactgtactaagaaaaattgtttctgctttgagatgctattaacctgtaactttagccccaaccgtgtgctcacagaaacatgtcctgtattgaatcaaagtttaatggatttagggctttgcaggatgtgccttgttaacaatatgtttgcaggcagtatgcttggtaaaagtcatcgccattctccattctctattaaccaggggcacattgcactgcggaaagccgcagggacctctgcccaagaaagcctgggtattgtccagggtttccccccactgagaaagcctgagatatggcctcgtgggaaaggaagaccttacatcccctagcccgacaccagtaaagggtctgtgctgaggaggagtagtgaaagagggaggcctctctgcagttgagataagaggaaggcttctgtctcctgctctccctgggaatggactgtctcagtgtaaagcggaccattcccattccttctattctgagataggagaaaacctacctgtggctggaggcgagatatgctggcagtgatactgctctgttactctttgctacactgagatgtttgtgtaaagtgaaacataaatctagcctacgtgcacatccggtcacagcacctttccttgaacttattcatgatacagattccttttctacatagacacagtaacaatctgatctctctttcttttccccacacaaacctgagtgtcttgaggtttggaaaggccttgatgtaagctactatgaagataatttcaatattgggggatttaataacggctttcccccagatctctctttcccagggcccaaatgtccagcccccgtcatctcttcccccaggaccacgtctccccttcccctggcc

SEQ ID NO: 97514 - DNA, 13196 bp, Homo sapiens
aaggtgatgcacaggtttgtattggtgagaaacaccttttcccccttgttgcctatcagggcatcatgttttctgttattttggtaagtgtttaaactagaatggaatttagaagctagaaaacttctcattaaaagattataaatcacgggccgggcgtggtggcttgcattttctaccccgaaaaattatttcactttggcaacacgtgtagatatgagcaataaaatgtgccttatacaaatattgtcaaagtgcatttatggtgatataaaaccctgttgtaattctaatcagtaacattaagtcactcgtattgtggagtgaaattcaaggatgaattatgcccctcaagtgtgggttgcttaataaaatagagtgcattttagtgtgcttccaaactgcctgaaattcagatgaggcaaagtctttcccacccaccctgtagctccctgagtgcttttcatgtaaacattaatacgtggggactcgcgctgctgcgccttcagaaagtcatccttaatgtggtgcaattgtattgaactgtccactctgctattaaatcaatcacagggaattacaaagcaatgattatctgggaaaatttcagctttctgattcttcccatcaaatgaaacagcaatactgttcctggggctccgtgggtctgcgtttgggatgagcaagtggagattctcttagttttttatatgcaggtgatgtttgttcacaaatgaatgaagaaaaaattcatgaatgaaaaaacgaatgaagaaaaaaagtttccccccctttttttttttggttaaagaagaagccacatccgcctttctcatattcttggtgttacctggaaaatgagataacccagatttaactaaacccaatgagaagctgattctgccaatctgattctgccgattgcccggcaacgtgatttcttgtgtccatcattattttaaactgcatgtctaaataaaacagctggtcttctccttactccccagtggcaagaggctcccctctccgggtctccaggccctgtcttgcatggtgggtgtgtggctcggctgtgcctctgcatacgtggagaccgtccaggccctggagcagcggctgcccagcctgcaagttcctttcagaagcaaaggcacgtgagcgctcatgcatgccccaggccggcacagctgggtgtctgggagccgcgcagggatggcgctgacaggccaggccagtgccccagtccaggctgtcttcgcagggccctgcccctgaccactcaggaaggctggaagctgctcccaccaggcgaccctctatctcctctgggtgacaacactcccctctcggcttctccaaaggtcaagccagataacccggggcccggtgccttatctgcaccctccccctcctgtcccctgaggagggacagagtgcagaggggcctcctcagggagccggcgctggggatgaagcgtgagcctcaggtcctcagtcctcagtgggagtcggcccagggcctgcggaatcctcaactcaggggtcgccaggccccgtgtccttgcctctccctgcgtccttgcctcccagtccccgtccacacaaagtcacatcactaattcacgtggcaccgaatgaggaagcaggtgcaggtggctttcctggaaatggggatctcagatgccttggggcgatgtctccccacagtggggccagtttgcctgccagcttcccacgtgcctgtgtgtccggctggcctcactcctcccagctccggcaggcctcgggttgccttgctgtcgccatgctggcctatctctgcccatctttttgtgagtgtcttcttcctggatgtctctgtgtccacactcccctcgtgtgaggacactggtcttattggatttaaggccccaccagtcccagtcggtagggcctcatcttaccttgattacatgggaaacagccatgttgccaagtgaggccacattacaggccccaggtggatgtaaattctggggacactatccacccagagcaggtgccgacacactcgtcccaaggcctggcgagcccgacgccctcagctcagtccaccttcaggtcttggggctgtcatctctgcccccctcctgaaggcctcagcagggctggggtgcacacagggccaggactctgccacggagcagcagtgcctgctagacgtggggcaccccctcgtgccatgcctcacccaggaccatctgggccatgttcagtccctgagcagcaggagttggcaccagggcctgggtctgtggtgtcagccccctgccaggtggtgaggagccatcttccccacagaggaggcggctccagctccccggggcttcacgtgggacaccgcagggggaagggctcaagaagtcgccacctgcgtggctgtctgggctgcgcggcggttccctccagtgatgtgcaggaagatggagggttaatgcccgcggacggcagctctttcacggctccaagttgtgtgtgacccagactcgggagcacagcagggaaatcaggagccggtcttgtcccaacattagagagagtgaggaagatcatggattaattaaataaaagactaagcaggacaaacctttgaacaggaggcataacatttaagaataaaaccagcgcggacgggtaaaggtcggagaagatcaagtaaggtgctaatagttgcactttttccattttcctatcgatcaatattacattttttccaagctaaaatgcagtcgcagagttattgctgaccttttcctcacccttccattgtgtataaaatcacagcaaaataacaaacgactttataagccacagaatttttctgatccaaacccctcaggtgagctaagatctccctcaaaatctctttcttttagaaataggaggaatgggcttctctctgctaatttgctgctggagaacacttgcctttaaaataaatcaccgtttaaaaactggtttcatcatctccgccagccacgctcagaggatggtcgtgccatcctttctgagtgttgactgcgtggttctagaaggccgggtctgatctcacacaaatgtagacatcgtacccacgatcaatgctttcggaagcagggttatgagtccatgctttgtcaatcgcagttgatcagatcatgctttttctgtcggagaaagtatttaggtcactgtccaaaatacttcttaggagctgcagaggaaaagtcccgcgcagagaggaaaatccacacgaaacccgtcttcagagtcgcgtcctgggccaggctttaggggagagactgacccacaggccagacacacgaccatctgctcatttccacggaagctgagcttgctggctgtggtcgtcagggagtcttggtggaaaccgtgcacggggcgtccgcatcacgtgatcccaggagaacagaagagggaattgcggtttaagatccaaacaagtggcagggcacagcggctcacgcctgtaatcccagcactttgggaggctgaggctggcggatcacctgaggttgggagttcgagatcagcctgaccaacacggagaaaccccgtctctactaaaaacgcaaaaaaattagccacgcgtggtggcgggtgcctgtaatcccagctaccttggaggctgaggcaggacaattgcttgaacccgagaggcagaggctgcggtgagccgagattgcaccactgcactccagcctgggcaacaagagcgaaactctgtctcaaaagaagaaaagaaaagatttagattttaagttttttagtgattgacctaatctagaaactgtccctgttacaggacagactcgagtgactggattagcagagctcatagtttgcggcgcctttgtgaactgtacggcactgtccacagcaggcttttctgtgggtgctcagtatgattctcacacgagcagccggtgaactgaattcccacacactaggatccagtccattaacacgaagcctctcctattttgaagttagtataatattttcaagaaggcaggttaattttttttaatactgtattcatttagttctgcttaaaactaatgaggagttccagtaatcatttatcttaagtaattttttaaaaatgtatacatgcaagcatagcttgccaagtagatgtggctgttaattggaatttatatttgcacttcaggactcaggattgggttaaaaggtacattttgctaattacagtgggttcaaggtgtttgttgcgcagaatcctgagccgtggctggatggccctgcggcagtgtgagtgacagagcagcatatccacaggttcacccccagcagcgaggggacctgcccagctccggagagttgacagagagctgaagcaggaacggggctgggtcccgccgcagcccctagttcagtccaggtgggaccctcccaaggctgtggggagggagagtgggggctgggagacaaagggcaggtgggtattagtgagcgctgagtcctggggcagggctggagaggtctggagccatttgggttctgagataatgcaggagtcctcccctcacccacatgcctcctctttcctgaagggttccagggacagcctccaggaaaagccaggccaggagtggggagcgagaccctgggcctctgcatgccagtgtgggggcggctcactctccaggctcctgtgggtgaatctgaaaagaggagccccttccctccagggctcagagccctgcaggccccgccagaaccccgagcagggagcaaaccacccgctggccctagggagcctctcccctcccgggggaagactggctgacccctgcaggcccaggcagctggaggcagaggtcgtcaggcccaggtggcagggggccgaggtcaccgggcctgggtggcagggggccgagtttgtcaggcctaagcggtggagggcagaggtcaccaggcccgggcagtggggaagggaggtcaccaggcccaggaagttgcaggggggtggaggtcactaggtttgggcagtagggaaccgaggtcaccaggcccgtgcagcggcagagtggaggtcacgagatccaggcagtggggggtgcaagtcaccagcactggcagtggggaatggaggacaccaggcccaggcagtgggggacagaggtcaccagcccaggtgtgtgctgatcagcacaggccaacgaactctctgagcagagtcagacgtggcccttgtaaagacctcacttcgggtgctgggggggcacttctcactagtaccagctccttggatgcctcccaccgcagctgcgttgttccatgcagaatcgcagccaggcagagcctcggggagcctgagaaggtccccttaagctcgaggagaaactgtcccgagggtcctggatcatcaccatttattacagacatggctacaatcaactgaacagccgagctcgattctgggtcccccgtggcacaaaacgctcttaagtatcacccgacacaggtgtcagcgccctgtgtctggggtccacagagaggaaggaacacccagtcctgccctggagacgcccaccaagaaacaagacccccacctgagaaccacacgggcagggacagggaggcctccaccagggagccctgccagctgcagctggcttcgggggagggctggagagggacactaggacagggggccccaccgacaggacagtgtggagggagaagagaggagagaaagaccaacccaatggggacccacggaaaggccccagggggaagagacaggctgcggacaggggcctggcctctgggacacagaacagccgtggtgtgagaacagcctagaaacagtgtccacaagtgtccccgacaacacgcagtcagcccgcggacagcgagggccccagaacgggcagctccagagcagaccagtgctgtttaaagatcgccagtaacagctctcgcaaccagagccgagtgccccggaggccttgaggctgtcatcgtcacctgctgcctccaggaaagaatgcaaaaccctaaaataggaaatgtggggccagcagaggaggggccggcacgcagtccttgaaagtgggggctgttgcccgccgcctcttcttagggtaagaacggggagagtcatcaggcctctgtctgtggaacagcagctccattcaacagtcatcaaaggtaacagacaaattagcattattagtacaaagtatacggttcagcaaaactaacaacacactgaaagatgaaaaatgatgactsgtgcatgtggcttttatttttaatgacacaaatctcatctctttgcagagtttgctatcttcttcaaactttgcagccaatctcacccacggattgaagaagacaacttgtaaataacaggaggaaacttaagtagagcatttaattttctcttcagttaaaataaaaaaagtaaatgctggaaatggaaatgatgacgagaaatatgcaagaaaataagccatgatttttctggcacagcactttatctttacataaaattgggattttgttgataagcatttttactgaagccaaaaagacctctccttcagttatgtttttaatcctaacatctggatagaaattaattgttccatttacaaattaaatgaatcttgtgaagaataatgttcaccaataaaatgtgcctgaaagatctggaacatcagaatttttcttcctgtaaaccacaaaaaagaatttttcatatgaaagaaaaccatgaggtttatggagctccagagcgtttgtgagcaaatccaccggggaagcccatggtggcatctctagactcaggtgagggtaatgcgtctgcagagtgagcctcagcattgggaccctgtgtgaccaaaggcaggacacggccatcgcagcacagaggggtcaccgacgcacaacagggctcccrgtgcacccgcagcagctttcttcaaaattacccagacattagagcaatgctagcccctcaacgtgggctccaagaacktgggaagtcagcctgccagccacaaagctgccacgtcctcccatccgggtgtgaataaagcacccacaaatgcctccttagttggaactgaaaaaaaaaacaaaaaaacattcaaatacattcctgtattttattgttagatgcaacattcgccttggtttatataaatggtgagatttcccgatgcaaagttttcatcgtgattttctggggacctgtcatgaagatggagattacgtgacaccacgtctgagccccgtcagctgctgccacacctgtctcccggcaagctgacctgcccctcgtctctgtctctctcctccagctccgaagactcggccctcactggtcgccctttgtctggggaaggacagatgaggccccggggggcagactatctcatttcccttccatttacctcgtaatagtgtctacaaataatctcccgcactggaaaagaggctgcctgtgacttgtttagaatctcagtctgccaatttctccatccacatttcatcccgaggggtctaatcgctcccaaccctctggaacctgtggggtccacactgttctgtgccccaggctccatctctgcccggagggttcggggttgtgggtgagttctcctatgggcacccccagcccgggacggagccatgatccatttatgagccaaggctgtgccatgccttgctgatttattttcctctttcaataacatcatagcatctgagaaaacacttcacttgccctcattttaaaagatataatgaaatctcatttttaattacctgaacaaaaaggtttcaactccatcagatcgcctctcagggcccgcagaggtattaacagtctccagaaccaattacctgcatttcctttttacttattgcaaatgtgaccttttgtgagaatttgattgtgagcctcccgctgtgagagggtaaccatgggcgggggcagcgtctgaggcccgtctcccctcacgtccgagctgctgttaattttaatcccctctgatggctgcaggacaagcaggtgtctgagacccagtgcagagcgggcggcggaggtgccagctcaggaatgagaggaaccgggctgtgtggtccttccagacacaaacccacgcccacgacttggagggaggggcacctgctccgatcttcagcaggaaaagaaaacgctgttctgcctgtggttccagaatcacctctgccaccgtggaaacatggatgggccggggcggcaggcacgaggctgagggcctcaactgggtttcaagccagaactccaagacgccaggtggagcgagagggcgggtgtcctggctggaccctttaaaaggtgcaaagaagggtacacgttgaccccgcatccgaaatggcacaggcggcagaggtaggcctaagaagctctgaatgcccggagtggtgggagccctgccagctctgcagacgcccagggaggcaggagcagctcccagcagtgacttggagaaaggcgaacttgatgggggagacaccactgcctggcccagggcagagaagagggagcagccgggaggtggagggtcccacatccctgcctgacagagggctataggaaggggctccggggcccactggtggatccctgccacctccctggtcctaggtgggctctgcagcagggggcctgggtagagacgggaagccacccggagggacaggcagggcgcacgagcctggattagcgagcaggcacggccccaaggatatgccacaggaggggcttctctcaccaacccccaggctggaagtccaaggtcagggtgcggctgggctggatcctcctagggcctcgatcctgaccgtgtagactccctgtgtccttgcagggtctgcctctgtgcctgtctgtgtcctcacctccttctagaaggacacctgtcctagtggatcagggcccaccctaatctttagagggcctgtctccaaacacagtcaggttctcaagcactgggtcaggacctaaacatatgcatgtggggggcgtcattctgcccatgacagatacagaaatggaacccaggctgcgctggccactgacccctagtccatcccacagctctgagaaggccaggccccaacgggtgagccacaaaattcagtgtacgcatgcaacttaagaggctggggccctctttaggataaagctatgaggatcggtgatgaactctccaattctcaactccagccttttctaccacatttggcagtttttcaggttaatcagcacagcccttgagcagggaaatgaggatgtgctgtgggcctttgagttgctttcacacgtcggacacccccgagagcccggactccaggaatttcaccttcggaggggttcaaccgaggctgagttcaaagccccacctgtgccccttcatattagtaagacagtccaccatcacagtggggctgcagcagacccttcgtattagtaaggaggtccccgccatcacagtggggctgctgcagatgcaggtgcggtcatgggaccagtccacgatgctgtcacttttacctatagctccaatttttgacttgtgtgcaaatgggccagcgtggctctcctggccatgggggcctcccaaccattccttctcagagctgggctttggcgccaggctctgctctcagggactcacgcccatgccctgtgggctctgtggccggaggaggcggaggcaacacccagcaccaggtcctcacagtctttgcagcgcgaggtgctcagcggagatcagaagccaccgtcctttgttcacacctgggctgggcaggcccctgcagctggtctgaacatgggtcagatgtactcagaaggggccaccgggatgtgttcctggcctcaagcacacggtgtcctgtgtggggacagtttatcgctgctcctggcactgctcacaccgcggcacgtgcaggttgcgttttgccttcagttgagccctgggcgtgcccggggggtttctgaggtttcttgggggtctgggctctcatcacgtaaacaaacagctcaacggtctagccaggaagtgtgaacccaagtcaggtgggatgagggctactttaaacaaacaagctactctgttttgttttgttctcatagggatttactttaagtatttctaaacatagcttttggaagattgtggttttttagagaaataactaattttatgattcagacactacagtttggttacaaactcacccgtgtagtggaaacagatgcctgtaataggctctcggaaccgcaggtgccttttaagtgagaaggaaggaaaacagcaaggaagtttccctttggatgcctcctcccggaatccctgcggctggtgatggtgagcacacagaggtgccatcctctcctgccacagagctgatgatggctctagggtgaggagcgactcgatctccctcctgacctgactcctgaagcagccctcttggtgcccctgcaacagcaggagtggaagcacagcccactcccgagggagacggcactctctcaggaaggaggcagccccagcacccctgcgggcctcaaggacagattctcaagtccccctgaccagacagagatgagacaccaacacccagagctgcccgaagcattccaagaagctggaaggaccgggttttctccacagaggccggaggcagggaaggttcagcccagcaaggagctggcaggaggaggagccgggggaagggggctgggaacagggaggggcacagagaggatggagagggtgtcccctccaaatccctttccagagccacctgctcctgctgcttcagcacagccagccccagagtgcctctcatccacagcgccaggccccaggccccaggccccctctggggatctccttccatctcccctgccccagcagcaccagggaagatgcctttctggaatgttcgcctgggcctggagggaatttcactcacactaagtgacatcttttcctattagaaaacacacagggagtggaaagtactggcgcaagcacacacagttctggaagcgacccatcgtgggccgggcacctccagggcgctccacggccattctcacggcagaacaagctccattcattaatgagggcgcagtaactcacttggagtatgcaaatgtgtttgcagaggaaaaaggcattctcaacagtatataataaaattaaattaacagaaacatcagcaaaatcagtgacactaataaagtgcctcccgtccccgcactcaggggagaggccaggaaacactgaaacacaccagcctgcaagcagcaccacgaccaacgacccctaagtactctcagtaaaataacgagccacccaggaaaatgaaggcgagaaatgagaactgctgggctccaccaggactgtgctggacatttgtttccgaagtacatgtcccatgaagagatgacaagacagggagcagtcggccctgggggggttgtcaggtgaggctgtcgcccagcacagggaaagggccaccttcctgggagcccagattccaagaaaacaacgcactctgctttaaatggtcagcgtgtctggctttcgttctgatgcgtccacgcagcgcttccatcagcgcccagaagtcaggtccacacatattagaaagagccgcagagatggagaaggaagcagaggtggctacagagagtgggagggaaggagagggctgtagcctgcctctgccggcactggggaggaggagggggaggaagagaaggagggatgagggaggaaaagtggaggagggggaagtgagaggaggggtggggaggggagggccaagggcattgggaccacttctggtgcctgtggaggtttcttctggtgaatctccaccttcagcgtgaacttgcttttctctgtgaagctctatgcaggtattatagcaatgcaaatagtggcctaggaacaaagttttcggatatcaagagtaactcagaaccacatgccagaccatgaaatcacgactcacatgttttgggggaaataaattgtgacctttattttgaacatttacatgaaataaatgaatgcattgctaattgttaaccagatgagaagaacatgagtgagactgtataaagactcagtggaatgcatttgactgaagatgatggtcaatatgagagttaccaaacacagcccttccctggtttaaatggacagtgtgcagacgtttcctctttttatctgtcaaaaacatggacgctatcaacgtgcttcatgtgatttttagagaactccatttaataaaaaggcatgtcccacgaaacacagagaaatccccttataaccctgagttcagaggacaatcaacatcttcaaggaaattacgcgacaccaatgcgttactgcacatttttagaaggtatttattttcctacttaacacatacttacattttgctcgccctggccaagtgttctcacaaatgctttgtagattttaaacatgtatataattggggaagaaaactgtccctaagtgaacaaaataaaatctcctcaagagaacaaacacatcttcaaagctgcagttcttaagggtttcggtctcagcatcccttacagttgtaaatattactgaggaccctaaagagcttctgtttatgtgggcaatgtgcgttgatatttaccttattagaattaaaaccgatcatttaaaatatttattgccaggcgcggtggctcacgcctgtaatctcagcactctgggagaccgaggcaggtggatcacgaggtcaggagttcgggaccagcctgaccaacatggtcaacgctgtctctactaaaaatacaaaaattaggtgggcacggtggtgccctgtaatcccagctacttgagaggctggagcaggagaatcacttgaaactgggaggtggaggttgcagtgagctgagatggggccactgcactccagcctgggtgacagagctagattccttctcaaaaaaaaaaaagtattaattcattttaaaataaaaaactattacgtgttaaatagcaaattttaaaaaaattattcaaaggaatgaaaagaatggcagtgttttacacgttgcagtctct

SEQ ID NO: 97515 - DNA, 14603 bp, Homo sapiens
tggttgcccaggctggtcttgaacccctgggctcaaacagtcctcctgcctcagcctcccaaagtgctgggattacaggtgtgagccattacctggccacttgaatgggtctttaccctattttccttattttcctatactcctcttaagtacctacaaagtgattttcattttctctgtgctaaaactattctctcatacgtttcctataatctaaccacatcctgtgactgccttagttcttttctctcttacatggcttctgcatctagttttattaactattgttgtctttttgaagcatttctgcccttgaggtccaaagtgcttgacttctttcctttttaaatcattttaactgctcctttgtgttttctcttagttttctttcctgttttctcgaagtgatactcctcagcttttgttctgtggtctggaaccttctttatgctctctcttgtagtgaacacacatgtactcagtctcagtagagacctattagatacctttctcatttccttctctagccttcgtgcctacacccctcatcccctcttttttttctttgttttgcttgccttttctctgactctggcaccacacctcatgtcaaggaccataaccattgaaggctgaattactgcagcattccccagactgcagttctgcacactgccatcaagttaatcttcttaaacatgtcatcctccactcccctgctgacaaaccaaatgtagcttcctttcccttttactccgtaagcgatgcgcatgctcttttccatattgctgtccatattcatgccttttccttgatttgaatattccctctctctaccttcaagccaactaaatcttacctctttctgcctgaactcaaattccatctcctctttgctcttcaagcctatgcatcttctcccttttctgaacttttcttgtacctatgtcaggccctgactctagtgaatagccacctgggaacttctacctcagcctaatggccacaagaaccctccattctcagctgccattacttactgtccttgtccccaccctaccccagcccctcatcctatcctggcagtagttcaagttcaaggtgggattcccagccaccattgttgttttatattaaacatcttataggagatttaaacatagtccaaagtaggcagaatagtgtactaatgtacactacccatcttcaagttgctttatttatatttcaccattctcatatccccccataggattatttcaaagcaaattccaaacgtatcactacctctttaaatacttcattagtctctctgaaagataagtattctgtttttaaaacaaccataatgccattattaaacaaagtaggattttctgatggcaagactagggagaaagtggagacagagggacagagtttacatggaaaatacatgataaattattataggtatcctttatttaaaaaaaaaaccctcctagcaaaagcccccccccacacacacaccaaaattgtgtgtttacttcaagaaacaagacagaaactatgagactgctttctattcctctgtgggccagggaaggagaagacttggagtcagaattaacagggactaatagaggaagagagtaaagctaatagagaaaaaagtaaagccctcagaataaaaaaaaaaaaaagatctggtcttactcagaggtaattccgcccactctgctcttccctccaaatattttcccctaggccctgcccagttggagcctttgagagtccctgtgaatgactgggggaattattttctgtacttggctggttttgataaaaggtgtcctaatctcatcatattcctggcagcacgaggagatctgttcctggcatcccaagttagaattctagacatattttcccacagaagcacttctatatatggttagattctatggtgcttgaacaatataaatttaaaagacttgtggattttcctgggaacctaaccgccatgtatgacattacttctgtgggaaattgcttttgaattccaaataattgacttgcaatgaaatttgggttccagactgcctataaagattacaggtgtaatcagtctcactgatttaatagtcttgccagattatatgttaggttttttccccctcccaagttagattgcagattgtataaagtcagactttgttctttcatgtctgccagcacattgcagagcatgtaggcactcagtataaatttgtcaatggctagattggttgaaaactcaagtatttgtttagcctcacacattttctctttttgactctttacttttttccttcttcttttcctgtaaaaggttgccatccaaatagcaatgcctggtgggttgaagcagtggaagtatttgagaacagtaaaagaccttgaagaggatgtatttttattttatttttaattcataaagccatctttccactgccacaactaagctcccctcctgaactcaccagtagaagatggaaaaggcagttgcctgcttctatttctttgtaccacagtcattgtttacctctgtggccctctctagtgactgtctaaacctaagaaacacaaactgccttgactgatcaatttccagacagctagcaaacttagcatcaggtgtggaaattctagaagacttaacatagatgtttgtttttgtacagagaaaaaggcttttaaatgaaaggtttcaaagaaatatgtctctgtagtttatgactgttaaatattctagaaagggaaagctataagaataggactttgggctggatgcagtggctcacacctgtaatcctgtcactttgggaggccaaggtgggaggatcacttgagcataggagtttgaggccaccctgggcaacatagtgagaccccatctctacaaaaaatttaaaaattagccaggcgtgatgccgagtgcttgtaatctcaattacttgggggtctgaggtgggatgatcacttgagcacaggaggtcaaggctgcagtgaaccatcattgcaccactgcactccaatctgggcaacacagtgataccgtgtctaaaaaaaaaaagaaaaaggaccttgccctaagggtttttgcctaaaacaaaatctcctctattaccaatctgggcatttattaagcctgggaaacaaacttcttaaatggatcaaattcccagacaactagccatctgaaaatgaggcaggacatactagtgaatttaacataattgtttattttcctagggtagataaaaatagctttttcagtttgggaattttctcctttcaaaaaattgtttctgttgtgtattagtgttaaatatgctagaaaggaacagctgtaagaataggaatttgtccatagggacccacactcaaattgcttcattactttaaatagcactaagctaaatatatgtgctttctgagaaatagccatgtatttccaagatgacatttatgtatcaatttatataaacaacaggctctggaatatacagaataagcctaagacattgctgatacatgttgaagaaattgatccaatgtacagaaagaatattcatgacaatttgtagagaacatcttaactagagtaagttataaagcatctttttccctgttcctctaggtaattatgcactttatcttgttctaggagtataccatgctgtgtctgttatgcggcaaagccgaagatactatcagtattctccctgatgacccccgacaaatgactctcttattctaaggatccttctacagatctgttataactatattgtgttggtttacaatacagcaagcctgatggtttgtcttatttcattcatactgaaaattctttgcatattttttttctgcttagacttacttattctttgaggaaaaaaggtaatgtaggagctcattgttctctagagctgagctcttctgctaaagttcaaagttcacatcagtgtagccagagtgaagcatctttgttagcagttatgtggtcagaaaacaactagaatgggagcacacctggtgcccagattttggtttccaataaaaggaaccaggactccttagaaaatgaactgattctagaactgggatatgaactgtacaagatgagcctagagtatcttgtgccacagaaaaatgaagtactgaaattaaaaaaaaaaaatcatagtgattgggagtatgtcagcatgatcgaactgaaggatctctgaaaggccacagctggagcaatttgagtaacaaaataaagtagtattgggttataacccaaactatataataaatatttacaagcccaaactaatataaatgattgaatgggaacaaatctcttgtgcagaagaatttcaaataatttatgtagatactccccacttagtgggctctgcatagtgacttccttgcagagtataatatggaaaggggggaaaagagtaactttacagtggagaaatctgacagacaccagctcagccaggtgattgaggttaacatcatccatgataagcccttttgatagcatgtatccttgatagcatcacatcatacagaatgtgataagaatggcactttacctctgtggtcctcctccccagaactcagaacccaagtctgatcaggagaaaaacatcacacaaattccaattgagaagcattctttaaaatacctaaccagtacttctcaaaactatcaaggccataaaaaacaaggaaaatctgagacatggtcacagccaagaggagcctgagaagacatgactgctagatgtaatgtggtatcctacatggaattatataccacgaaaagaaaaaaaggtcatttggtagaaactagggaaatctgaatacagtgtggacttcagttaatataaatgagaaaatggtttcattggctttaaagggattttagaatatcttactttgcatagtttcatgagcactggccaggaggttataaactggcatttaggcctctctgccatttagtagcagtatagtcattaagcaaagcattactctggactttattgtcctgtttctatcaaattggactaacaaaaattgatataatacattcatcacagtattgttaggagatttaaatgaattagtgaatgtaagatactttagaaagcatgtaaagtactagaaacaatgaggtggcttcaattagtgctcattctgagacctaaatttaaagggtcaggcattagaaacaaaagtgtttcttcatatctaggagatttggaaattctgaactaaggtcttataagaacaagaaatgagcaaagtgttcattgtagatactagggaaaagctttgttgaataacagtaatgatgataatatctgagctttattaagtacttactacatgctaagagctttttaagcacttatttaatcctcattaacaaattcataaggtaggtgctattgatagtttagccataaccagatatggcttgttatttgtaagttatcatgaaaaggtttatattcactattctttatttcagtgtagcacttttagagccaaaaaaactcaggcacaaagaagttaaataacttgccgggtgcggtggctcacccctgtaatcccagcactttgggaggccaaagcaggcggatcacctgaggtcaggagtttgagaccagccgggccaacatggtgcaacctcgtctttactaaaaatacaaaaacaaaaattagccaggggtggtggtatgcacctgcagtcccagcaacatgggaggctgaacaggagaatcgcttgaacccgcgacagggaggttgtgatgagccaaggtcatgccactgcactccagcctgggagacagagcaagactccatctcaaaaacaaaaacaaaacaaaacaacaacaaaaaaagaagttaaataacttgtttaagatcacacagctagtgcagttaccccctctcagtaattatgtttggcaaatatgaaatacaaggatctggcaaggttaggaagaggttaagaatatcagtgacagtactctgaggcatctgggcatgtcagatgaagatttattattcagaaaagttaagtcagctgttgcagggatcagttgttttattcctggaaaatgtttttcattttgctgcaaatctatatctgacctgctgaggaaatcgtttggtgaaatgaatccagaaagcagagaaaatgcttcattactttaaatagcagcattaagcccattatagcctctgaattgtcccttccttgagtttgctaatgcttccaacttagtcatttgaagcccaagagtctaattttatatgccctgccaatgtcctcatctattgcagaatgtataattatctatttgttttggactatatgttacaaaaatttaaaacataagatcctctctctatatttcattattggtgaacccacattgtgctgtgttttgtgatattttatcattttctagattcttatgtggatctaataamgaccacttgaacccagtttcacagaatccttatttttctgttcaaattaggaattagggacatggatgaaattggaaatcttcattctcagtaaactatcgcaaggacaaaaaaccaaacaccacatgttctcactcatagataggaattgaacaatgagaacacatggagacaggaaggggaacatcacactctagggactgttgtggggtgaggggaggggtgagggatagcattaggagatatacctgatgctaaatgacgagttagtgggtgcagcacaccagcatggcacatgtatacgtatgtaactaacctgcacatcgtgcacatgtaccctaaaacttaaagtataataataataaaataaaaaaaaaggaattaggcaaaacatggctcttctttttactttccttcctgagatataagaaggaagagaaatcacctgtggggataattggaaacatggggataattggaaacgtgggcttatcttggcacctcctttttctctaatcattctgtgatgtacaggtctggctagttaggctcctgaagttaaaagctcagccactatttgttgttttgtttgatctagctctttctcacatggttttaggttctcccagtactaatttaattgacatcagatagcttgggcacaaccagatatggcttgttatttgtaagttaccatgaagaggtttatgttcactgtcctttatttcagtgtatcaaaagtcctttcggtttcattctttcatgttgtgagcagggctagttatttgaggcgctcaatttaaaaatgtatgttttttttttactgtagtacaagactgttgtaagatacagtatagttggatagaaaaggaattaaaagatctgggtctagaattagctttgtcacctgctaatgatgggacactgagcaagtcacttatcctgtctgtacctcagtgtcttcagtggaaaactagaaaccmtcatgcctccacagaatttttaaatctaatgatttttaaatctaatgctgtgtgcaggcagctgtcagtggtctttatgaagaaaamtctgagctagaagaaagcactgttgtgttatggttaagagtagaggctttggagtcagactgacctggctttaactttcagctttgctgcttcctaagctgtgtgtccttggcaagtgtcttgcccaattaccttttcttttaatagaaataacaatttttcatgggatctctatgagggttaaataacctagtgtatataaagtacctagcccagtctgtgcccatagtaaatattaaatgaatggtagtttggatgatggttgtgatggtgattataataaagttctagagtttgactcagtgtttttgagacaaggtctcatccaggctggagtgcagtggtgcartcatagctcactgcagcctcgaactcccaggcgcaagcaattctcccaccctagctgcctgagtagctgaaaccattacaggtgtacatcaccatgctcagccgattttttttttttttttttaattttttgtagagacgaggtctcactgtgtagcccaggctacatagtgagctcctgggctcaggccatcttcccgcctcaacttcccaaagtgttgggattataggcttgagccaccatackgggcctcagtgtctcataaactaaggagagatagctatgggaacatagtcatgaagataattatcgatttcagtgtctttaccctggcctcctaaaatcacttgttccaagctctggtttttttgttttgttttttgtttttgtaagagccctcaggttagtgawtctctctgtccctcctctgagttgaatagcattatctcagcacttctgggagagttgttaaggagacttccccctccttctgggtgcccctagggaaatctgattaaaagatttttgtttatctagaaaagtgggtgatattttaaagctttgccttgtctgtttatgatcacaagctaatacttctgaggatgataagggggacaaacaagatgaagaataaaggaaaggaaacactttctaatttctcttcattttaacaacagcacaactaaatatttggtaaacctaaacatccttttaaaatagaatcttccagtcttgccttccctgtttcctcctgagctgaatagatcaggttctgtctgaagcaaatagtgtttcccctcccaagtgaagagccttcattctagctttatggccttctcttgactttctgcagaataacttatactgtaattcccattcctttgggaatccctaaataattctttgaacttgggcctcaagggaaagactgaacacattgtactggtgtctcaggctctaagttgcctgtggcatgtttccaacacccgagatagctggctctgttactggatgtaacaacaggctatggtactgtcaaggtgatgactagcatccaagaagaattctctattttgtcaggaaagcaatttgtctgcagttactgctctaaaatcagtacatggtcctgccccataataattcataccccagctgttgactttaagagcaggaatctgaaaggcttgaggtttcaagagtgaaggtaagggtagccttaagttagcagaaggccctgcagaaaggtgtcaggggattcccactgtaatactcaggttacccttttgaaataaagcactgttgttgacaggtttagttgaaggtcagaaagtggggatcctaaacatctattccacattcactctcatatgatgcaagtgcttagaaaatggttagggtaagcagaacaattaaaggaaaaacattttcccttcagcattgggcttctcaagcagtgtgtccagtttggaaaactgtcccttcagggtttcagtgaatagaagtgaaaatattccatctagtggtcaaagaagggaagatgaaatgagaagtttccaggatgaggtctgtggggcaaggtgacaggcagtggcctctcagcaggtatcttttccagaacatgatagaacctgaccttggcggtggtgatatgttttgattatgtctgcactggatgaggaattggggacaccatccttgcaaggcctctgagcaaaactgtcctcacagtgaggaataatgatgttgcaaatggcagattataaacagcctgactctgaagggaggctctctcccatccccaaccccttccttcttacagaggaagaaatgagtccagtcattcctgcctctatttgtctggagcctgaatttgtgaatatgtgattttgagaagaatgagggtgtaatgtgaactttatttatttattttgagacggagtctcactctgtcgcccaggctggagtgtagtggcgccgccatcttggctcactgcagcctccacctcccgggttcaaatgagtctctcacctcagcctcctgagtagctgggattacaggcgtgcgccaccacacctggctaattttttgtatttttagtacagacagagtttcatcatgttggccaggctggtctcgaactcctgacctcaagtgatccgcctgtctcggcctctcaaagtgctgggattataggtgtgagccaccacacccgggccatgaactttaaaaaggagggagaatcagtctagcaaaggatcaaacacccgagatgtttgatgatcaggaaaaagataaagtgctgtttgtgttctcagtaactacaccctctatgcccttgctattggtaaacattaactaagctgactgcccaggaatttcccaaggcacaagtcagatctagttggcccagtacccacagtgctattgatgcttcctgactgtaatcctcctaacagcctcccaatatccccaaccaaagggctcattgtcttttcctcctctacctcccattatcactttctctttttccccagttctgaagaagagctgtaaaggaataatataattcacatttcccgtaactgcacctgccactgcagaccttggccagcgcttgctttcctgtcagtaattagggcatcccttgatccgtcagatcctcccctcccaaagctttgtgtgctagcagctcctctatcccacctgcagtttgtagcttccctccgccctctgtcaaagaacacacacacaggctggccgtttccacacctgccctttattggtctcttctagcagagtggctccaggcccttcacgcctctcagacaccacccatgagggtttaggaaggtgccatcattctgtgaaggcccagagcttacccaagtcttggagcccaagttgaatcaccaaccagagggttgggagaggaaaaggaaacaggcagaggggaaaggcaaggctctgcagtgaaggggactgatatcaagggaatgctgaggtccagcagtgtctcctgaaggcatgctgcatcctaaggctcctcaggactggatggagtaggagatctgtgtgttgagcagttcacatctatatggcaactttaaggaggcgcttgatgtcaggctcaatgttgatggttgggaaggtgcggctgtagcgtcggaagggctctccctccggccctatgaggaacttctcaaagttccaggccacatctgagcggcgcacagggctccaaatgatgagcttgggatcggtcatgagggaaaatgggtcatcataagggtaggggagcttgtccttcaggtaggcgaagacaggatgctcgttctgcccattcacctcacatttttggacaagggtgaaggtgggctggtatccacccccaggacggacatacttgagactgttcaggatctcctcattctgacagttctcctaggggaggaaaaagacaaagtgcgtggacagtgggtgggggaagagaaagatccacaacatgaaactctttcaccctcctacactccctccccagggtcattctttttcactgtgaaagagagagagacaagacagacgaggtgttgctcactgcagccttgaacttctgggctcaagcattcctcctgcttcagcctctttagtagctgagactacagacacaggccaccatgcccggctaatttttttttttttttgtagagatggggtctcactttgttgcccatgctttggctgctcttcaagatttagcacttctgagctgttgcttttgtctccagtctaccctgagcagttcttaaggtgtttgaagcagaagaaagagaaaagaggcttaggttatactgcttagaacctcctcttcaactaacctaccgacccacctacccataaatccatacctacacacacacccctttcctttcctctgccctggttttgcctcgcctgctttcaattgcacgtgtgttgagtatagcctttgcctctgcctactcagctccttgaactgagggtgaaattgagacccagaggaatgggatttacagcttcttgctttcttcttgccttgtcctagaactgaagtacaaatgggaagaagctttgatgaaggaagacccccatccaagaacatctagttttcaggtgccataacagcagagcaagttcaaggcaacaatgaatgtgtactctaaatggaactacttagtaaccaacaggcatgaagtaaataggatacaggatttagggtttggcaataggccagggggagggggagttgaggaaataagtgcttgatggctaaagattgtgagtatgtaattatcattcttttcttgagtaggctgctacccaaagactgctgcacctcctatccactcactgctctcagctacgcatgctttggctcaaaacctggtccctgcctttccctccccactgccatccctgtcctattccctctcagcatcaccattcatgacaatccaaaaggcctatgggaacccttcttttccacctctacctttccaatttaacagacagataccttcctctgggagaaagttcctgcttctgacctgtgagaactaactagttcagtcagttccaggccatcatgacatcatgagcccagagctgatctctagtggacttctctgtttttgtttctgttttttttcctgagacagggcctcactctgtcacctaggctggggtgcggtggcacaatcatagctcactgcagcctcgacttcccaggctcaggcgatcctgctacttcagcgtcccaagtagctgtgactacaggcacatgccaccatgcctggctaatttttgcaattttttgtagaaacaaggtttcaccatgttgctcaggctaatcttgaactcctgagctcaagcaatctgcctaccttagcctcccaaagcgctgggattataggtgtgagccactgtaccctggcagatttctatttcttgatacaaatggctggctggctcctggtaggttatagactccctccagcaacttgctaggctgaagagatggtgtgaggctggaggtacttctggggctggagggacatctcgaaagagggtttgctacttctgtctctcctgctctagaaaaggccagacagaaaacttagggaagaacagtgagagcagtgaacagtttgggctcaggtttgtcacagccagtgatgcttcagccttcctgctttcctgtcttcctcaccttcataccactgtgaattgaactaaggggattataacgagagggttcgcttgggttcattctccctgcttgtacgttaaaatcataggtggaaatagaagaatccctaaaagagaactcgaggtgtgtgggctgaagatctataacagcttgacccattaatcagaaataggtgcatgtaatgcccagaggcacgtgccttttgaaaacctttctctttcctgcttattttctttccacttggctaatttaaaccaacaaaaatcatcctcaatctaaataacagtttgcttgcatttgcatagtactttatatttttcaagttacttttgtatatcctgtcccctaaacatcataataatcctatgagctaagtggtattatccccaatttacagatgaggaaactaaaccgaaaaatgaagcgccctttccgagggcacagagccattaaatagcaaaaccaagtccagctagagctaaggtctcttgagtctgtccaattcttgtttgattcctggcctctactttctccactcatttattcaacaaatatttaatgagtgctttctgtgccctaggcactgaggacacagtggagagaaacacagacctggaaccagccctcatggagtaatatagtagaaagacagtaaactataaaaatcacacagcctcagtgtttaatcttaaaaaatatataccttctcttggtatgtcacatgcacctaaagacctagcttaacaaaacataccccattattccagacactccaaaacatggtcattcagcctctccttttatcccacctgagctacaccaacccaacacttttggtgcattacaaggagggacccctcacctgatgtccaaattggttgcaagggaagccaaggaccaccaggcgcctgggaaagcggcattgcagctcgttgagctgggtgaagtcccgggtggttgtgcctcagagcgaagccacattctcaatcagcacggccctgccccggaacgtattgaaatctaccttctccccatccaggctgatggcactgaggtcatagaaggacttggcaatgaaagccatggtgaagcgcagagtgagccccgcagagaggcctgagcccacttatgagcctattagaggggtggggaggaaggaggagccaggaaggaggacagaaaggatctaacaatggagctttgagcatccccaggatgacttagcaaaaacaggtccccacctgtaagtgctgtttgaacaaggaggttgctcctcctattaacagactgaacaaggccgcctccccgccccaccctgctgcaacctgggaagggccaatttgatatctatgagcagaggtaaataattcactgcttacaggaaaccagagccctaaaggtcgaatggag

SEQ ID NO: 97516 - DNA, 13549 bp, Homo sapiens
  misc_feature (1)...(13549): n = A,T,C or G
aaggatataaatagaattcctactgtgtagtaggctgaataatggcccccaaatatgttcagatcctaatcctggattctatgaatattttaccttcaagataaaagagactttgtggatatgactaagttaatgatctcaagatacagagattatcctggactatccaataggcccaatataatcataaagattcttacaagagagaggcagatttgcctagtagatgcaatgacttaagcaggaggatggggtgatatgagtaaggggccatgagccaagaaatgtaggtagcctctagaaattgaaaaaggcaaggaaacagactttttcttgaagacttcaggaaaaacagtccagttgatatcttgattttaggcttccagaactgtaagaaaataaatttgtgttgtttgaaaccactaagttcgtagtgtcatagcagtgataggaaattaatataaccacatactctcactcccagtgacccaagtggggagtttggacttctcatccccgcaactttgtgaattagaagtcctgattcccaagagaggaaccttttcatcaagagacacaataatagatcctttaaactttaacttgctgaggtttcccggttcaaggtccttgtgctaggagaccagcaggcaaggaagagtcaccatgttagttggggtaaatgaatccaatcatcaggaggaaatagcgttattgctacacgatgatggcaggaaggaatatacctgtagtttacactcaagaccatatagtggtctcttgatatgtcccaatatcaagtaaagtggacaacttccaaaacagcagggtaaacatctccaaatactggcttctctataaaagcaatgagaacacaggcaaaaatggtcagtcaactttttcagaactctagaaagtaactaaaagcttgaaataatctgaggtgcctctatttgagaaaaacagctaaatcttggtaaacagggaagcattttaacttgccttattcccagcccccacctcttaatacaatgataaatagtaatggtgacagtgagcaaccttcttactcttaactttagggagaatgcttccagcatgtttcaccattaagtgatatgctgtcctttgttaagcagtatccagagtcctattatattgttggcttatcatgtttcccactgcactctagtgtcacttttctaatgaatcaagtgaccctatatgtgtggagtttttctagactttctgttctgttctgttccatgggtcagtttttctatccatgcaccaatactatctcgtcttcattactatagcttagaataggtcctgatgtctcacagtataaatccttcaactttgttttttaagactgccttaggtattcttgaccttttccagtttcttaggaattttaaaattggctttttgatttttggaaaaaagaacctgctgagatttttttttaattgagattacatagaatatataggtcaacatctttacaatactgaatcttccatcttgaagttttattatatccagttgggtgtaactgtgaaatgagaagcaattatcagaaacccggattacaggatcccacctaaggtgaaaggtcctatacttcccatcagtgggatactatagccatcttctctgggctctctgctttgacagatgttttcaacttaagtattacctgtattcttcctctcagcagtatctcagtcctcagattatgcttgaccgtcaccgaagatgaacatattttatcattcactcatattctaatgtaaattaagtcctacttatttcatacaataattcgaactaatatcttcacagcactcctgagtcataaatggagtcactgcaaagtgctgtgcactgcaaagtgctgtgtgtagtaacaggggttccaatgagtgtatctcctacaattggtttactacatgctatactaggtatttaagatgtattgctttaattcttgtaaaaaagcaagagaacatacttgcagaggatcagatcttaggctctggaatcagaaaaatatgaatcagaaacctggctctgccactactattgactgattagttctgtgtccttggacaagtttggtgagggctaaattggatagtgcatgtcatgtatttcatatcttatgtggcaatattcttttccccaaatgatactaaagattagacagcttaaatactttgcctcaagacacagaactagaaagaggcagaagagggctagcatactgccaagcacatagaaagtattcagtaaatgtctgctgaatgaacaaaccacagtcagtatatactcaacatttacttcaaataccactatattctctgttgtttcctttaacttatgcaacaaacttaaaatattttttatttccataggtttttggggaacaggtagtatttggtttcacaggtaagttctttagtggtgatttgtgagattttggtctacccatcacccaagcagtatacactgaacccaatttgtagtcttttatcccttaccctcttcccaccctttccccgagtccccaaattctatcatgtcattcttatgcctttgcattttcatagcttagctcccacttatgagaacatatgatatttggttttccattcctgagttacttcacctagaataatagtctcctatctcattcaggtcgctgcgaatgccattaattcattcctttttatggctgagtagtattctgtcatatatttataccacagtttctttatccactcattgattgataggcatttgggttggttccacatttttgcaattacgaagtgtgctgctataaacatgcatgtccaagtatctttttcatgtaatgacttcttttcctctgggtagataacccagtagtgggaatcctggatcaaatggtaattctagttttagttctttaaggagtctccacactgttttccatagtggttgtactagtttacattcccacttctacatacacagcagtgtagaagtagcaaaaacaaactcttactatttatttggcatctacaaaaccagaaaattcaaatagaattttgatgggcacatctgaatttactttaatgagaagagaaaaaccataaagtaatttaggataagagatcaattgcagtaattcccagggtctgagaaaaagttatggcatatattttcaccatcaatcctacttgctttggttggaatgtgtcccccaaattgcatgcattggaaacttaatccccaatatggcagtactgaaaggtggggcctttaagaagtgattgggtcatgagggctggtgatccattcatggactaatgggttgatagattaatgggttactataagagtgggattggtggctttttttttttttttttttttttgagacagactcttgctctgttgcccaggctggagtgcagtggtgtgatctcggcttactgcaacctctgcctccctggttcaagcgattctcctgcctcagcctcccaccacgccaggctaattttttgtatttttagtagagatggggtttcaccacgttggccaggcttgtctcaaactcctgaccttaggtgatccacccacctcggcctcccaaagtgctgggattacaggcgtgagccaccgtgcctggcctgggactggtggcttcataaaaagaggaagaaaggcctgagtgggcatgctcagcccccctgatccctgcagtccccaccagcaacaagattctccccagatgtggtccctccaccttgaaattctcagcctcctccctaactgccagaaatgaattccttttctttataaattacccagtttcaggcattctgttataaaccacagaatacagactaggacactacccttcctaccagtatccctatcttccacttgaagaaaatacatattagtagaagtggggagtgaaggggttaaatccaagtgcatgtttcctactgcctcctcccactacagaagctagggtgcagatacatgatccaataagcttgaccaattggatggtgatgtaatttggatctcccctgcaaatctcatgttgagatgtaattcccagttagaggtagggcctggtggtgtttgggtcatggggactgatccctgatggcttggtgttgtcctcaccatagtgagttctcatgagatctgattgtttaaaagtgtgtgacacctatccccaccccctcgctcctgtttttgccatgtgaagtgcctgatcctacttcaccttccaccatgagcaaaagcttcctgaggcctccccagaagcagatgcaggcactaggtttcctgtacagcctgtagaaccgtgagccaattaaacttcttttcttataaattactcagcctcaggtacttatagcaatgcaagaatggcctaatataggtggtctctcctgggacttgaaatcttgaggaataatgaaaataaccccttaataaattccctttttgcttaagataacccagaagaatcagtttctgttgtaggaaacaaagacttcattaatgcatatgtcaagagaaaattcaaactagtttttacacatcctacctgtaaaagttttgaaagctactaaaaggctttctgagctgttaaatctgaaggatttataacagattgttattttcaaacacgagtattctatgatcggtttggggggnnnnnnnnnnnnnnnnnnnncacacacactcatgaaccacactgtgcagactcaatataaatgtacacctgagttgtgcaacattcaaatcaatgcagaaatcaagcaaagattagattcagtgaattgtagctatttcttggaaacattaccttttttttgagacagggtctcactctgtcacccaggctagagtacagtggcgtgatcttggctcactgcaacctctgctacccaggctcaaggcaggctcaagtgatcctcccacctcagcctcctgagcagctggtaccacaggcctatgccaccatgcccagctatttttttttcccccaagacagagtctcactctgtcacccaggctgcagtgcagtggcgccatcctggctcactgcaacctccgcctctcgggtttaagcaattctcctgcctcagcctcccaagtagttgggattacaggtgcccaccatcacacccggctaatttttgtatatttaatagacatgggggttttaccatgtcggccaggctgatctcgaactcctgaccttgtgatccgcccgcctcggcctctcaaagtgctggaattacaggtgtgagccaccgcgcccagcccacatccagctatttttacaatttttttgtaaagatatagttttgccttgttggacaggctcgtcttgaacttctggctcaagcaatccaccctccttggcctcccaaagtgccgggatttcaggcataagccaccacacccagctggaaacatcttttatcttaaaaattcctaagcatcctataaattacctcattactataaatttaattttaacgtagtattttaacacagttgccaggacctcattcaaaccttcattttatagatggagaaagagagctcacacaggggtgtccaagggagataatacagtcatgggttcttagtttccgcttctggttgggtcagtaaatacctcctcatctctcttttccgcttatcactagaaacagaaactaaaaaccatggcttcaggctgttaacagcctaaaacaaaacagaacaacaacagtaacaaaataaggtgggttggacaagtttggcagagagcctgcttggagaagctgtgtgaaaaaaaaaaaagactgccaccgctcctgaaagttctcggcccaagatggaatttagtcaaagaaactcttacactaataaaatttgtacatcaaattaagatcagggacagttaaaacattaataaagactgaagcatttgttcatttaaaaaattttatttaatatttacatttatttttaaaataaaaattagaggaawkcccatgaactcattttccatgaacataatataatagtactcacctatctcctctacccaacttgtgttttagatgagtccttttggatcttyttccccataatggcctctctccttttgctttacagtgcaatcagggcagaataacagatatgttgagtagctaatttatatttctgaagatctccatagaactcttaagttctaagtcttcatagtctttgcaccttgccaagtttgctttcctttgggaattctgtcataaccacaaggttattccccagacatgcagtttggggaaattaacccggcagtagtaaacagactggattagaaaaggtggcagtcgtaataaggatattccaataaccggggaaagctacagaaggatcttgagttaggatgatgacagttacaatagaaaggagaccagtacaagagacggtgaaaacagaatggatacaatttagttgaagaattggctgtgggtgaaaagaagaaatcaaagatgcctgaagttgtgagtttcaggtagccctgagtttataatcctagttctgactcgtactatctttggatatactagctgctgactactaactgaacaaggtagtaacctkgtcatcttgtaacttacctaagtctgtttcctcctctataaaacaaactatcaaaataaagccgatgaaaagattgaagtaaaacataaaacccttagcacagtgcctagtatccattaagcagtagataaatgatggcggtcattattagggagtagggtaaagaacagaaggttaaaaacatgagtagcagtaaggacttttgggtggggattcggtctttctactacacattacacatacctctaagcagagaaaggggttggaggggagtttgataatgtgactaataatcctcctccccctgggggggatcttgataaaggatagccacccacatggaggcctaatataaactggattgcagaatgcacttgagctgggagcccaagcgggccaggcttcttgattcctattttatcccctttaacctaggatagctaggtctatagtgcagactcagacctaacttacactttcatttgcagctgaagtttcggaacaaagacaaagatagccagatcatattaattacacggataggcaagaaagcatgagccctgaggaggaaggaagggactgtccaggtgtacttacctcaaagatgagaaatatcaaagacaggaaaccctaggttcttgcccttcagtcgctatctccttgccattagtaaaatgcggccgatgaatgtcctcacttctgtccatctgggcaggaggtgggaagggtgacgtgcaaatggatgggaggaacccttttttcggcagcacccaccacacccagcctagtgccacgcaccgcaagcgctccataaacgcacacagcgtcgcctctaccaggatcccgggcggccttcgcgggatttctcctggcgtcggctttcagactcccgagggtgggataaatcgagagggtggcatcctttggcttttcttctcccaggcagctctgaaccatgtttatgcaacgtttaatgggctctaataaaacggctaataattttgatccgcggaagcaccgactcgctcgctaagccgagtctgcgagggtgaagctgcaactccaacgccggaaagcgcggctaccgaaaagcgcatgcgccacggggtggcacgaagctagagtaagctgaggaggtgggcggaaaccatggcaaccatgggtgatgacgacatggggagcgtctctagcgctggattatgacgctggattatgacgcaggcagtgggcgcggactctgcggttcgcttgactgacggcgcagcctccgggcctagccacagcagcaacggcagaggccagcgggcgaggtcaagatggtggctccgcgggcgggggaggcagtggagggaggaggagtcagaccttagccagccggaaacaccgaaacccagagacctcctggggagccgccgccgccgccctctcggccatcgctgcctccgccgcctgctccacctcgagggacgcgagcgggcggcggggctggccgtgagagagacaggagaggaaggagggcaggggcggagttgcccgccttagcccccgcccccggccgcggccccgggccctgccccgcgcggccctgcccggcccaccgagccctggtgtggcagcggctcatggcggccgtggggcccccgcagcagcaggtgcggatggcccatcagcaggtctgggcggcgctcgaagtggcgctccgggtgccctgcctttacatcatcgacgccatcttcaactcctacccggattccagccaaagccggttctgcatcgtgctccagatcttcctccggctctttggtaagggaacagggtaccgtacgtcccgggacggctatgcgggccgagacgttccccggggagcgggcaggcgcgcagaggccatgggtcgagtatgtgtctttgggaactacagtttcatccctcaaagggtcgtctttacgggttgggagggggaaggagatgatacttgtctgagttgacagcggagcagtccccctagcgaggattcagtgttgtacctgagtgaggtggcgagaaagtaaggatgtgtgagcatgcagctctttgcccgtttgccttgggaaatgagtactggcttaccgcgtcctatgcgacagccttcgaaaaacaactctgctatcccagtctcgtcgtgtgtgaccttggacttctgccaaggcgtgggcctcagtttccctttattaccaaatgccgagtacttgtatgttgtcacttctgctgcacccgagggtccacaggatcgtgaagtgtctgcagtaaatgacatccaagcgaaggagacagggttttgaatgtcagaccttgaaaccattaccaaaaattctcatgaaagcggcgatgcttaaatcgagtcctaaaattttccatgaataaacgagaaggtattgaaagtgactgtaaaaagtgatgagacatttgccaaagagacttctgaaaatcattgtctttgtttcgtatggatggagtgttaaaagtatcttatatttcatttcttcctttccatcttcacttacatcatcagagggagatgcatttatgcgtaaaataattttttaagtaattgtaacttggcaaattttgttgatgaggtaattctggtgatcggtcttaagtaggctagtgcttttgaagtgttgctgagggcagactgatggtgaggtctttaccaagcctttctgaattacaagccatctgttgctttattccttcaaaagaggagtggcaataaaggccgaattttgttcttagcaataaatagccatattttacatttatctggtattttccttttgcaaagcattttcactggtaggtattatctaacctaaccttcaaacatcccccagaggtgggtggtggtattgtcattttacaaaccaggaaacagggtcatagaggttaagtgttttgctcttggtaggctgccgctaagtggttgccagagcctgagcttaaaaatcttttgacattaaatatggtttactttcctccctaacagctgcaatccagatacagaatgcagtagtaatgatcatatgctagatcttaaaactaaagatgtaaacgtgatgttcagcccaagctgcttcagtaacccacctgctacctaattccagcctttcctacttgccactgctaacgtataccaccaccataatttgtgttaaaaactgggctctgtttgagaggattctgcatgttcatcccagaaacagtgtagtgactgctttgaatattcttacagcatgataactgcagattctgtgagaatccctttgggacctggtgctttaatgcagtagtctgttgagcttcaggttaggcagcttcaaggaaaagaagtattttctttaattaaataatttgtagtgtaagaacattgaacaaagcaatctgatattttccttgtactaggcatgtttcttttgtaataaatcttggaagtttgtgtttgacaaagaacaacatgacttaaggcaactgctcagtgctttggtttcttatttttaccttttaaaagatggagagtgaggttatctgtttcatagggtgttaaagacaataaatctattttaatgcttcatttaataccatattttgttagatattttggtcttttgaaatcatcggcaaaatattggtgttgtttatttgaaaattttgatccctggaatctctggatcagactttgagaaatacgaaatactcttcaaatctatcatccgactcttcttactgtgtcatgtaattatgctaatttttcacatttgtaaggatgataagaatgaaaaaaactgatttcggtgctaaaaaattatgttactaaaagacacaggtttgtgtgtaaatatgccaatggatagttgaaattaatcgttctgccttgttagtttttttgtagttgtagacttctcagtactactgtgtataagtcttaccacttgtcaacctcacttttttctttaaaattaatgtgtaaaaatggaaatctctaagtaaaaagcattaccagttttatgtgtggtggtagaagtatttactcccctctacctacaaaatggtgctacaactgtaccttcatttgatatcaaactaatttgagatttcaaccggttagaaaataaagcaactcattttggagatccaaataaaattctatgacaatatatggaatattgaagaacataaagctgtgttttaagggatgttaaatactaaacgaaactcaacccagagcagcataatgctgagttagcaaatttaaatccaaggcagaaaatgcaagcctaggagtttgttttaatagtattactaatatggtgataattcattgaggtgggaaaaggctttaaacataacagaagacccagaagttccaaggaaaaatctgaaaaatttcagtacataaaaataaaaagcttttttatggcaaagcttaaaaaagaatccttaaatgacaaactgagataaaatacttctatcataagtgattcacgttccagtaagagttttaccctgccagggaagctgaggcaggagaatcgcttgaaccagggagttgcaggttgcagtgagccgagatcgctccactgcactccagcctggggatagagtgagactctgtctaaaaaaaaaaacaaaacaaaacaagaaaaaacttatactcccttaggaaaatgcctaagacaagcaattcacaataaacaaaatgcagatgttcaataagcaagagaaaaagtatttagcccttcctgcagtagcttgattttatgggggaaaaaaaaaagtacctagccttgtttataattaaatannnnnnnnnnnnnnnnnnnnnnnnnnnnnnnnnnnnnnnnnnnnnnnnnnnnnnnnnnnnnnnnnnnnnnnnnnnnnnnnnnnnnnnnnnnnnnnnnnnnnnnnnnnnnnnnnnnnnnnnnnnnnnnnnnnnnnnnnnnnnnnnnnnnnnnnnnnnnnnnnnnnnnnnnnnnnnnnnnnnnnnnnnnnnnnnnnnnnnnnnnnnnnnnnnnnnnnnnnnnnnnnnctcaaaaaaaaaaaaaaagtcaaaaaaaatttatcagattggtgaagagttcaaagttttattagttttgcaaaggtatttacctttttgaaataggtaaatttatacaattttggaagacttttttttttttttgagacggagtttgctcttgttgcccaggccggagtgcaatggcgtgatctcggctcaccacaacttccacctcccaggttcgggcgattctccggcctcagcctcccgagtagctaggatgattacaggcaagcgccaccacccccggcaaatttttttctatttttagtagagacaggttttctccatgttggtcaggctgttctccaactcccgacctcaggtgatctgcccacatcgtcctcccagagtgctgggattacaggcgtgagccaccgtgcctggcccggaagactcttaatttcagtgtaaaaccatttggcagtatcaactgtcatttacaactgacttctcagtgttttgttttgtttttgagacagtctcactctgtcaccaaggctggagtgcagtggcgtgatctcagcacactgcaacctccacctcccaggttcaagcgattctcctgcctcagcctcccaagtagctgggatgcctggctcgtacaacttttgactcacaatttcaattctagggaattggcctagagagatagtttgcttaaggactatgggcaagcattactggaaataacaaagcaacaaacttaatctaaatatgtattgatacaaatctgttcattgtattaggtctagccatgcaataaagttcttgaaagaaatgagatagctatttttggtgccgaaaaagacttcagaaaacctctgaagtgaaaaaacaaagccgaagtaattatcactggcagaggaatagacagagatttctcaacagtggcagtattgacattttggacaggataattctttgtttgcggatgggagctctcctgtgcactgtaagatttttagcagcatcactatcccctgcccattagatgccagtagcaccttgcacccccacaccccagtgtgacagccaaaactgtccctggatattgccaaatcatggttgagaaccattgggatagacaaatagattagtacttagccttatttataattacatagcccagaaacagacaccaatgtatatatagaaataatgtgtttcagagatagaattgaagtacattgaggtaaatatggactgttgaattaatgatcattttgttacacctttggaaataaattatactagatgtctaccttatgtcaatatatagacagtcacttctaggttgagcagtgtagtgagaccctgtctctgcaaaaataaatatttaaaataatagccatacttggtggtgggtgcctgtagtcctatcttactcaggaggctggggtgagaagatcgcttgggcctaggagttcaaggctgcaagtgagctatgattgcataactgcactccagcctggctgggtgacagagcaagaccctgtctcttaaaaaaaaaaaatagtcatttctaagtgtattcttacctagatgtatatgtaaatatgaaatgcagaactttaaatttttagaaaaaaatatggaatattttatttttccaatcttagattaaggaagaaatccttaaaaatatataaaagcaaatacataatgaagattgataaaccgaatgatattgaggttaaaaacctatgttaatcaaaagatcgcaccactgcactccagcctgggcaacagagcgagactccatcacta

SEQ ID NO: 97517 - DNA, 13132 bp, Homo sapiens
cccccaactgcctgaccctacaggaagccagggacaggggagcctggaaaatgtggtgcctgacatgcagactgggactgagaagggcaagcaataaatgtgagaaaagaggccaaaggctggcccattgctcgtggtcccataactacggtgtggcagggccaggtagtgaacaaagtgcacctgtgtccaccaacctgctgcatggaggaagccaccaaggagatgagaggcggacaaagcagcagatggcaggaataaacaggaggagatgttaccgtcatgcctccctaaccagagaatcatacaaaccaccaagggtggcgcttgggtgtggaccccggctccctgactcatttgcatcacttagtagggatgtgcgggatagtaagcttctccaaggctgtttccctgtccactcattcagcacttactcaacactgaacaggtggagaggcactgtgaaaaataatgcttcagggggtaagagaaactaatcttcatcccttctctcctctacgttcctaacccaccaggaacagacaggaaggtagaggtgagaaatcagttctgcataggcaagaagagggcaggagagtgagcaacccacacagcccaaagtccatgcagcagacccgcccctggtccatatgttccagtcagtctttatttacagtctctccaatcagataaatccgtccttcctcctatggtgaggagcaagtgaggacctcaagagaggaaaagatacattcctgcaaaaaccttcccatcctggaggctgaagaggtgaatgccttaaggatatacaaggaaggatgtatgtaaaaccccacacacacagcagatggcccatgaatgccacatatcattagcacattcagggaccaagtgccaatgtgcaatctctttttgtttgtttttgagatagggtctgtattagtccgttttcacgctgctgattaagatatacccaagactgggaagaaaaagaggcttcattggacttacagtttcacatggctggggaggcctcagaatcatggcgggaggcaaaaggcacttcttacgtggtgacggcaagagaaaaatgagaaagaaacaaaagcagaaacccctgataaacccatcagatctcgtgagacttattcactaccacgagaatagcatgggaaagaccggccccatgattcaattacttccccctggttcccttccattcccacaacacatggtaattctgggagccacaattcaagttgacatctgggtggggacacagccaaaccaaatcagggtctcactccatgatggctggagtacaatggcatgatcacagctcactgcagcctcaacctcccaggctcaagtgattctcccacctcagcctcccgagtagctggggctacaggcatgtgccaccatgctgggctaatttttgtatttttttgtggagagggggtgttactatgttgctcaggctggtctctaactcctgggctcaagtgatccacccacctaggcctcccatagtggctgggagccaccatgcccagccttccaatgtgcaagctcaactcacacttagtatgtcctgcaccctgtccataagggatctcacagacttcagtgcaaattctggcttctttctacaccggctatgtggtttgggaaaataacttaaactctatgatccttagttccctcaccagatatggaactaatatctacctcactcaggtgcttagtccaggttccctagaaaacagcgagaaacgaaagcttatgtgcaaatggaaatcatcaaagttaaaaattatgttcttcaaagggcaccatcaataaagtgaaaagacaacccactgaatgaaagaaaggtgtggcaaatcacttatctgataagggaattgtatctagagtatatagagaatctaagaattcagtaataaaaggatattattaaaaattgagcaaaggatctgaacagacatttcaccatatgcaaatagccaacaagtacatgaaaagatgctcaacatcatcagctatgagggaaatacaaatcaaaatcacaatgagatgccactccacacccactaggatggctataatcaaaaagagacaacctataatcaagcaatcagtgccgatttttaagaaaaccaaaattaagataccaactgaattaaaaattatgtaatacttgtggcactctgacaaatgagaccttgaggtccttacttgctcctcaccataggaggaagaggatggacttatctgactggagacatgtaaatcaagactgactggactggacatgtggaaaaactaaaaccatcatacactaccagtggaaatgtaaaatggtgcagctgctttggaaaacagtctagtaattgctaaaatggttgaatatagagtcaccaactgatattcaataactctacttgtaggcatgtaccaaaagaaatgaaaatatatgttcacacaaaaggtgagttttgcaaatgttcacagcatcataactgactatggccaaaaagcagaaacaattcacatgtctaacaactgatgagtggacaaataaaatgtggcataaccatacaatggaatattatttggcaataagaaccgaagtattgccacgtgctgtgtgacatgaactttactttcccgtcatacttccatataaaattagaaacagataataagaataacaaccaatactttctgagcacttctatatgccagtccttttgcatgcattcatttgtttaatccctggagatcatgataatgttcccgtttctcatatgactgagatatggagatgtaagaaatattctcaaggttctacagcaagtaaatggaagaactatgtccaaattcatgtgacctgactcagggcccttctataactctatattgcttctaggtgtaggttatactcacactgaaagttccaaagaaaaagtcacaattgtttaatggaacagaccacagcgggttcctccccagtactctggaggagccccatggcatgctgttctattcctagaagctgtgtacgctctcagcttccaggaacatgcaggctgacctccaagctggtgacagcccatttggaagggggcagaagccacaatctggaatgtagcaggaaattagcacctagaggcaagctgtcttcaggcaagttcgggctgagggaagctaaaattcaataagccaggcttcaaattacatgtatctgatcaattccctaagaaatgatttcagctataaagcatacctgtgagaacaaacagattcaaaaacctggtagagttttccagattctgttcaaggataaagtttagaagattccaacaaagtacctaacctaagttaaagttgtctgtacaccatttcctctcctctcatgctttcataaccccactcgaatattccctactccccattactctactgaactgtttgtcaagatcgcaaggacctccccacagctgggtccaatggtcagtttttatagcccttatcttacttgacttctcacagcattcaacactgctgctcattccctcccttcttgatactttcttcactttattcctgggacaccacattcttactttttctcctactttattggttgttctctttcagtgcccttttgttgattttttttctccctattatcagagaaattatcttcttctcttctcttctcacatatttagtgtattgccagtttccaatttatttcctctctgctccaaagccacccttcattgactgttctgcaataatggaactggactctgtaaacatttctcctgcatagctgatacaatgttcagttttgccaacacagagtgttggaggagggggcttcctttcctggttctggtgtgcttccatatggttcctgccacatggttaccatgtacatgtgagggacatccagcagcacttcatgcaccctggcagggtgcttcctgcttccccagtggctgtagaccaacacaggcccagggaacccaacaaactctgctgtccagtgccataacttctccatgtccacctctctatgtcctactctatgtccaccgccataccttctccaatgaagctcaggtcccagccttggggagggacttgtcttccaaatttgttcctcaagtgctgtccctcggcacaagaatattcttcagagttctcattagccttttagaattaatctttgctactcgataattctttatattacactgacctcattcacaatactgcatggcttctgtcttctggaccctggccaacacattcccttagtgatctcacctagtctcataactttaactgcttaggacccccagatctctcaggacccctagatctctctctctctcaaacaccagacttaatacaactgcccacttaacatctccactggggtattaatagagtaaacctctatgtccaaaacaacactccagatactcccaatacttgctctatccacagccttctctatcacacttgctaacttaatccatttgctcacgtgaaaaactttgggagacatcactgactcttttctctcttaccgtcacattaaatccaccaggaaatcctcttgaatctgtcttcaaaatatccaccatttcccaattctcctctcacgacctccactgctaccaccctaaccactgtcatttcttgcctggattcttgcaaaaacctcagtactatcctcaacacaacagccagagcaatcttttaaaatatatcatgccactctttcgctcaaaatccttgcggtagttcccaaaatccaaaaccaaatccttaaaatgcccaacacccccttacatttgctattcccaaactgtgcaccaaggcactccaaggcagcattcacagggactctacagggtactttccatgttctaggtcatagagcaatatcagtcatattactactataaaattgttagaacccaaccacttgtaaatccaaatcattagttagtttctttgatgtaggggcattgtaaaaaattactgagacactaagggcactgtgggcctagaaaattgggggacccctaccctacacaatcatctgtctgatcttatctcctgaaactgcccctctgtttgctccattctctgccccagccaacccagcctccctgtgttcctcaccccacctggtacactactgcctcaggctctttgcaatgactggttcctctgtcttaaaatgtccttacctcagatgcccttggctgccttctacactttctttcagatgtgttcaaacgtcacttcctcacgagatattccatcactgcctgtattagtgtgggctgccataacaaaacaccacagagtgggtggcttaacaacacacatttattttctctgttctggaggctgaaagtccaagactgaggctccagtcaattccatctcttgtgagggctctcttctcagcttgtggacggcagcctccttgctgtgtcctcacacagactttcctcagtgcatgcgtgtgggaagaaagtgagagggagaactctggtgtctgtcctcataagaacactaatcctgttgaatcagtgcccatcctcacgaacccatttcatcttagttacttccttagaggccccatctccaaatacagccacattagagtgaggtcttgaacatacaaatttgggggagacacccacattcagttcataacactaccatttctgaaattgcaatcccaatctccccaacactccttcacccccttaccttgctctcttccccccacagttcacctttctcgtactctccaatgaattcatattatgaattctattgtttattatctgtcaccctctcccccatctagaataaaactcaatgattaagggtaggagtctttgtctacttgttctttatgtgtcccaggcatctaggttagtgccttgtacacagttggtactcaagattagctgttgaatgaatgaaggagaaaaaacatctccttcctggccccttttcccttttcattctctttgcacatcaccagggaaggaaaagaaacacacctcaataatcaattagtttgaggagagctggtagtcttcattccatttagaaaccagatctggtattcaataattaaaaataattaataattaataagcagcccaaatttccaccaayggatgagtaggtaaacaccagattaaaagacttccaagcagtccatgattctagcatactcatctatgactgctggatatgagatgtgatttgattaaagagacaggccaggcacggtgactcacgcctgtgaatcccagcactttgggaggccgaggcaggyggatcacgaggtcaagagattgagaccatcctggccaaagtggtgaaaccccgtctctactaaaaatataaaaattagctgggtgtagtggtgcacgcctgtagwcccagctactcgggaggctgaggcagaagaatcgcttgaaccaggcaggcggaggttgcagtgagccgacgtcatgccacygcactccagcctgggtgacagagcgagactctgtctcaaaataaaaaggcaacacgataaatgaagtgcatttattaggataatcaacagttaccaggtccrgttctaaacggaatgaaaactaccagctctcctgaaactaactgtaccctcgttaagtctcttagtgtgtggaactgtttcttcatctgaaaattgraaacaacaagacatgcaaggtacagcatgaggtaaygtgctcagggtgctttcaacagctagacttgtatactagttccagctgcgcagctctctagctaggtgactttgaacaagcagtccaaccttctgagctcccattttctttcctgtaatagttggataaaatcacctcgtagtggcaagaatcaagagacttctcaaaagttaaacatagaggccaggcgcagtggctcacagctgtaattctaagcactttgggaggccgaggcaggtggatcacttgaggtctggagtttgaaacctgcctggccaacatggtgaaactctgtctcttccatctctactaaaaatacaaaaaaaaaaaaaaaaaatagccaggtgtggtggtggacacctgtagtcctagctactcgggaggctgaggcaggagaatcacatgaacctgggaggtagaggttacagtgtgctgagatcgcaccactgcactccagcctgggcaacagagcaagactccatctcaaaaaaaaaaaaaagataaacacaaaaattaccatatggtcgaacaatcctgctcctaggtatatatccaaaatcattgaaaacagatacacaaacacttatacatgaatgttcacagcggcaatgctcacaacagccaaaaggtggaaacagcccaaatgtctatcaacagatcagtaaacaaaattgcagtggatacatataatggaatattatgccacaaaaagaaagaaagtactgatacatgatgcaatggggaagaacatggaaaacataaagctaggtagaagcagccagatacaaaaggtcacatactgattccatttatacaaaatacccagaacaggccaggtgcaatggctcacgcctgtaataccagcactttgggaagacaaggcaggaggactgcttgagtccaggagtttgagaccagcccgggcaacatagcaagacctgtctctacaaaaaactttaaaaaatatctgggtgtggcagcacgtgcctgtagtctcagctcctcgagaggccaaggtgggaagattgcttgagcccaggaaatcgaggctgcagtgagccatgttcatgccactgtacttcagcctgggtaagagcaagactgtctcaaaaaaatagtaatacccagaattaattcacagaaacaaaatgaagattggtggttgcaggggttagggagcaggaatggggaggaactgcttaaagagctctggtttttcttttggggtgatggaaatgtttgggaactagacagaggtggtgattatgcactactgtaaatgtgctaaatgccactgaactgctcacctacttaacttttaatacttaaaattagccttaaaatggctaattttggccgggtgcagtggttcacacctgtaatcccagcactttgggaggccgaggtgggcagatcacaaggtcaggagatcaagaccatcctggctaacacggtgaaaccccgtctctactaaaaatacaaaaaaacttagccgggtgtggtggtgggcgcctgtagtcccagctactcgggaggctgaggcaggagaatggtgtgaacccaggaggcggagcttgcagtgaaccgagatggcgccactgcactccagcctgggcgacagggtaagactctgtctcaaaaaaaaaaaaaaaaaattatgtgaatttcacctcactaaaaaaagaaagaaaatacgtggtaaaggcctttaaaaacagcaactgtctggtgactagagatctgggcttagctctgccagttactggcaacaaggtaatgtctctctgggcctcagtttcctcatctgtaaaatgatcgggttggattaaaccactactagttctcgaccaggacagcctacattggccatatgtggagagctgcttctaaatgcacagggccatcccatcacccccagattttgacatgtccaaggcagaatcaggcctgtgttcttgtgttgaaatatttatttcaggatttaaatccacccccttctgagaacatcagattaaaagacctccagcaatccatgattctagtatactcatctctgactgctgtatataagatgtgatttgattaaagaagacagacaacaagtgcatttattaggaacaacattctgaatactcacgagtagttatcttgcacacttaaccctaggccagaggacacagggcaaccacacaggaaaaggataccaggacagagtccatgtagttttgcttataccacaaaaggagttaaggcagtttaattcaaggatgcgaaaactacgtctatgacataaacatgacattcaaaaataactcagcctttaaaatgtccccaataccaacaaatcaacaaagtagtcaagatgacagccactgtcaaggacagatgaacagtcacaaaagcgatccaacatgacaccgctatagcaggtgctatgcagagccctccctatgcagttaacacagatcaacggatgctatttgcaggccaccagtctcgcatgtctttacttcacataaatgtattacactgtcctaggagagcaaatgcatattatgtgagagaaaaataggactcattatctcgtaccacaaacaggggttacagaaaacacaaggctggacaaggccacactgagacaggttagtgacttttctggcaggcccctcataggcactgagatgaggcctaaaaatatgctggggtgagttccgtccttccttctgtggttaccacctggattaggcttcctgagctcggtcggtttttccctgtgatccagtcatggaaagttctggaacagaaaataaaagttttttttatattctcaaagcaaaaatctgggcacatgctgaccttcacagtgacggcttgtggggtggggggaaggggtggcacagcagcgactgtttaaaagccactaagggctgggcgccatggctcacacctgtgatcccagcactttgggaggccgaggcgggcagatcgcttgaggtcaggagttcgagaccagcctggccaatatgatgaaaccccatctctactaaaaatacaaaaattggccgtggtagcacgtgcctgtaatcctagctactcaggaggctgaggaagtagaatcacttgcacccgggaagcagaggtaagccgaggttgcaccattgcactccagcctgggcatcacaatgagactccgtctcacaaaaaataataaataaataaataaataaaagccactaaaggtcaggcattatggctcacccctatgatcccagcactttgagatgccaaggcgggcggatcgcttgagcccaggtgtttgaggccagcctggacacaatggcaagattccatctccaaaaaataataaaaaattaataaaagccagtaggcatgatggacacatacccaggcccccagtgagttcagtggtgtactcattctaatctctgagtggcaggatttggcataagtttaactttcattttggtatttttctacattgttggaattcttttgtgattttaaaagattctaatttggccaggcgtggtggctcacacctgtaatctcagcaatttgggaggctgaggcaggtggatcacttgagcccaggagtttttgagaccagcctgggcaactgggtgaaaccctacctctaaaaaaatacaaaaaatagctgggcatggcacatgcctgtagtcccagctactcaggaggctgtggtgggatgattgcttgagccccggagatcaaggctagggtaagccatgatcgtgacactgcactccagcctgggtgacccagtgagaccctgtctcaaaaaaaaaaaaaattgtttttaaagattttaattagttcattcaaagagagagacacatgcacaatactttgctatattaccttctcataaatttatgagagaaacagatgcaattcatttatttggcatttttttaatcaaacatttatagagtacccacagctgcaccaaacaatggaaaaagagatagaaaaaaacagactattacaataaaatgttaaatacagtaacagggcctttcacaaatctgaggagaggagcaactgaccccacttgcagcagtcaaaaagaccctctaagaagacaggaatgaaaaagggcaaaagaaattcacaagaaacaagaagtagatgataattctttaacacaaaacatttacatttgagtacatcatccattttgacaattcaccagctgagacttcggaccttcattaactaaaaagtgctcagcatttccttcctgggagactcccagtgccaatctgtaaccttctgggccagcgctgatgtgtaaaggtccagtcattcaggcccctactctggggtttgaacaagctcatatgagcacatgggctcaaaaaacaaagcgttgctaaaactctctaaagtactgtcatgtcatggcctcatctctggggacagggtagggcttggtgagggaaggctctgaaagagaccagtgccgtttggttgtgtagggttttgtgtgttggttacacatgtttttttgttgttttgtttttttatactttaagatctaggctacatgtgcacagcgtgcaggtttgctacacaggtatgcatgtgccatgttggtttgctgcgatgcatgttttaaatggttttacttcttcaccctcatctgcagcgtggataggtgagtgagaacgccattctaaccagggatggtagaggaaggatgtgctcacagacatctcaaagcaaactttatgccagcttttctgagagttttcaaataccacaaatgggtggatgtgatctctagaacaaaagggggcctgtgacagcccgtcctctgtgggtctgtggctcagcacgagttcagacacaagatcccagatgttccatctagagtaggtcttagatcagtatctcaagtgtggtgggagtgtcggcctttaaaaagaaattcaaacacaaacacaattcaaagcttgatttcctctacaacttcaatttttttcctgcaaatcaagcatgaagcatgattcctggcatagacagaaataactgtcagcacaccagttaagaccataggttctgcagccacaccacttgtgtcagatcccggctgtgctgtgtgaccttaggcgagtgacttagcccctgccatccctccaagtctctaagccttaaataaaaatgacagctcctccctcagagtttgctatgagcattaaataagagttatgaagtgcttagaatggtgactgggacataaaaagtgttctgtaagtacacgtttcaaacataaaacgcaagtcccaaatttctcccgatttaatttaaatgagattgtgacatcaggccagaagcacactgctaacttcacaaacatctcttataaacagtcgtcaaagcagtttacacagaggcactactgggtcaggctgtcaccttgaccctctcggcacccctgctccctgtgggcagggatcccatctttgtcctcaccgtgaccccagagccgagggcagcacctggcccatagtgggtgctcgatgaacacatgcttactaactagaggggcttgaggaactgatacctaaacaaacacaaaagaggaattcagctctctgtcccatgagcgttcaaatgccacccatattcacaaatgggcaaaaaggatttcggaaattaaagggcactttctgtgggtctgtggcttgacacagattcagatatgtgcccccaggccatctacgtggtgtccccctcccccatggagtctcctcatcacagcagtaaggacacaaactgcagctggggatcactgagcacttgttatggccagacactgtgttgagtgcttgccgcacactatcacgtttaatcctaacaagcatgatggacctcatgatacaggtggggaaactgaggcctcagcaggtcaataatgtgctcagcatggccggtggtgagggagcgagccaggattcatgtcggcactacccattctgccactgtgctgcctgtctccaagtccagctactctgagattccgtctgatgtgcaatgcatcctcagagtcccagagacctcccaagaccacccggattgacgatctcagggaacacagacttgtcctctggaccacagcaggcagagaataggggctggaagctgctcagtcatggacatgtctgtaatactcactcaactaggaattctaagggtgtccaggagctgaagtcagcctcaggcattgatttcctgttcatcggggtatccagggtaaccctgcaatggacacagat

SEQ ID NO: 97518 - DNA, 13402 bp, Homo sapiens
aaaaggcagcagaaacttctgcagacttaaacatccctgtctgacagctctgaagagagcagtggatctcccagcacggcgtttgagctctgagaacggacagactgcttcctcaagtgggtccctgacccccgtttagcctaactgggagacacctcccagtaggggccgacagacacctcatacaggcagatgcccctctgggacgaagcttccagaggaaggatcaggcagcaatatttgctgttctgcagcctccgctggtgatacccaggcaaacagggtctggaggggacctccagcaaactccaacagacctgcagctgagggacctgactgttagaaggaaaactaacaaaacataaaggaatagcatcaacatcaacaaaaaggacatccacaccaaaagcccatctgtaggtcaccaacatcaaagaccaaagatagataaaaccacaaagaaggggagaaaccagagcagaaaagctgaatattctaaaaaccagagtgctgcttctcctccaaaagatcgcagctcctcaccagcaatggaacaaagctggacggagaatgactttgacgagttgacagaaataggcttcagaaggtcggtaataacaaacttctctgagctaaagaagcatgttctaacccatcacaagaaagctaaaaaccttgaaaaagggttagacgaatggctaactagaataaacagtgtagagaagaccttaaatgacctgatggagctgaaaaccatggcatgagaacttcgtgacgcatgcacaagcttcaacagctgatttgatcaagtggaagaaagggtatcagtgattgaagatcaaattaatgaaataaagcaagaagacaagattaaagagagtaaaaagaaacgaacaaagcctccaagaaatatgggactatgtgaaaagaccaaatctacgtttgattggtgtacctgaaagtgacggggagaatggaaccaagttggaaaacactcttcaggatattacccaggagaacttccccaacatagcaaggcaggccaacattcaaattcaggaaatacagagaacaccacaaagatactccttgagaacagcaaccccaaaacacataattttcagattcaccaaggttgaaatgaaggaaaagatgttaagggcagccagagagaaaggtcaggttacccacaaagggaaacccatcagactaacagcagatctctcggcagaaaccctacaagtcagaagagagtggaagccaatatgcaacattcttaaagaaaagaattttcaacccagaatttcatatccagtcaaactaagctttataagtgaaggagaaataaaatcctttacgaacaaccaaatgctgagagattctgtcaccaccaggtttgccttacaatagctcctgaaggaagcactaaacatggtacaaccagtaccagctactgcaaaaacatgccaaattgtaaagaccatcaatgctatgaagaaactgcaacaattagtgggcaaaataaccagctaacatcataatgacaggatcaaattcacacataataatattaaccttaaatgtaaatgggctaaatgccccaattaaaagatacagactggcaaattggataaaaagtcaagacccatcagtgtgctatattcaggagacccatctcacgtgcacacataggctcaaaataaagggatggaggaagatctgtcaagcaaatggaaagccaaaaaaagcaggggttgcaatcctaggctctgataaaacagaatttaaaccaacaaagatcaaaagagacaaggtcattacataatggtaaagggaacaattcaacaagaagagctaactatcctaaatatatatgcatccaatacaggagcacccagattcacaaagcaagtccttagagacttacaaagagacttagattcccacacaataataatgggagactttaacaccccactgtcaatattagacagatcaacaagacagaaggttaacaaggatatccaggacttgaactcagctctgcaccaagtggacctaatagaaatctacagaactctccaccccaaatcaacagaatatacattcttctcagcaccacatcgcacttattccaaaactgaccacataattggaagtaaagcactcctcagcaaatataaaagaacagaaatcacaacaaactgtctctcagaccacagtacaatcaaattagaactcaggattaagaaactcactcaaaaccacacaactatatggaaactgaacaacctgctcctgaatgactactgggtaaataacaaaacgaaagcaggaataaagatgttctttgaaaccaatgagaacaaagacaccacgtaccagaatctctcagtgtgtagagggaaatttatagcactaaatgcccataagagaaagcaggaaagatctaaaattgacaccctaacatcacaattaaaagaactagagaagcaagagcaaacaaattcaaaagctagcagaaggcaagaaataactaagatcagagcagaattaaaggagatagagacataaaaaacccttcaaaataagtcagtgaattcagagctggtttttgaaaagatcaacaaaattgatagaccactagcgagactaataaagaagaaaagaaagaagaatcaaatagatgcagtaaaaaatgataaaggggatttcaccaccgatcccacagaaatacaaactaccatcagagactactataaacacctctatgcaaataaactagaaaatctagaagaaatggataaattcctcgacacatacaccctcccaagactaaaccaggaaggtgaatctctgaatagaccaataacaggttctgaaattgaggcaataattaatagcctgccaaccaaaaaaagtccaagaccagagagattcacagccaaattcaaccagaggtacaaagaggagctggtaccatttcttctctaactattccaatcaatagaaaaagagggaatcctccctaattcattttatgaggccagcatcatcctgacaccaaagcctggcagagacacaaccaaaaaagagaccaatattaagtaggaattttccctatttaataaatggtgctgggaaaactggctagccatatgtagaaagctgaaactggatcccttccttataccttacaccaaaattaattcaagatggattgaagacttaaatattagacctacaaccataaaaacactagaagaaaacctaggcaataccatttaggacataggcatgggcaaagacttcatgaccacaacaccaaaagcaatggcaacaaaagccaaaattgataaatgggatctaattaaactaaagagcttctgcacagcaaaagaaactaccatcagagtgaacaggcaacctacagaatgggagaaaatttttgcaatctacccatctgataaagggctaatatccagaatctacaaagaacttaaacaaatttacaagaaaaaaccccatcaaaaagtgggcaaaggatatgaacagacacttctcagaagaagacatttatacagccaacagacacatgaaaaaatgctcatcatcactggtcatcagagaaatgcaaatcaaaaccacaatgagataccatctcatgccagttagaatggtgatcgttaaaaagtcaggaaacaatagatgctggagaggatgtggagaaataggaacgctttcacactgttggtgggagtgtaaattagttcaaccattgtagatgacagtgtggcaattcctcaagtatctagaactaaaaataccatttgacccagtaatcccattactgggtatatacctaaaagattataaatcatgctactataaagacacacgcacatatatgtttattgcggcactattcgcaatagcaaagacttggaaccaacccaaatgtccatcaatgatagactggtttaagaaaatgtggcacatatacaccatggaatactatgcagctataaaaaaggatgagttcatgtcctttgcagggacatggatgaaactggaaaccatcattctaagcaaactgtcacaaggacagaacaccaaacaccccatgttctcactcataggtgggaattgaacaatgagaacacttggacacagggtggggaacatcacacactggggcctgtctgggggtgggggtctgggggagggatagcttaggagtaatacctaatgtaaatgatgagttgatgggtgcagcaaaccagcatagcacatgtatacctatgtaacaaacctgcacgttgtgcacatataccctagaacttaaagtataataaaaataaattaattaaaaaaataaaaatacaggaaaaaaaagaaaaacagggaaaatatacgaagacaatactgcatctaaaataataacaaacagtactaaatacttttaaaacttttcaactatatgtgaatcatatataaaagataatggcacctagtttacagaaatggtatgcctcttgtacaattttgtgttttataatagcaaggagccaaatcaaactttaatattgaattctataaatattaatgtaaaatattttcatgtgaaatgatgaaattttggggaaagcgttaagataatcaaaataatataaattcccgaataaaggaagactgagccaagaaaatacaaagttattataaaatgtactaaaatatctatctaattatgccttgttacacattccttttaatcagtatttaccattgggttttcaaaggttaatttctgggaacagtaaatttcatatagcttttgttttctttccaatacattgacgcttgtttattacagagtggaatttggtgtaagatgggttgttttggacctggtccaagagggtttagttactgaaagcacctcattataaggtagtcttaccaataaggtgatctgctggctcagatcccatgtatattataacaaggctccattgtggagtacaggaagccaggcagctaatggttctatcaaatgaaacttaagaaacaaaattctttttttttttttttgagacatgaaaattgtttaaggctagaggatcataagccttggtcacttttccaaatttctatttcctgatgttctttattgtatttttcatagctctgcagttattttacgttaaggttttagctttcttacattcattgcttgatctggtcttaaaattttttttgattatcatcaatactatctatttacaaaagattaactgcatttacctatggaaatagataataaaccaccaagaattcataaaggttaaattcttgtgtaactcattgagaaatcagcgtttaaaagagcatatgcgagaataattgtgtggtaatcaaatacaaaagaatgccatcacttagagatgaccatgataaccagcctttcaagtgatttgacaacaggtgctttgatttcatgaaattttgtaagcagccctaaagaattaaatattttaaatgcgttttaatataggaaagtaatacaaaaaagtccagttgcagaaaaataacggggaaaagctttttgttaaaattaatgttttgaatagaaagatcttaacaacaaagccttatagaaacttagaaacagtgccaaatttaaacccatgtaataactaagtgcatagaaacatagtaatagttttataacacaattctagacagttttaaataatttaatcaagtcatgaaacatctactctttacattgtacctttattccaagaataaagccctgtctctaactggtagttttcctggtttgcagcctgtgtgctctatatactttcagtccttgaataaattcagtattagataattatttcatatgcattgaatgtgtcacataaattatttgataaacaatctctaccttatacatctcaaaagcttaaaaaataagccagccaaataatttttctttcctcaaatctttattgtcagtctatcacctatatatctatagttagggaagctttcatatagagcaagggtgcactccagatatatgattcatctactaattaataatgaataacttgcaatgtgccaggtgctcttttaaaagcatttagatgttttaacttatttaamtctgtaaacatttcttttaaaagtawgttatcagtaatgaaaatggcctacatcctactctataaaggccagtagtttacttcttggaatatcatcttggtcagtcatgatctgaggagaatatacacctgtttcaacagtgattatcattgtataaaatttttgaaacaccttttggaattactaaagggttgtgacacatctctatgtacattctcagtaatgaaaatttttaacttcagggagaattaaattttggaaagaataaaaaatatctaggccaggcatggtggctcacgcctgtaatcccaacactttgggaggccgaggtgggcagatcacttgaggtcaggagtttgagaccagcctggccaacatggtgaaaccctgtcgatacttaaaaaaaaaaaaaaaaaaaaattagctgggtgcagtggtgtacacctgtaatcccagctacgcaggaggctgagacatgagaatcgctttaacctgcgaggcagaggttgcagtgagccaagatcgtgcctttgcactccagcctgagcgacagagcaagactgtctaaaacaaacaaacaaaaacatatctagctagggaaaggggaaagtattggagatgaagttgggtaataacactaagatatgaataatatgcttaattttctcatgtagtttaccaattctaaaggtaatttctttttttttttttttttgagacggagtcccgctctgtcgcccaggctggagtgcagtggcgcaatctcggctcactgcaagctccacctcccgggttcacgccattctcctgcctcagcctcctgagtagctgggactacaggcgcccgccaccacgcctggctaattttttgtatttttagtagagacggggtttcaccgtgttaaccaggatggtctcgatctcctgacctcgtgatccgcccgcctcggcctcccaaagtgctgggattacaggcgtgagccaccgcgcctggccctaaaggtaattttaaaagtcctcaaaatgttttaattgtagcattgcgaaaataaatatctagctttccaagttattatgcacatataccatctgtgtcagtctgttctcatgctgctaataaagtcatacccaagactgggtaatttataaaggaaagaggtttaattgactcacagttctgcatgactgaggaggcctcaagaaacttacaatcatggcggaaggcaacttttcacagggcagcaggagagaagaatgagagtgaagcagggaaaagctccttataaaatcatcaggtctcataagaactcagtatcacgagaaccgcatgagggtaaccgcccccacgattcaattacctcccactgggtccttcccacaacacgtcgggattatgggaactacaattcaagatgagatctggctggggacatagccaaaccacgtcaccatcgttccctaaatgtaaatgagtaagagccactttactttttaaatgaaataatatgctttattttaaccgttctggaacaaaagcaaatgaaaatcgactcagaatatcaacagacattcctttatagattctcaaagcacaaagaaatttgtatgattttatagtactaaccgctgcattttacagatgaaactaattccctgaagggtgtggtgattgccaatatgacttagcaaatcagtggcagagccaggtgtagagcccaagtctcttgtcttctaccaggtatttattcgtttcactaccctactatccctatctgtggtttaagaataataccagaggagataaattgtttcaccctttcaaaacaatgtaaaaattaccttctaatcgagtatttggtatttactgctcaatgatcaactagaaaaaatatataatactagatgggatctaatatattctaaattctttaactggtaacttgtcaatttaaatgtctttgaactacgcttagagttgtaacatcaaatgctatagaaacaggctgtaaaaatctaaatgtctcaaaatggaagcaaagacatacctatataatgattcatttatccaaatgaaatgtaaagtaaatccttactggaaattttgacttgaaaataatagaccatacagaattcttggatagctcataaaatttcaattcaaattactcacaaaaagtcccaatgcccagtgaataacagatgtttcttaaaaagagatcaatgaatgtatttttggaatgatgtcagagatgagcctcttttataatcatttttgattagacatatagcttcattcacaaaaacacaaacaaggtcaaaattcacagaaaggattactgtgccctaaggaaacatattttagctgcagctataaatgtgggtttgcttatcaaatttatatatgaagttttctatcttaatcattgtataactaaagcttatgctagaacaataccagaggggataaattgtttcaccctttctaaacaatgtagaaattaccttctagtctagtgtttggtacttattactcactgatccactaggaaaaatatataatactaagcaggatctagtatttttttccacaatgatggtgaagctaaataattagaatagaaaatttggaatacttcatttggcattttatatctttacgtcaatttgtttatgacatgtttggttttaggtttattatacaaagaatgtaaaacaatttcaattaaaaatgcatactactttcttaatttctcttaattacttataagtaggcagtttaataacgaaataaacctttcaagacaaatggtgatctctgaaaaagtcttggactgatttgaggtaaaatctatagcgaaatatgactgaggtgtcactagattagactgctgttaatttttatgtatcagtgtgaaaacaaatggatgaagagaaccacctaatatgaatatttacgtgaaactagaagtgccctaggatctttgaataattttaaattgcatttagctaaggaagacttatttgaggacagtactttgtatgaattactttatcaaaactcaagaatgggccaggcactgtggctcacacctgtaatcccagcaacttagggaggcagagaagggcagatcacgaggccaggagttcgagaccagcctggccaacatggtgaaaccccatctctactaaaaatacaaaaactagctgggcatggtggtgcacacctgtagtcccagctactcagaaggctgaggcaggagaatcacttgaacctggaggtgaaggttgcagtgagcccagagcacaccactgcattccagcctgggcaacagaccaagactctgtctcaaaaaaagaaacccaaaaactcaagaataataacatttacatttctgaacataaaatagttttttaaaaagtatgccacttattcaatttacaaattattacttacaacagagtttaacataagcatgatgacatatttttacttagcttgagagttaagtattattacttaaaaccaggaaacatgcctttatttttggaaggagatggtttaaagttctttatttctatttcatgagtttttcccagttccagttcatttatccaagttgtttttacattaccatcaatgtcatcaattttactttcttcaatatgcagaattccattcaactttgtatctatgcaatcctcagctttcacttctctggctgaatctacttcttttatagttctaatttcaaaaaggtctttagctaaaatgcaatctgaattgttagccaatctatttcctctatcagtttcagctaggtcatttttttcttcatctgtatcttcaggatcgtaaagttcaggtgtaaaatagatagattcatcttctgcttctgtttcaaaatctctatttgaagtggactgtttatcttcttcacttactagagacaattcaatgtctggatccagggcttcttcagaacagagcggatgttcagaatgattttttctagtaagggtggcatcaatctttaatgatgaaataatggtttctgattgagggcatgatccaaacgatgtgtttactgtcagatttgaggattcacatttatcagtgaagggcaaaacagttttactttccatcttctctgttttgaaacggggaggactagaggcactattctctgatgacccgagctcaggtgttgccttcggtattttaccagtaaaatactgtcccaaagaattaaagcttgaccagctaactctctttgtttgtttgttgaaagttgggcttgtggatctggaaatcacaattttttctgctttccctgcttcttccaggaatactggatcatctaagaatacaagaatttaagagatttaactttctgctcctagctaacataattgctaggttaaaataattatttattagaaatacctaaataactgtataggatacataacttagagcccccaacgaatactagtggattttcatcttggaacagaatattaactctgaaagaaatcttaggtctctaatgtttcctagcccaggttataatgctgtctggtaaactatcaaattccacagcagggagctcaagaatgaatgaggaaagaaggggtaaaagggaagaggaagggagctgaggaaaggagggaacaggctgtaaacatttgccttgaaaatccactaaccagtgactgagaaaaacttacctagactaattcttttatttaataaataaggaaagtgacataaggctaagttatttgctcaaagttataaaactggttagtaagaagaccaagactagaaactaggtttcctgattaccaagttaatcggcttgaattcactatttatagtgaattttgtattactattttgtagtatttatatacaaaattgtattactattttgtagtacttatatactacaaaatacatgtttaaaaattgatgtttttcttttttttagtccgagttttgcttttgttgcccaggctggagtgcaatggcgcaatcctggctcactgcaacctccacctcccagttcaagcaattctcctgcctcagcctcctgagtagctgggattacagacagctgcctccacacccagctaatttttgtatttttttagtagagacggtgtttcaccacactggtcaggctggtctcggactcctgacctcggatgatccacccgccttggatatatgaattaaaacaactgaaattatatccaatggaatagaccagagtttggcaaaccttttctgtcataggccagatagtaatatttaggctttgtggagcataatgtatctgttgcgactactcaattatgctgttctagtgcaatacacacaaatactcaactctgctgttgtttctaaaatgtaaataaatgggcatgactacatttcattaaactttatttacaaaaacaggcagcaggccaaatttggcccatgggccacagtttgccaatctgatacagatgattatttcaaaatattttaaaatattatttttcatcacttaaaataaatgtctctcacctcctaaaaataagttcataagaactatctatataggaaaagtagttcatatagaagtatctacataaaaattaggccaaatttttatatagcctttagaataacatctaccacttacatggtactttacaatgctgtgatatttataattttgacctttacaacccaacctgaagggatagctaggcaggcattttttttttcctattacgactcaaaaaggacaaatgacttgctcatgatcacaaagctagtaagtggcaaagccagttagtggaaaaccagaaaatatgctctggtctcctgacaaaagtttgttcccattacagtacaccatactgtttcactattttatgataacaccttatattacaaaccaccatatttaaggaattaatctatacccaaataaatatcatttcactaaatataatgaaagacttctctatcaaaggtaaatgggaagaacttttcatacttttctcctttctggagataatgctacttggtagaggtgaatttttggtaataattttaggacactgtagttcctggacacatatctttgcttcatcttccacaaaattttctggtgatagatgacttgctgcttccagtaaataaggtgaggtactgtactttaaagaggtcacttcaagtgtagactcattgtcctgtatattggttctgtcctttatggatacattaagaactttttgatgctttttggaaaattcagccaaggattccagtgcactttcaaaggttgaatggtgctgaatctgctgccgtacccatttagaaagtcctaaagaaaaaggtaaacccagggaaaatttggttacttagttattaaaatattacatgctaaggtaatacacttgctttttctagtgaagtaacctaatttgtattttgaatatacagaatggttctccatatgttttttctgcaattcagcaattttactacatatgtatcagtaacatatgagtaacattctctttatatacagtaattgtcaaatggagagagcaaagaggcagtagaagtagggcagagatgggaaaacatattctctggttaagaataactggtgaacatggcaaatttaatttcatcataattccccacaaaaattgccttttttttttgtagggaaactagaagttgtaaacaatacaactttccattctaatattctaaattttactccttttgcaaaaataatttcaagattctagtctcaagtttttttgttcccttcctccaccaattccaaatatatcttaaattaaaattattctggaggtgaaataaataacactgtcttatgggtaaatcacatcccttctgaatttttatgatataattatttttaatatataatcaagttataaaggatatgatttgacctgtgacataaaaactgcacaaaaatgaaacctaagagtttaaggtgttttctagtatggtgtgcttccaaatgaaatgcaaaatcaggtatttggacttttacaaaataaatattccctgctaacactactaaaactagcatcatcttttggaggaattagttttaaaagtcactatagggtaaaaatttaagttctagattttaaaactaaaaaaattttaaataagccatttccc

SEQ ID NO: 97519 - DNA, 14493 bp, Homo sapiens
gcaccctccctcagacctgccctctgcatatcttctatctggctgttcctgggttgtattccttgtaagtaattggtaaacgcaagtgaagtgtttccctgagtttcatgagccattctggcaaatcatcaaacctgaggaggctgtcggtcagaggtcagaagggaggtcctgatgtgcaactgacatctggggtggagaagtcttgtgggactgagcctttagcctgtgggatccgaggctacatctaggtagacagcatcagaacggaactgaattgtaagatgctcagtcagtgtgggaaacaccaccccccgacccccccagagggacatccacgttactatctaggcacaacagccaagttgacacataaaaccagccaccacagcctgcaagggcagaggccaggctgtcttctgcagaaaatgaaggcacacactgtaggcttctccatctgctaaaatgacagctgaggcctaccttccaagtggctagctgtcagcaacacaaaacagcacccaccatcagctactggtcagagaaaatgactttgagcgatctgctgtcagggaagcctgcccaggagatgcaagctcaacttcacacataaaagtggaaatacatcagaaaaattgggagtgttaggattccggaggctggtaccacaactgactaattaaaacaaatcccagaagtggggatcacagagcagaagggtctgcaaaacacttctctagatcatcttctttaactcctgggtccagccaaaccaaaagattaatcgtatttcattgtgtttatctcattaggaatatttaggacagcagtgtgggccccaaggtagagctgcttttccttaatctgtgttgtagtcatgccaggagcttatgggaagagtctcaaaaactgattgctacatccactgcaggggtgctgcaggtcagtggctcagcacatcgacaacacagcttcacaaaggcccacagaataaaccgtgcaactgtcctttcaggatgttacagaagggatcccgtgactctcataactgggcatgggctgctttcactgccaggatcctggtctgtgttttgtgtcctgaccctcactgtcccaccccaaccctcactctgaggccttctaatgtgaaccttttgtgctgtatctagcataagcatcctcaaattctctctggatagagatggaatgtcaattcaatatgaaagagaaacattttaactctaacatttcagaatggcaacagacttcggaaacatcaccagcttgattcccctcattttaaagatgagaaaactgaggccaataatggcaaagaaatccgcccaagcccacagttgcacagaccgaatggaaaggccaggatgaaaaggagcgtggaatcacgcacaccctttcttctccatgcagcgcaatcccaggctctgcagcttcaggttggactcttcttgccaccttgccaccacttcagagaatccattaaatgtcttcatgaccaaccgccacctcttgccaagcacaaagctctccatgttagccagatgttttgacgtgctgatttgccaagcatggcaaagcttgacaaatcttcctctgaacaccccaacttctactctttcgctatgtaccacaaataaagtgctaagagttatgaaacaataggttcagtataatgttattttatgtattaaaaacaagtttctgccaatacggaaaaaacaatgtagaacacaaaatatttacagcacaaagtgggcgatagaagtgggttacaggattacagttaatttttttccttctggcttatctatattttctaatttttcctccagtaataatttttccttcaggacttgcataatttaaaaaaagacaaaaataacaataaaagcgttctatttaggagctctagagtgtcacattaccacagtctgcagtgtgccggtgaatgtctgaggtcatttctggctgagggggaggcacagcagttattttcttgggagcacacctcctctcattggctctggtgggactggttgctggtccatcaccagcaagcatgtaacttttccaaagaaaggattgcaagcttattttcatcatgaattagcgaaagaagcagttaaatcccaattttccatgtccttcctattcagaataggcacacagcttatttacacactgtgagatctaaaagtttacaactttacgacttacagactgtgcggtttaagagaaaggtttccacccagagccaccacacgtagacaatcaaaagagatctcacggaggatcaaaaaacctgttttgttgcagggactatcttgttcatgaaggtcatttccgtaatccctgagcccatcgctggcctctccaggatgtgattatacataaatactccaatgggcaccctaaggtgtagagctgagtcctggtccagctccaaggaaatgcccttgaatgtgaaggcagagctatgtccttgccatccgccacttagacaataaaaatgatgttgcgggtcgggtgcgttggctcacgcctgtaactcctgcactttgggaggccgaggcgggcggatcacgaggtcaggagtttgagaccagcctggccaacatggtgaaaccccgtctctactaaagatacaaaaaattagccgggcgtggtggtaggcgcctgtaatcccagctacttgggaggctaaggcaggagaattgcttgaacccgggaggcggaggttgcactgagccgagatcgcgccactgcactctagcttcacgctacagggcaagactcagaattaaaaaaaaaaaaaaaaatggtgctgtgcatcagaactctcccaacagcagggaattctgggggagccactgcttcttggctgcttttcctggcaaagtcatcccaagcccttgttataacctgttttggccattcgttgccacttctatgttttgcataccaaatatgaagagccccagttggtattctaacaaatctgtcccttttaccatctccattttagaaaaaagaatgtcccagaataagtttggaaaagcagtcaatctcttagcaattaccgtattaaacatatcttaatgccctacaaaaatattctaaaataccatccataaagcaagtgctcactgcctagatgtacactgcaagtaaaatctttgccaagtggcttcaggtctggaagtgtgtcttttcctcaccagttctccctctacgttagtgtagtagaaagacaattctccatggtcaagagtttaaaagcaaacgacaacaacaaaaaactggcaacagggggctgtgcaagactaccatgtacctatcaaactgaaaactaccatcctatccattgacctgcaaagctgtttatcagtgaaaaagttacaaatgtttacgaatgaaacagaaaatctaaaaaactgtatgtgcattatactttttaaaaatgtgtatgtatatttaggaataccaaaaacacagcaagaacacaggcccatagtaaacatggttaagagtaacggggacaatcagtgactttgtttcactactcaaacaaatttttgcaagatataaaaagtaacaattagtaagatgatctctgtcaacttcaacccaagcaaatttctccaagggaggtgtgggaacctctaagacagagccttcttcgagggctccatctccatctctgagcttcgtacccctccctgcgtgaagcaggcatcttcagtgattttcttctaagcagcgtacacaaaaaaaagtctcacaattccctgcagattaccgagctcaccccattccaacccacaaggctgcccaggcctggttccagtcccattttctcccacaggctgctgcaggaaaacaaagagtggctggaggcaggggcggggagcaccggctctgcagccagcgcggaagcgcacggccagaaagagaccgggaacgtccgccaggctcccgggctcagcatcatctgcgggggacggcggaccccgccaggcgcgggctcccagtggggcggacccgtggccgcggccctgcgcaggggacgcccgggccccgccgactgcggcttccaggcgactccccagtcggctgtgcctggccgccggccggctaggggcgcaggtaacgcccgacgggccgccccgcagagacccccgctggcgcggctccgggaccggcgccctctcagcgggcacgggcgcacagggcggggcagcgcctcaccttggggtcgcgctcgtagtagtgctgctgcgtgcggatccagcggcccacgaggtggtcgcgcaccgtgtgcgccagcgcgaagaagtagtcgcggggcgtggccacattgcggtccttgaccagcgtgaagtgcaagtgccggttgaagctcttccgcacctcggccacgtcgcctagccccgccaggccgcgcacgctgatctgcttccgcttctcgctgtccgtcagcggcttcgccatcgcgccggcggaggcggaggaaaagagatggaggaggaaagcggcggcacacgcgaacgccgggatggtgcagctgctctggcgccgctgctctggcgcccggcactgcggctctgcgggcgggatggaccgcgcctgcgcgccgcgccggggcggggcctcggggggcggggcggggcctcgggagggcggggcgggcgtccaggctcatagctgagatctctggtgtagtccgaggcggcagcgacctgtccacgccacctgagcgtggtgtttgccccctcgttgggcaagcccggcagaaagtgggagcgactggagggggcaagggacccggggcctcggagcgtgccgtcgtggccgctcctgccagcccggggacggtgcgggaagggggccctgccctccggccctcgggttcctgggaccggccctcccgccctgcaccgggtcaccaggtgccccgcgggagcgcgctgggctcgggctgtggccgagacctggtacacgttcggggaaactgattacagcttgaaaggcatccaccaacgcctgctgggcccggtcttctctgtccggggcagggcggctctgaaaataccagctatttgcttgccactccaggccgatgacagacgtggagaaaaccagctgccagcgagctggagacgcccgttcccgagggcgcgaggcagccacagccaaatgccaccacgaccccgcctcggagggaccgcagccccctagccctcggagaaaccctgttcccgaaaccacctggcagacgctgtccgctttgagattacagcagggagaaggaaacatgcccgtctggccggggagctcagccactaaccgagacttagcctctgtcatcccaatccaggctgcagctccagatagggggcgtctgcacacagcttcccacacttggccccgcggaacacagtcctgctggcctcagcctgtgggaaccctgcttcatgtaaaggtcacctaaactctgccttccctcaaccccttcaaactctgcctttcccttcgttcttgggaggcgctccctcattgcagtgggtcagtacacccgattttgtggaccacaggtttgctcctggtggtcttgggctgaaggggctgcaaaggttactgaatttcgtggaggtaaaaattgcccgcaggaaatgtcatgaaagtccaggtgcagtaggtttcctggtgtgatgcttcaaagttatcttcttacctggagccccttccagctgcagacttcagaggtcggaggttaatcaatctggaatgaccccacagcccacccagctccagctcgggattcactcctgcactatgtcctagggattctggagccaacaagatcgaacttcgggcacagatggcagggctgtggggtcgagcttggctgcaagctccgaacactgatgcaatctctctgagggtgatctggcaattcagaagtcataaaaatgatagtgccctatgaccacttctaccactctggggaattgagttcaaggaaagcttaagaagacaaaaagcaagttatgcaaatatgttatctgctgtggtgtggtaaagtttaatcccccagctgtggtgcacacctggcaaagaatggaggcgctgacacttattgatcattacttgcagtgtacacgtattaactcctgatccctgcaaatagcctgctattacccccgcttgacaatggagaaggtgagccacagagaagttaactcttccctaagccsacacagctaataagggaaacagccaaggttcaccccagccaagccctgctccactgcacaagcccagaaaaatgtatctgtgctcaaagttaatatcataaaccattgtgctgctaaaaggaatgactgttttaatagctagctaggaaggtgtgattgatgacacaatactgataaatgaaacacaaaaataaggatgtaatgcagaaatgacagtaatgatttgaatattactttcatttagtcaatttaaatttaaattaaataaccacatgtggctagggactactgtgttagaaacacaggtgtatatccaaacctaaacactggttatttctgaatggaagaattatcaggggggttatcttattttctccatacattttgtatttcctgttttttccacaatatttcttttgtaagtggagtaagttttagtaagaaaaactagaggccacagacttcactaatggatgctgatttaaggcctatatattctcttactggattgacttttaattctttgttactctggttaaataaattttaagtcctttctttcatagctacactttattaaattttccatgatcctgacaaaaattctttgaccaaactctagtcaggcttctgagccttgtagggccatcatacacttccctgtgacatctgttttagcaatccctgctttgtcaatttagcaggattccctgcccctgatrtctgatcccccttggtgacatctgatcaggctccccatgctccaccatcccccatgctgtccaatcaccctggcctgccttcaacaggaatcctatgaggtggtttagacacaatcacctggacccctgaagtgccctcttagtaactgtccatccactgacccctcccccagtccttggctataaatgcccacttgcccatgctgttttcggagttgagcccaatctctctcccctgctgcaagatcccgttgcagtggtccctgtacctatcatgatggttgtgaataaagtctggtaccatgctttaacaaatgctattgattattttttttctttaacagttatcttacccagatgtcatttcctcttcctgggagctgccatgktccttcccctctcctgcagcacttagtccaatactgaatcttcatgatgtgactcttcataatgcgcatggttgacgcaggaaggagccctctcaccatcatgtctcctcacctcctctggccgctaatattgctgaagtggctaaatgagtcccagtattaattatctcagccattttcaggtaatttatttatttatttattattaatgtttttgagatggagtcttgctctgtcacccaggctggagtgcagtggtgcaatctccgctcactgcaacctccgcctcctgggttcaagcaaytctcctgcctcagcctcccatgtagctgggattataggcactcactaccatgcccagctaatttttgtatttttagtggagacaggatttcaccatgtttctgggctggtctttaactcctgacctcaggtgatccgcccgcctcagccccccaaagtgctgggattacaggcgtaagccaccgcacctggccatcattttcaaataaataatttttagatagttttaagtgttgtaaagaaaagcaggttgagctgttagttacaggaggtgatatctgagctgagactaaaaaaaaaaaatgaaagaatggaccaggtgcagtggctcacacctgtaatctcagcactttgggaggccagggtgggtggatcacttgaagtcacgagttcaagaccggcctggccaacatgatgaaaccccgtctctaccaaaaatacaaaagttagctgggcgtggtggcgcatgcctgtaatcccagcacttgggagtctgaggtatgagaatcgcttgaacccggaggtggaggttgcagtgagccgagattgcagtctgggcgacagggcaagactccatctaaaaaaaaaaaaaggcatgaatgaatctgggggaatagcaaatgcaaaggtcctgaggtgggcatccacttggacagttcacaaaagaggcatctgaggggcattgggatacaccaccccaaaatatgcctcttcgcatgtggattattttgaattaaaggccattaagaaccagcagaccacaggaaaggctctaaaaaccattttcattttgtaaaaaaaattcacatttattataaaggaaatttccacgtctccctcttccatgcaaggaagaggatatcttgtaacaactcttatcagtggaagaaagtactgacttaagtctgcataacaaaccttcctaaacaacccttgtttaccatacttttcctgggcaccttctgctgaggtttgaatataccctccaaaactcatgttgaaatttaattgccattgtataagaggtaggactgttcagaggtgattaggccatgaggcctccaccctcaaggatagattaatgccattgtgggagtgggttgttataaaaatgagtttgaccctctcttgttctgtctctttcaccctctcttgtacttccaccctccttccatgggacaatgtagcataaaggccctcaccagatgccaatgccatgctcttggacttcccagtcttcagaaccatgagccagataagccacttttctttataaattacacagtctgtggcattctgttacagcagcacaaatagaccaagacaccttcccactacatgcctcccctgcccagaagctccaggccttttcctttatgtcagcctaagatgatagatgaacccaagtcctgaccacactttgggttattcattgccaggtactgccacatgtaagtgcaatgcacatgccaataaacttgtttttttcttgcctgattgaattgtctttggctggtgtaattagaggccccctagctggagaccctaacatgggctggggaaaagatttttttccttctgtaaataaccaagagttggattcagcttcatcttccattttagcaacaaaactgccaggcttcagaacaggcaaaatggaaagaaattgggctatgcttttattttatataaagctgaaaagcagttttgcccttctaagagaaaggattgttctggcagcctggatcagagcagtgatcaggccagagcatctgctaacctcagcatcagggaatccctgttttagactgtcctctacgtctctgtcttctccttttgggaggtaatttttaaaaaatcactaagaagggatggatgctggttctggtttcgttactgttgtagggagctattctgtgttgctggagataatacattacctttaaagttcttttatctttttgtttttgagacagggtttcatggtgttgcccaggctggaatgccatggtgtgatcacggctcactgcagcctcgatctcccaggctcaggttatcctcccaccccagcctcccaagtagttggaactacaggtgcatgccaccacgcccagctaatttttgtatttattatagagatgagctttctctatgttgcctaggctggtcttgaactcataggctcaagccatccacccaactcggtctccctaaagtgttgggattacaggcatgagccactgtgcccagcctgaagttctttaaataggtatttaagattctgtctgtagcaagtcccctgtcatctgcctcagaaaaagagatgaaagatgtcttgtgaatggaagaagatgctgtgggacttagaagcggggtgtggaaaacagacatttttggtcggctaggcttaagcttcttgaggacctgaagagtgtctcattgatcgctggtgaaatgagtgactcagaagcaccgccggcccttgagaccgcaggtgcggagggaaaatctctctgggatcccagcaacgccactggcagatctgtgctggtcaatttcgtgtttgcaaatgaacacagacccaggctttcaggaaacagagataaataacaaatgcattatttttgagaggctggtaattataaagctcgagggaataaagagcccaccagctggaatgacactgtggaactgatgccctccctccactggggtgtgtcaacagatattcttagtgacattaatgattttaacacactgacattaaaggaaaaagaatctattgaagggctgggttgcccctccacacctgtgggtatttctcgttaggtggaacgagagacttggaaaagaaaaagacacagagacaaagtatagagaaagaaataagggggcccaggggaccagcgttcagcatatggaggatcctgccagcctctgagttcccttagtatttattgatcattattgggtgtttctcggagagggggatgtggcagggtcacaggataatagtggagagaaggtcagcagataaacacatgaacaaaggtctctgcatcatagacaagataaagaattaagtgctgtgctttagatatgcatacacataaacatctcaatgtcttacagagcagtattgttgcccgcatgtcccacctccagccctaaggcagtttaccccatctcagtagatggaacatacaatcgggttttataccgagacattccattgcccagggaggggcaggagacagatgccttcctcttgtctcaactgcaaagaagcgttccttcctcttttactaatcctcctcagcacagaccctttatgggtgtcgggctgggggacggtcaggtctttcccttcccacgaggccatatttcagactatcacatggggagaaactttggacaatacctgactttcctaggtggacgtccctgcggcggccttccgcagtgtttgtgtccctgggtacttgagattagggagtggtgatgactcttaatgagcatgctgccttcaagcatctgtttaacaaagcacatcttacacagcccttaatccatttaaccctgagttgacacagcacatgtttcagagagcatagggttgggggtaaggttatagattaacagcatctcaaggcagaagaatttttcttagtacagaacaaaatggagtctcctatgtctacttctttctacacagacacagtaacaatctgatctctctttcttttccccacaatctatgagaccagagtgatactgagaagaaatgaaatggagatagggaagaaggaagccgctcctctctacaggatgccaaatcaatgcaggaggagattctgagaactactggacaacggccacaggggaacaggggattcattccatctcaaagcctcaccctacacattatctttattagctataaaagggaaaagggatttgcaatggagagttatggcagactccagcctcatgaagtgacacaacttagcattgccacccaggggacaaacccacactatgagtctgattcagtgcaccaagaaggacaaacatcacttactctgctataacataacgcagtatattatacactaacatatgtagtatattacattacataataacatagtacaggcttctaggacacagtttatagaagtgcagataatacttgaggcagtttcccaaacttgcaaataaaaactctccacagggcttgtgactagcacattcccaaagccccaaacccagaattccacctgcttagtgagcacctccagagcacttttttttttttttttttttgagacggagttttgctcttgttgcccaggctggagtgcaatggcaggatctcggctcactgcaacctccacctcccaggttcaagcgattctcgtgcctcagcctcctgagcagctgggattacaggcacccacctaatttttgtatttttagtagagatggagtttcaccatgttggtcaggctggtcttgaactcccaacctcaggtgatccacccaccttggcctcccaaagtgctaggattacaggcacgagccactgcgctcggccatctctagggcatatttttactgtgcaatgtgggaatctctgccatagggtgggctgcctttctaacccagtggcccggttctagcaggacttccccagtatgtggatgggggcacagggactcttgggggggcctcaaggcatctgtgagctaggcctaaccaccgctactgaatgactgcgagatgagtcccagagctgggacgagagtgggcctggtaccctgccccagccctcccctgacaggagttagtaagggacaggttagcatgctaaagagatagcaagctggtcacagcctagggccaccacccttctgtcttacaagtcagaaacatgtcctgactttgggggagagggtatatgttaaacgggcccaccctgggagctgtagtggtcactgtggagctgagcactgggctgcactcctcgctgccccagagtgaccaggtgggtggtttcatccaagaggcagggctcagaaggccaggctgagccaccgatatgcatgtctgcaccccaccacttcctgctcagtctgtatcaggcccgggatgaaatcgtcacttagacgctcaggggtcctcccacccatctggccaacacaaacctgccagcatagcactgagtggaaggttccagtgcacccacaggcctggctgttaaaatgtccggcctctccagaggacaggttaagttcacactgagaaagcctggctctctccagctagcctgaattaaagtgagaaggatgagcacagcacctgtggaaatggcgctggaaagcaagtgtacctaggaactgcctctgggccaccgaagtgcgccggcccagtgttctcagacaacccaggaggagtcctccatctggccacttcccacccgttaggccccgaggggacaccaggttggtgagacccggaccccaccagcaaaggacccttccttcattcatcacacactggctccatctgcactgcacctactgccagccaggcactgagcttcacatccgcacaaaacacaaagacctctgatacggtttgggtctgtgttcccacctaaacctcgtggtgaattgtgattatgttgagttgttttggaggtagggcctggtgagaagtgactcgatgatggggtggatttctcatgaatggtttagcaccatctccttgatgctgttctcaagatagtgagttttcacgaaatctggttgtttaaaagtgtgcgccccaccccttgcttctgctctggccatgtgatctgcctgccttccccttcgccttccaccatgattgtaagattcctgaggcctccccagaggctgagcagatatcggtactacgcttgctatacagcctgcagaactatgagccaattaaacctcttttctttataaattacccagtctcaagtatttagagcaatgcaaaaatggactactacaacctcacggttctggaggctgaaaagtctaaggatggagtgtccttctcagtgtgcagtcaagatgccggcaggtttggggcctggtgaggctctttgcttcttccatggtgtcttttgcacggtgcgtcctccggaggggaggaaggctgcatgcttacatggcagaaggtgaaaagccaagagagaacccactcccaaagccctctcagtaaggcattaaacccaccataagggtgcagctctcatggcttaatcgcctcttaaaggcgccacctcccaataccattacaccagcaatcgaaattcaacacgagttctggaggggaaggcattcaaacccttgccccttctctgaaccggtgggacttgcccagcatgccagactgcctgggctctgactccttcctcagcctgtgtcactacggcccacagttgcatcaaagcatgctgctctccatctccagactcccagcctggcatttccaatattctcccctttcacagcccctcaaatccaaatcctacagcaaatgccggagattctatttcagtcctttcttgtcaggactgacagtgtcagctggagcccctgtcctttgggacacctgtgaaatggtcctgaacacctcaagttggaccccctcaatatcagtttgggggtgtccctgatgtcacccactaaccctaatgtgcttctcagcgccttcagtttccacatcaacacaactccttataggttagtacaatccctttgaaaa

SEQ ID NO: 97520 - DNA, 16994 bp, Homo sapiens
tgactgagaggatgtgggcccaggctgctggggccggtggggcagagcagagggaagcaggcatcctccggcctgagctcctgggtccagctggcctaatccatggtcaaggctgggcttcactgctcagtgaggcaatcagcagccgctcttgtttctgtcacttgcaccccatggttctggatgagccttgggatgtgcccaggcctctgaccagtggttctcagcctgggctggacagaagaatcatcagggagttttacaaactcctaatgcctagacccaggaagtcaccatctctgggagtaggggacaggcaggggcatttaaaagcccccaggcagtcccactgggtggaaggccctggttccctggcagcttagagtccgagacagccagcccagaggtcagacattcaatgactatttccttcaaggtgtgaggttttaggcagctgcacggtttgcctaatcccctccagaggaactgtgaagatccaggggcaggtgcagctggaaatagaactggctgtggggagtttaaaaaaatctcatccggattaagggcctgagtgcacagaaaccccagcatcatcccttctcagcagtgctaatgacttctgcccaagtggccagggaaggacaggagtgcagaggacgggagggcatctctgggaagtgctgggaaaggttttaaaactcaggtgccgaatctttagccccagagtccgggaaagtcctaagccatccaggcaggtaaaatggaaaacccagaggcctcctcgtggaatcggagcaccaacatctgctcccctggggctcgcaaggcctttccggtgtgcgatgaccatggggtggagggaagcgctgacaggggacaggcaggggaaggggcagcggctcggctctgagaagacagctgggtgaaagcctcagattcgtgtggacagaactgctgtcatcaggaagccgctcccaagacatggaagggaaagtgcggggcatttcagagatgagaatggttaactggcctgtaaggtcatcttttgtgcctctaccccaaacctctccgcaaattgaggaacgctccctataatagctaatatggatttcgccaggcattactataagccttgccacaaatgaatgcatttaatacttccagccatgatgggaagcagctgctcttatattccctgttacagatgagaaaacagaggctcagtgaggcgacgtaatcggctaaagttgtgcagctggtaggggaagaactggggtttcaaacccatcctttccttctttttaaaaattggctttcttggcatataatttacgtgcaaagttttggcaaatgtgtagcgatggtatcatgacaacaatcattacctagggcgtttcaatcacccctaagaattctcttatgcccctctgcagccacccctccccccagccccttcccagcaaccacctctcagcttctgccactgctggttgcctttcctagaattccctctattttgtcttcttttttaagacacagtctccctccattgcccaggctggagtgcagtggaacaatctcggctcactgcaatctctgcctctcaggtccaagtgattctcctgcctcggcctcccgagtagctgggattacaggtgcgcccaccaccacgcccagctaatttttgtatttttagtagagaaggggtttctccacattggccaggctggcctcgaacccctgaactcaggtgatccgcctgcctctgcctcccaaagtgctgggattacaggcatgaggcaccactcctggaccctagaattccctctaaatggaatcatacagtatttaatattttgcatgtggcttcttttacttaccacagtgcttctgagatccatccatgctatctcaacaatcagtaactggctcctggttttgctgggtggcggcccactgtatggacagaacaccactgttaatacatgtttgcactgatggacatttgggtcattccatcttccactattatgcataaagctgctggaaacatttggatacaagtctttgtgtgaaaataagtatttattttgtgtaaatacctaggagcaggattactgggtcatatggtagatatatgtttacctttttaagaaactacccagcacttcaggaggctgaggtgggtagatcacgaggtcaggagttcaagaccagcctggtcaagatggtgaaaccccgtgtctacaaaaaaatacaaaaattagccaaacatggtggtaggcgcctgtaatcccagctattcgggaggctgaggcaggagaatcgcttgaacccaggaggcagaggttgcagtgagccgagatcacaccacggtactccagcctgggcaacagagcgagatgccgtctcaaaaaaaaaaaaaagaaaagaaactgttttccaaagttgctgaaacattttgcattcttgctagtaatttcttcatgttccagtggtttaaatcgtcaccaatacttggtattgtcagtctttaaatttcatccattctggtgggcatgtagtgaagtttcattgtggttataatgacgaatgataggccgggtgctgtggctcacgcctgtaatcccagcactttgggaagctgaggtgggcagatcacctgaggtcaggagtttgagactagcctgatcaacatggagaaaccccatctcaactaaaaaatacaaaaaaattagccgggcgtggtggcgcatgcctgtaatcccagctacttggcaggctgaggcaggagaatcactagaacctggaaggcagaggttgcagtgagccgagatcgtgccattgcactccagcctgggcaacaagagtgaaactccgtctcaaaaaaacagaaaaaaaaaaaaaagacgaatgatgttgagcatctttatgcttctctgtcattcacacatcctctttggcaaagcgtctgttcaaatcttatgcacgtttgaaaactggcttgtttgttgtgtaagttctttatatatattctgttcctgtagcagatatatgatttgcacttttatttttaatgaaaagcttgcttttcattatctttttttttttttcttttttttgagacagagtctcgttctgtcgcccaggctggagtgcagtggtgcgatctcggctcattgcaagctccgcatccgcggtgtaagccattctcttgcctcagcctcccgagtagctgggactacaggcgcccgccaccatgccggctaattttttgtatttttttaagtagagacggggtttcaccatgttggccaggatgttctcgatctcttgacctcgtgatccacccacctccgccccacaaagtgctgggattataggcgtgagccaccacgcctggtgagcagagggtgactgaatagaatgggaggcaggatggccctaatcagtcccagcttgacttttccctttagctggtgattttggggcccaagatattttcctttcacaactctgttctctgtgggaacaaatgacttcaactttaaggcaggagaatggtgtgcacccggcaggcagaggttgcagtgagccgagattgcgccactgcactccagccagggcgacagagagagactccgtcaaaagaaaaaaaaaagaatgtatccatttgtctctcatctacctgtgacctggaagccccctccccacttggagttgtcctgcctttccagactgaaccaatgttcattttacatgtgttgattgatgtcttatatctccctaaaatgtataaaaccaagctgtgccctgaccaccttgggcacacactgccaggccctcctgaggctgtgtcaggggcgcccacgtcctcaaccttggcaaaataaactctaaattaactgagcccggctgggcgcggtggctcacgcctgtaatcccagcactttgggagggtgaggagggcagatcacttgaggtcaggagttcaagacccgcctggccaacatggtgaaaccccatcaataccgaaaatataaaaaatgagctgggtgtggtggtgcacacctgtaatcccagctactcggaaggctgaggcaggaaaatcacttaaacctgggaggtagaggttgcagtgagccaagatcacaccactgcactacagcctgtcaggagagagattctgtcccaaataaataaataaataaataaaataaagtaaattaactgaggcctgtctcaaattttcagggttcacagggttgtcccagcaccatggtgggaagacagtcttttgtatttcaggtgaattaccctggctcttttgtcaaaagtcaatgggccacatccataagggtctatttctggaccctattctgtctcacttgtcggtgtctgtttttcttatggcaatactacactgttttgattacttacagcattatattaagtcttgaagccagatagtataagtccttcaactttgcttttctttttcaaaatcaagtctgtagacccatgaagacgtatactgttttgttcttttgagtctctgatttctttcatcagtgttttgtagtttcaggatgtagatgtcacacatcttttgttagacttatacgtaactatttcccgatttttggtgctactgtaattgacaatgtttaaaaattttacaatttctagttgttcactgcagttataataaagttaaattttgtatgtggaattaatatattaatatgttaaatattaatgtattaaatttaacatattaatatatattaaatattaatatattaaatttagtatgtgtagtttcgtggtttttttgagacagagtctcgctctgttacccaggctggagtatagtcgtacaaatactgctaactgcagccccaatctcctgggctcaagtgatcctcccacttcagcctcccatgtagctgggaccacaggcaggcgtgaccacatccagctaatctttacatttttttgtagagacagggtcttgctatgttgctcaggctggtcttgaactcctgggcttaagtgattctcttgcctgagcctcccaaagtgctgggattactaaaggcgtgagccaccatgcctagcctcgtagttattttttgaagatttcttaggcttgtctagctagtcaaagcttgtcactggcgaataaagatagttctattccttcttttcaaatctgaataacttcctttttttttcttttgcaccaataggatgaggaataaaagtgatgagagcaatgtcagtttcctgggtttggtaaatgtactgtgcttaggtaatcagtacactggagggagccacatgaatgctgcacagaaacacgactgctggccccgcttatctgcagtttcacttactgcagtttcagttacccacggtcaactgaggtctgaaaatattaaatggaagattccagaaataattcataagttttaaattgcatactgttcctagtgggatgaaatattgtgtcatcctgctctttcccttcttcatcacaagggcgagtacagtacactaagatatttagagagagaccacatgcacataactcttattttagactattgttctaattgttctatttactatgttactgttaatctcttactgtgcctaatttatgaattaagctttatcgcaggtatgaatgtagaacagtaaattccacattatctatggtttcaggcatccactgcgggtcttggaatgtatcccccacagaagggggatatgaaccaaaaagtatctgagactgttctcaaccagttaattttgccaaggtcaaggataaggccagggaggcaaaacaaaacgtgacaaaacacggaatcgctgaaacagtctgtggtctgtgcctttctccaaaggtgactttgagggcttccatatttaaaggggaaaagcaggctggagggggaagtgggagggtccggtcctagtgctgccgccacgggttgcaagagaagagaagcaggcaggggaacagtcaatcgtgtattcatctggtgctcagtaaattggcacttcacataagataaggtgagcacagtagctacctgccgaggtctttagcctttcctctgtcgctctctgcttaggaacaagaggaaaggcagctgcttgcatgactcagctctcagcttcctgttttttcctattggaagggtgcattgcggtttttattttcctttcayaggacctactgtatttttgcaacttctgtgtggttcaaaattttatttcaaaggaaaaaatggtggggaagaaagtggtgaaagcagacactcttgcgttgttcctcagggggaaggcattcagtgtctgaccgtgaagtaggagcttagctgtggacttctcaccggagcccttcatcgggttaaggatgttccctaacgggttttttggctttttgtttagaattggattgggtgaatggctgttagattctgtcaaatgctttttctctatcttttgagattatcatgcttttccccctttttagtctttttttttttttttttttttttttgagatggagtctcgctctgtcgcccaggctggagagcaatgggatgatgtcggttcactgcaacctccgcctctcaggttcaagcgattctcctgcctcagcctcccaagtagctgggactataggtgcgccccaccacccccagctaatttttcgtgtttttagtagagacggggtttcaccatgttggccaggctggtctcgaactcctgacctcaaatgcccacctcagcctcccaaagtgctgggattacaggcatgagccaccacaccctgcccctttttagtcttcatatgaatttcattgattgatttcagaatactgaactaaccctgtattcctagaataaaccacacctatcgtgaagtattcttgtcagagacgtttgaaccagagccactccatcttgaaccaggtctgggtaaattacggctgagacctgctgggctgcattcccaggaggttaaggcattcttagtcactggagacagaaggttggcacaagatacaggtcataccttgctgataaaacaggctggccgggcgcagtggctcacacctgtaatcccagcactttgggaggccgaggcaggcgaatcgcgaagtcaggagtttgagaccagcctggccaacatggtgaaaccccatctctactaaaaatatacaaattagcagggtgttgtggcgcacgactgtaatcccagctactcgggaggctgaggcaggagaatcgcttgaacctgggagtcggaggatgcagtgcgctgagattgtgccactgcactccagcctgggcaacagaatgagactccatctcaaaaacaacaacaacaacaaaacaggctgcagtaaagccggctaaaacccaccaaaatcaagcggcgatgagagtgacctctggctgtcctcactgctatgctcctgcaagcaccatgataaatgccatggcaacatgaggaagttaccctctatggtctaaaaacgggaggcatgaagaatccaccccttgtttagcatatcctcaagaaataaccataaaaagggacagtcagcagccctggagctactctgcctttagagttgctattctttattsctttacttttttttttgagatggagtctcactccatcgcacaggctggagtgcagtggcgcgatctcggctcactgtaacctccatctcccaggttcaagcgattctcctgcctcagcctcctgagtagctgggattacagacatgcaccgccamgcccagctgatttttatatttttagtagagatggggtttcaccatgtggtcaggctggtctccaactcctgatctcgtgatttgcctgcctcagcctcccaaagtgttgggattacaggcgtgagccaccgcacctggcctactttcttaataaacttgctgtcactttactctatggacgtgcccagaattatttcttgtgtgagctccaagaaccctctcttggtgacctgaatcagacccctttccggtaacattctaatttttgattattgctgaatttggcttgctaatctgtgctaaggattctttttttattttttatttttatttattttttttttttgagacggagtctcgctctgtcacccaggctggagtgcagtggcgcgatctcgactcactgtaagctctgcctcctgggttcatgccattctcctgcctcagcctcccgagtagctgggactacaggtgcccgccactgtgcccggctaacttttttgtattttttagtagagatggggtttcactgtgttagccaggatgctctcaatctcctgacctcgtgatctacccgcctcggcctcccaaagtgctgggattacaggcgtgagccactgctcctggccaggatttttacatctatgttcatgagggatactggtctgtatttttttttttttgtaatgtatttttctggttttggtatcagtatagtggtgccctcataaaatgagttggaaaagtttcccaactcccagaatcatggaagattttgtgttgctttcgtattatttctcccttacatgtttggtacaattcaaaagtgaagccatctgggccaggggttttcacagtgtgacggtattttatttttgctttaactcttttaacagcatgaagggataacttaccttgagatttatcaatttaaagtgtaccgtgggccgggcgcggtggctcacacctgtaatcccagcactttgggaggccgaggcgggcagatcacaaggtcaggagatcgagaccaaactggctaacatggtgaaaccccgtctctactaaaaatacaaaaaatttgccgggcacggtggcgggagcctgtagtcccagctactcgtgaggctgaggcaggagaatggcgtgaacccgggaggcggagcttgcagtgagccgagatagtgccactgcagtctggcctgggcgaaagagcgagactccgtcttaaaataaaataaaataaaataaatwaaataaaataaataaaataaaataaaataaataaaataaaataaaataataaaataaaataaaatagtgtaccatggctgggtgcagtggctcacgcctgtaatcccaacgctttgggaggtcaaggcggatggatcacttgagatcaggagtttgagaccagcctggccaatatggagaaaccccatctctactaaaaacacaaaaattagccgggcgtggtggcgcacgcctgtaatcccagctacttgggaggctgaggcagaagaattgcttgaacctgggagatggaggttacagtgagccaagatcgtgtccctgcacttcagcctgggagacagagcaagactccatccccccaaaataaaaaaaagaaaagaaaaaaagtatactggaatacaggattaacacgtggaatgaaagaaactgaatctcgtttttttgtccagttgaggtgactggagagtcttccatttgcagatgagctgtgtgccggacccatgagtgtggagccggcagtcactgccccacgagtcccgcatgtcacagcttcttaaacagatggtcaagagcttacatgcggttccttatcccaacccgccgcggcccgatgcgccctggctttttctggaactgttgttctgtggatcctcgccgagaacgcccagttctccttgctgctcagtcatggagtctctctggggaccccgctgccgcgctggtccttctgcagaggccgcctccctgcagcgctgtcttggtcaggctcccagcaggaaaagacgacacccgaatgaagatcatctaaggaggcttcagtgaagggaccatttaccacggatgagacagcagggcgtgcgggcggcacgaggggcygctgtagcatctggagctgctaacagtggagctgtcactcccatgtcacactcccaggccagaagagaccaggggaggggactcagcccagacactgggagtggcaccagggggctgccttgagaggcgagtgccagagagagtcagggactccccaggggccatcccagagggcactgaggaggttcactgggtctgggacccggaggaggcggggaaggagagtgggtctgaagggtaaggggtcgatgtgggtgcaattgccctttctgattccgctctcccggttttctgtccctctctggccgcccctgtcctgtctctagttgaggtctttcttggccagtgcctgcctccctggcgcctgtggtttcagtgatggggattcttccatgcgtcacttggagcgacctcgtctgttcctgtggactcactgacacactaaagacaccagctcagccctgacctctcacctgagcgcctccttaccaagtcatccagatggctccccagggatgagcagcaacaaaacgggcacgtgggtgcccagcacacgtcaggtgatgttctaagccccttgcgcgtacccagtcacttaccgttcactgcagccccgggatgagctctgcgatgagcatccttttgcagacgaggacactgaagcacaggaaagttaggtcatttgcctaargacatgcagctggatggggacagagccaggatcgggcttgcagtggcttcagaccccacctttctgaccacagcgctcgtgctcttggagcgccttgagatagtgggacaaggcggactggaggacgcagtttccagatgggatgccctggcgggcgactcccgtgcgcatgcccagcatcctgcgcaggcgctctcgtggccaggcctcygcaaacagtcagcacagaccgggagacagaaaactacactccctcagacgctttattgtttacaaaacagatggatcccataggraaggaacacaatcattatgctgacagcagcgaacagagaggggaagmaaaaaggtgagctttaaagtaatcgcaaatcactgcctatgcgaagaggctgcttccgggcacctgggctgtgactcaggtgctgacatgaatacatcagcaaggtctcaattcagccacagtcccaagtcccccaaccttcctgattgcatctctattttaaatgacccagcctggacatcaaggacaatgatctaggaggcgggtcaaggagacagccaggcaaagtcagaacagacttggggcttccaggctatgcccggtgacagctgagctcttcagaaatgcgtcacattcagcgttcacttccttcgcttcctccactacctatgacatagcgggggaaagagacaaccatgagagaggggtccctcctcgctgccctcctcgcagctgtgcttgagtttcaaagggggagaggtttgtgagggaccggcacagggacagccagagccggcaccctccggcccaccgtggcacccctgacgatcgcggggtggggtaggagtgagggtgggggtcggggtgaggtagtgctgtggggagggcactgtgaatgatggaaacgtcccttctcagcctgggtcgtgcctaacctgggtctcaaatcccactctgccttcaccctggagtacactccagcgaagccgaggcccagccaacgctcgtgaagtttccacagagaagagcctgcaaaactcccactggaagaggagaaataaaggccatggaaagaaaccccagggaagagacaggcctcgttcacagaccctaggcagggaataaaaaattcaagtcattcacagaagtcttgaaaggcatgaggatttctgacagttcctagaaaaaggcaacattttctttatctttgtatccattggccaagaacgccgacatgtgagacttgcttcaccagccgccaccgcttccttacaatctcccgcactgctggagcgggctgggtaactacaggactgtgctctgtgtgataagatttggtgattccactttataagaaaggaaactgctttaattaaagcaggttaataattaaaacttcaaagtactgcacagccacagaattttcttgaagggagaaagcggtcactggccatatgatgcggagatggttttatctgaggcctgagaaccaacagatgtgcctgcgccctggcctgtgcagctgtgggcagatgtgtccccaggggcctgccctcactcgtgaccatgcaataccctgcaacataaacattttcttttccaaggatctgcaggggtggacatgatgctccaggcacagagtaggaagaaaagggggtgacctggggttcccagcaaacaggtccacctcatgctcactgcgttctcagggtgaggcatagggcctgacatatggtaggagctctagggatattcactgaacaaaagaacataggaaagaaaagaaacgaggtcggatggaagaaacgacccagccagttaggcaggccttgagtcaatgcctgaagtgaccgaaatcaccaccagatggcagcatggaaagcagttcagaccgcggcctccgtggggcccgggggtccagtgcccgcaccactatggggcccgggactgggctccctgtccagacctccaacccaggcacagttccaaaaagaacaaaacaaaacaaaagtgcactcctcttgtttttataaaagctgagtcctgatggccttgctcagtgtttccgttttgagttaaatgaactcgatgccttcgtatttcacgcttccgatcttggtctccggcaacaggaagcgcccgtccagcgtgaaggccatgatgtaggaggcgactctgccgctgtcctcctcggatttgagggccacaatgatctggtcgtcggtgttggggatgaacttgaaggacgagaagccgtgagtggggaccaccgccccgacgtggctcacagcgatgtcgccgaagtcaggggaggcgctcagcagcaggttggcgcccttgcgctcgtcgtccttctcgctgtagcgctcctggctggcgcggcgcggcaggaagaaccagcgctgcagcgtgtcactccagcaggcagactcatggatgaggtagcctgggaaccgggtgaccgcgggtcagacacgcatgcggcctggtgtgcccagccccacaccatcaggccgtgcgcagtagcaggcaaggggctgcgaccaccagggcccaccagctcacagcaacccgcccctccctgctctccaggattctggaaggttctgtgttctcggttatcccatgcagggaacctgcagcacccgctcccttgaagcctcctcccgttccaccgagagctgcctgtgagctgcatcagggatttgggctcatcggagcctcctcggggctgatccagaggaacccaaggaaagggaacaaacccccattggatgtggggaggcatcggcggggaggctgccttgaggctgcaaggaagaggagacagcgtctggggccccaggcacagactcagtcacttcctcctgaacctcaggcacctaaggcctactccatcctgactagggggaggccaaagtgctgctggccctatgttggtgtggaacaccacggcccagcgccaggggtagggacagggcctgacccaccagtgcagacaaccgggccacaggctgggatgctaggaggccagctgccagggcgagtggggcaggaaagagaaaacagctcatttgccgccagaatccactggcctgagggaagccaccatcagaggcaaccaaaatcactaaaatcaagcaagaaacggccttggaggctgggtgtggtggctcgcgcccgtaatgccagcactttgggaggccgaggcaggtggatcaccagatcacccgaagtcaggagttcgagaccatcctgggcaacatggtgaaaccctgtctccactaaaaatacaattagctgggcgtggtggtgcacacctgtagtcccagctactggggaggctgaggcagaaaaatcgtttgaacccaggaggtggaggttgcagtgagctgagatcgtgccactgcactctaaccggggtgacagagcaagactatgtctaaaataaaaaacggttttggaggcaaatgcaggaggaagcaggttcccagcgactgggctgtggaagccacactgtgggctggggcaggcgtctcttacctggcggctggatgccggcagcagcccgcagggcgttgtagttggacacccagttctcgtggtccacgctgcccttgtagcccaccaccttcacccactccgggttctcgttcaccacatcacccgtagtggtcgtccactccttgcccaggccgcccacgtacagacgctcgtccttcactgccagccattcggccttgaagcctggccaagcagagtgtccttaggccccgcacccagctcccgccgcacccctgcacctggctcccacccggccccgcacctgtccttagaccccgcacctgactcccgcccggctccacacctgcctcccctccggcccgcacctggctcccgcccagggccggccggctgccctcccctcagctcctgaaggttcagtgaccactctcaagtctcctctgatccccaactccccgctcctcaagctgtaaccccaaccttaggattatccttaaaggctagaaaagctgaaaagtgacagcactctgaaggggcacgtgtgtcccaggggagtgcgggtgctgccctcggccacacctgaggtctcaccgagcatcactctaactccagtggccggagaggggcttggtgctggggctcccagtcttcctttcaatggatttgttcagaagctgtttttgctttttttaaactgatttatttaaaataagcctaactttgaaggctgccacagttcaggctgtgtgggagcctgtgttctaccgtgtattcttatcatccctacaccctggtgttctaacttctgtttgctttccccaaattttgccagcttcttgcccctgagagctggagctgtgccctctgaactgcccgagactgtagtagcttctctgcagggccctggagggacctgcggtctcctggtctgcttgtgcgatgagacattctccatgccagggtcttccatccctcccggatgacctgagtacagcccaaccccagagctccctgtaccccgctttcctccctatccaagggaaggacagaactacactagggttgcctaaaaccctgacaagtgcgaggcaggaagtaggcgaccaacgcctcagttgatacctcaggtgaggtccgtcccctgcccagccctgggcaaacactgaagattttatcaccgggtgtggggagggcctggccggccatgaactgtgtgggccgttgtttagtgcagttcctccttgacctcagaaagcctgcggtggcatttagctttctagaaggtggggatccaccgccagctcagacaaacggagctcagaggagctggcagctcctctgccagcgtccttggcacctccccagctcctctctggaggaagacactggccaccgtgcctccccaaagcctgtccctgccctgtggaagcagcacctcctttctggtgaacaaaaaggctggcatcaggctccactccaggggggttggcacagctcacacatgccctccccctgctggggttcagggagaggagggctgggcagcagtttacccttcagtaacatgaaaccaaagtctgggttttgagtgagaaccatctgtccccatggctttcagggcaaggctcctggtaggcacatcctagcgtggtcttgagaacctttgaaggtgtaaaaagggcgtgttcccagaggctccgagagcagcagcggatacagccgaaaacatcttggagagattccccacgtctcccacaggcctctagcgataagctcttcctcctagaaactgctcagtgtgaagtgacagtaggctatgctcctggctaagggtaagggggccgcaggtcagagcaagagggagacgtgctccctcaccacatccctggcttctaggtgtgtgaattctttaccatgtgcctgtgtttgccagccaggccctgagctcccactccccacccacacctccataaaacctcagggtccagttacctttctccacggtgccgtcgccgtcggacagaatcacccagggcacggctttgctgccttcgatctggtagacgacccccgtccggtcatccacggagtagagtttcccattgaaaacaatcaggtcggatagctccatgcctctccccttctccgccaggtgggactccaggaccccatggtctttgtcccattccacggccaccttgtccccactgtctgacagggtcaggtagccctttttcaggtaactgaaccaggtgttttcctcttgggcccttgactctgtgtccaggtctgcgataactgcgattcgataccgaatcccagccggtgtcctttgtgggggagacagggggtaggtgtcattgtaccagttggcgggcgcctggccgagcctccagttgtgtgcattgtgggtggggggcctgccgggggccgggcggtgggagcagagcagccagaggatggcagcacccacaaagaacgtcaggatcaccttccagcgggggcggaagcgggggtccgcggccttggtcatggacgccagcacaggaaggccccccacactgatccggagggagtgcatagactcattccattccgggtgctcagacagctgcacgggcatcagcgtgacagacaggcgggacctgcacagccagggagggaggagaggagtcagcgcctccgcaagcccagtcacatcttagttccggaagctgcaggcgctggaggctgacttttccagaagaaacagtatttcactactctgtggccattcttactcccttggcttaatgaattcccgactctagattcccgactc

SEQ ID NO: 97521 - DNA, 14005 bp, Homo sapiens
tttaaatttaaatttcttgtagagactggatcttgctgtgtttcccaggctgttcataaattcttgtgctcaagtgatcctctcacctcagcctcccaaattgctgggattataggctgggtgtggtgggccacctcagcctggggtctctttaattaaggttataatgctaactgacaggcctctgagcccaagccaagccatcgcatcccctgtgacttgcacgtatacgcccagatggcctgaagtaaccgaagaatcacaaaagaagtgaatatgccctgccccaacttaactgatgacatgccaccacaaaagaagtgtaattggccagtccttgccttaagtgatgacattaccttgtgaaagtccttttcctggctcatcctggctcaaaaaacacccccactgagcaccttgtgacccccactcctgcccaccagagaacaaaccccctttgagtgtagttttcctttacctacccaaatcctataaaacggctccacccttatctcccttcgctgactctcttttcggactcagcccgcctgcacccaggtgaaataaacagccatgttgctcacacaaagcctgtttggtggtctcttcacacggacgcgcatgaaatttggtgccgtgactcggaacaggggacctcccttgggagatcaatcccccatcctcctgctctttgctccatgagaaagatccacatacgacctcaggtcctcagaccgaccagcccaagaacatctcaccaatttcaaattcggtaagtggcctcatcttactctcttctccaacctctctcactgtccctcaaccactttgtcctttccactcttcaatctctcccttcttttaatttcaattcctttcattttctgggagagacaaaggaaacacgttttattcgtggacccaaaactccggcgccggtcacggattgggaaggcagccttcccctggtgtttaatcattgcagggacgcctctctgatcattcagccacgtttcaagggtgtcagaccacgcagggacgcctgccttggtccttcatccttagcggcaagtcccgcttttctggggaaggggcaagtacctcaaccccttctctccatgtctctaccccttctctgcttttctgggagaggggcaagtacccctcaacctcttctctccttgtctctaccccttctctgctttcctggggcaggggcaagtacccctcaacctcttctccttcgcccttagcggcaagtcccgctttcctggggcaggggcaagtacccctcaaccccttctccttcacccttagcggcaagtcccgctttcctggggcaggggcaagtacccctcaacctcttctccttcgcccttagcggcaagtcccgctttcctagggggcaagaaccccccaatcgcttatttccacgccccaacctcttatctctgcgccccaacctcttatctctgcaccccaatcgcttatttccatgccccaacctcttatctctgcgccccaatcccttatttctgcgccccaacctcttatctctgcgccccaatcccttatttccgtaccccaacactttctctgcttttctggagggcaagaaacccccaccccttctccgtgactctactcttttctctgggcttgcctccttcactgtgggcaagcttccaccttccattcctccttcttctcccttagcctgtattcttaagaacttaaaacctcttcaattctcacctgacctaaaaccttattttcttctgcaatgccgcttgaccccaatacaaactcgacagtagttccaaatagccagaaaatggcactttgaatttttccatcctgcaatatctaaataattcttgtcgtaaaataggcaaacggtctgaggtgcctgacgtccaggcattcttttacacatcagtcccttcctagtctctgtgcccagtgcaactcatcccaaatcttccctctttccctcccgcctgtcccctcagtaccaaccccaagcgtcgctgagtctttctaatcttccttttctacagacccatctgacctctcccctcctcgccaggccgagctaggtcccaattcttcctcagcctctgctcctccaccctataatccttttatcacctccccttctcacacctggtcgggcttacagtttcgttccgtgactagccctcccccacctgcccagcaatttactcttaaaaaggtggctggagccaaaggcataatcaaggttaatgctcctttttctttatcccaaatcagatagcgtttagggtctttttcatcaaatataaaaatccagcccagttcatggctcgtttgacagcaaccctgagacgctttacagccctagaccctaaaaggtcaaaaggccatcttattctcaatatacattttattacccaatatgctcctgacattaaataaaactccaaaaattaaattccggccctcaaactccacaacaggatttaattaaccttgccttcaaggcgtacaataatagaaaaaagttgcaattccttgcctccactgtgagacaaatcccagccacatctccagcacacaagaacttccaaatgcctgaaccgcagtggccaggcgttcctccagaaccttctcccccaggagtttgctgcaagtgccagaaatgtggccaccaggccaaggaatgcctgcagcccaggattgttcctaagccgtgtcccatctgtgcgggaccccactggaaatcggactgtccaactcacctggcagccactcccagagtccctggaactctggcccaaggctctctgactccttcccagatcttcttggcttagcggctgaagactgacgctgcccgatcgcctcggaagccccctagaccatcacggacgacaagcttcgggtaactctcacagtggaaggtaagtctgtccccttcttaatcaatacggaggctacccactccacattaccttcttttcaagggcctgtttcctttgcctccataactgttgtgggtattgacggccaggcttctaaacatcttaaaactccccaactctggtgccaacttagacaatactcttttaagcactcctttttagttatccccacctgcccagttcccttattaggctgagacattttaacctaattatctgcttccctgactattcctggaccatagccgcatctcactgatgcccttcttcccaatccaaagcctcctttgcgtcctcctcttgtattcccccatcttaacccacaagtataagatacctctactccctccttggcgaccgatcatgctccccttaccatctcattaaaacctaatcacccttaccccgctcaatgccaatatcccatcccacagcatgctttgaaaggattaaagcctgttatcacttgcctgctacagcttggccttttaaagcctataaactctccttaccattccctcatttcacctgtcctaaaaccagacaaggcttacaagttagttcagaatctgcgccttatcaaccaaattgttttgcctatccaccccgtggtgccaaacccatatactctcctatcctcaatacctccctctactacctgttattctgttctggatctcaaacatgctttctttactattcctttgcacccttcgtcccagcctctctttgccttcacttagactgaccctgacacccattaggctcagcacattacccgggctgtactgccgcaaggcttcacagacagcccccattacttcagtcaagcccaaatttcatcctcatccgttagtcatactcctattcaccattctaaactactcatacatgccctgctcttgtttacactgctggtttacactgtttctccaagccatcacagctgatatctcctggtgctatccccaaactgccactctaaactcttgaagtaaataaataatctttgctggcaggactatgctgaatctccttaggcactctctaattagatgtcctaggtcctcccaattcttagtccttttatacctgtttttctccttctgttattctatttagtttctcaattcatccaaaaccgtatccaggccaaccaatattctatatgacagaagtttcttctaacatccccacaatatcaccccttaccacaagacctcccttcagcttaatctctcccactctaggttcccacgccgcccctaatcccgcttgaagcagccctgagaaacattgcccattgtctgtccttatcaccccccaaaaatttttgctgccccgacacttcaacactattttgttttatttttcttattaatataagaaggcaggaatgtcaggcctctgagcccaagccaagccattgcatcccctgtgactcgcacgtatacacccagatggcctgaagtaactgaagaatcacaaatgaagtgaatatgccctgccccaccttaactgatgacattccaccacaaaagaagtgtaaatggccggtccttgccttaagtgatgacattacattgtgaaagtccttttcctggctcatcctggctcaaaaagcacccccactgagcaccttgcgacccccactcctgcccgccagagaacaaaccccctttgagtgtaattttcccttacctacccaaatcctataaaacggccccacccttatctcccttcgctgactcttttcggactcagcccgcctgcacccaggtgaaataaagagacgtgttgctcacacaaagcctgtttggtggtctcttcacacggacgcgcatgaaactaaccatggcttaaaatactaagcaacattttccaaattgtttattgctattgccttgactttggagaagctgggaagtaaggaggtgaggtgaacactctgacaattaacacgtgttagagaggaaagttgtgtgaagaggctgccaaagtaaacagtacgaatgaatcttcttgtactagggctgctgcaaaccccaggtagacaaatgacagcccaggctcttgaaccatcgggaacccaggagtctaccctactgtgaggagggggcaggccttcgtcaataagggtcccaccatcacgggctaataatctttctcagtttaggtgatattgaggtattgaaactgttagaaatctgacagatttgaccaagatttggagatgtccacatgttgggaaggactgagtgtccctagccactctcctctgggataacgcggacgtcattagtttgcgaagtgggtggggagaacaggaggattgactctaatttggtgtgcagtgggggccttgatgtccttctgcctctgtccacatttccccatgtgactcattgcaccctgcattgctcacagggatcattagttctcccggtagacagagcacctctgcagcctctgctctgctgccttgtgaatttcctccatagacttggttggttataatttggatacggttttttgtttttctcctttgttttaatcgtctcccatattgaagctgctattggtgacagggacaggggagcaggaagccaacccagggaaacatgcgagtttcctgcacaccatttggccacctgccctcactggccaaacccctactgctattcccagtcagtctggttttcagaggaatcatgggaatagaacagctggatacactaatctctacagggtgtcaggcaggagattcaccttccccagtcccaggggacaggagagaaatctgtaaagggacagatgcaccatctttattttaaaagaaaaggctcccgcagattttgttactaggagtctcctttgtgacatttgctaagttttctccccaatcctaccttcctattgactatcttttatataaaaataataaatattttaggctaatatgacaaaaatgagataaaatcttaacattttactggtgtacagatactaaaatgtgcttactataaaacagtaaaatatttcactttggaaatcatcactaagtaattattctatcctgttgattgtgagccttcaaaaatgtttaatgcttgatggatggtttgggaggcgggagtccttttgttattgggggagggtgtccaggttcttggcatctggaacaaagaattggacaaaatgcacaaacaaagcaaggaaggaagggatttactgaaaaagaaagtacactccacagtgtgggagtgggcccaagcatagttacagaattttggggagtttaaataccctctagaggatcccattggttacttggggtaagccctatgtaaatgggaggatgaagtaaagttacaaagtcatttacttggtctatgccctatggagaggatctttcctgtcgcagctgaagtgtgaattggccttatgttccctgcctccagaccctattttcctgcctcacttaaaacaaaacaaaacaaaccaaaaaacaaaaacaaaaamaaaaaactttaatgaggcatgtgttacatatcataaaactcacccatttcaagtataaaattcagtgattttagtaacttccctcagtgatgtagccataactattactcagttttggaacaattttatccctcctgataagatccttcatgctctttcacagttaatcctgttcttaccccagctccaggcaaccaacaatctactttctctctatataaatttgcattttctggacactttgaatcaatgaaatcatacaatatgtggtcttgtgtctggttttttttttttttttttagacagaatctcgctcagctgcccagtgcagtggtgtgacctcggctcactgcatccaccatctccgtggttcaagcgattctcctggctcagcctcccgagtagctgggattacaggcacccgccatcatgcccagctaatttttgtattttagtagagatgggctttcaccatgttcgccagggtggtcttgaacacctgacctcaggtgatctgcccgcttcggcttccaaaagtgctaggattacagacgtaaaccactgcgcccagccgtgtctggcttttttacttagctaatgtttttgaggtttgtccatgacagataacgtcttggtagtttgttccttttattgctgagtagaattctgttgatggatgtaccacattttgtcagcagagagccttttaaacttggatkccaacttcctgttgtctaaacggaaccctccgaacgtaggacttataggggaagctgctgtgcatgtcaaaaaaactactaatcagaatgagctttgtcatccagagccagaactgctgcagaaatttttataattttgcaacttctttttttacaaggaacttttgtgctactacacatcaggacttttgaagcatccaataaatccatttaataagtatgagcatgtgtctgagtggacaagaaagtgaaaccatccatgctacattggataatttttcctcccccagactggayagggaatctcarctttcaaaacagagtaacctggctccacttacaaagctgcacaggcattaaagatcgtgctgcctttgttaggcagatttggaggggaggcccaacagcaaagatggagaggaaaaagggagtggagcttgtggaacaggaagccccccagggtctgtgcagggctgctcagctcttgaggatgttgtggatggtgaagtggtgatggtgtcccggagcagcccagcacctccactgggcccagaaggtcttgacttcggacacttacccctgtttcacaagtgtttataaagctgtttttgctttttttcccctaatcattacttggtagttattaatccttctttgggggagggacagggctttaaaactgaagaaaataattttcataaaaatatcraaaatggaaaaaarttactttgtaaaaaatttgctatacaaaccaaatggcagctgttgagaatctcaataaaatgttaagtgcatttgttggcagtggtacccttttgcctaaggttgggtcactgtgccatcatactgtggggggcgggggtgtgcggtatgtgtggtgtatatgtgtgaaactttttgtgtcaggatgggtcataatcttagttgcggttttctttccaaatagggttacaaagtagtaaaacatgggctggaagtgacagacctgagtgaattccaccttcactactttgtgccattggcctgcattttatttacaaataacctctttatttgtaaaggtgcagcacctctcccctggaactataatgacagaattttaaaatgctgcctggcacataataggcacttaatacatggtagccaatagtggcaatgatatgtacagctctgaacaaagaggcagtggcatctttgagctagaagggaaactaggcatttgttttcctgtttctgggcaaaactggggctcttactacctagaaaacaagtattccatatctgcctttcaactattgaacaagtttcacatcctgctatatgtcaagcattgtcttaggcacaagggttacgggggttaccaagcagccacagtccctgctgttgtgattatggtttggcaatgcctatttaaactgaaacctcactcagatctcccagtgatttgttgaggggctttatcatatgataaaagacgatatgggaccagcccaggacccatgggttttgctctgagccctatcatttctttgcctccttcctaaaaatggaagggggcggggcggggggcttggtggatcctgagctgacttgcctatttacagcattttaaaatcctatagttacatgtagttttgtgtaaatagggtttattagaatgtaacttccctgaagaggtggatgatatattcttttttttttttttgagatggagtctcactctgtcacccaggctggagtgcaatggtgtaatcttggctcactgcaacctctgcctcctggattcaagccattctcatgcctcacctgctagcatgcccacctaatttttctacttttagtagagacagggtttcaccatgttggtcaggctggtcttgaactcctgaactcaagcaatccacccacctcaccctcccaaaagtgctgggattacaggcttgagccactgtgcccggcctggtgtacttatttatttttttgagacggagtcttgctttgtcacccggttggagtgcagtggcgtgatctcggctcactgcaacctccgcctcttgggttcaagtgattctcctgcctcagcctgccgagtagctgggactacaggtgcgccccaccacgcccagctaatttttgtatttttagtagagatggagtttcaccatgtgggccaggatggtctcgatctcttgacctcgtgatctgcctgcctcagccttccaaagtgttgggattacaggcatgagccaccacgcctggccttggtgtacttacttttaatgcttagagtactcatcacacctgcaagacattcaataaatgtttgctgaatgaaagggacagatgaagctgtactatccctgtgatcacacagggagataaggcagtgctagcctcattccaatgcttgttccaagctctcttgtctcatcacagggctgttacaggctcagatgagaggactgtatacatctcttaatgccttggtgatacaaaatcccatgaatttcttctgatagtttgttgggggacactataagtttaaaattaaagggggagaaggccgggcacagtggttcacgcttgtaatcccagcactttgggaggccaagacgggcagatcacctgaggtcaggagtttgagaccagcctggccaacatggcaaaaccccaactctactaaaaaatacaaaaaaattagcagggcgtggtgttgcatgcctgtaatcccagctacttgggagactgaggcaggagaatcacttgaacctgggaggcagaggtcgcagtgagccgttatcacaccactgcactccagcctgggcaacagagtgagactctgtctcaaaaataaaataaaataaaataaaataaaataaaataaaataaaataaaataaaataaaataaaataaaataaaataaaataaataaaataaaataaaataaaataataaaaggggagaaactcagcaaaaatcacttttgggctgggcatggtggctcacacctataattccagcactttgggagcccaagacagcaggattgcttgaagccaggagtttgagaccaacctgggcaacatagcaagacccatctctacaaaaaaatgacagaattagccaggtgtggtggtacatgtctgtactcccagctacttggaaggctgaggtggatcacttgagctcaggaattcaatgctgcagtgagctatgatagtgccacagcactctagcctaggcaagaataagacctcacctctaaaataaattttaaaaaatcacttgcgattttctgcactgcagcctaatagagctttaataactgggaagtgacctcatcacatctcctaaatgtgacaggaactaggaacacatctgaccttatgcactttaatactaccttttttcagcatttttttcaacatttctatgctgggactaaaaaaatcaagatgtgctcctccactaaaacctccactgtccaattggaattgcagtctagacaattctaaggaaaagtgatggccatattctgaagaacataagtaggtctcagtagttataaactcttttcaccaaaatgctgtttgatcctcatcctgagagcattatttaaaaaaatctccaaagctcaccactcattaataacctaacagtttttcaagactgtgggatatagcaaagatgcctctgctgtgtccttgttctctctgcaagctttttaccaggtgctggactggagacttgctgagtgctagaccacagtgatttggtcatagctggatgtgaagatggctggctgttctttcagaagggacctggctggagttcttattgctcaaagctccagcttgcagcactgggctagagctgatggaaggagagctgttactattctgttctacgtgaatgctacactgtgaaagaacagcatcatccgacttgggcaacaagatagtattcaagatgtcttagaaggcctaatcagaacttaccagctgtagcatagcactccctcaagtgcagatgctggacctctgcagcagaaattactcaagctgttcagtataatagaaatgaaaattccccatcccatccttaacctattatcatcagataccttagggcaggggaggggagtagacaaaaacctgattttatttttatttattattttttgaggcagagtctcgctctgtcgcccaggctggagtgcagtggtgcgacctcggctcactgcaagctccacctcctgggttcatgccattctcctgcctcagcctccccagtagctgggactacaggcgcgcgacaccacgcccggttaattttttgtattttttagtagagatggagtttcaccgtgttagccaggatggtctcaatctcctgacctcgtgatccacctgcctcggcctcccaaagtgctgggattacaggcgtgagccaccgtgcccggccaaaaccgtgttttaaaacaaactctagaataactgatgtctgtaagttggagaactgatgtgcaggacatgatccacatgcctctaataaaacacctggagaggcagctattgtggatcgagactcctgtccttagtcttcaccaagcagcacaggctgtggaaccgaagcttcaggtttgccttcactggctgaactatggtacccagagggcaggaatcatgtctgctcttcactgatgctcctcattcccaggaacacacaacacatagtgtcacgctgtaagcagagccaggctagtagtagccaggaataggtcagctaccgaggtgagcggtacctagttggtcttcttggatctcagccatcctcataacctttcaaaaactcattcataggaaaaacttcaaaatgtcctgcttacctgcagttactaaatccagtgaggtaaagatgctcccagtctagaattgtactctagcccctaaatcttgctgggagtctcaggagagggtgtgatatacctaaggttactccctgtgatgttctgaatggtgagcacttgtttctgctgactgtggtcgccagggatcgttacccacttgacacgacaggagaaaacaggtcacagattaactggcagccacacagtgcatatgtatggtaatatggggggaagggtagcacacagacaaatcatctgcccaagtgcatgctgagtggatacagatcacaggctgagcacctgggggcagggctttaaatcttggactaaattcactcatgagccctccaggatatctgctggcaggtgcactgaggatgtacatagcacatgtgtttgataatgcagtccaattggggagtggataaagtgcatttattttcttctatgtttgtttttgtaaaaaggagaaaggaagcaaaagactccttcctttcagacccagtgtccactgagcttggagggggtggagccgggaccagccccctaggaaaaggtgtaggaatagaaggcaatggcattggcgctatagtccatggggaggaggtgcccgatgtgcctggcccctaggctggccccacccagagcggaggagtgcctcagcttcatcagggtgaagctggagaagaagttctgagcctggatctctctgccctgggtcagcgccaaaagaaaacctggagggaagaacacaaggacagagataagaggagaacagcaacctgtactggggccaggaaggaagacagacaaggacgcccagaccctgaggtactcctgtagagatgctggaggggcctacatgccaagtgcccagcacacagggtgcactgggtactcgagtattggagccagcaacatagggggcctgctctcctctcagctccaaaggacccaatgccaggaattccatggtagcaatgggagtccttgagctacttcagaatgtccggtagaaaccatccaactgcctggcataaggctgccagggctaagaagccaggcctcttttcttctagctagaattatgttgactagggatgtcccccaggttatcacatgccagtcagtgctccaattttaagtctgatttgtctttaactttttaaaagtagctattattcaataaatcatttggaacacaacatcttttcaagagttcaaggaaggtggatgggacatcattaaagggctcaatggcagaatgaggttgagggccttagacgggagcatcagtggcctgtctaggcctcagggtccaggaagcaggttctctctggggcaaaaagctttcctgggccacctcctttccagccccgtcccctgcccttgcccttccagcctccccccaggctcaccttccttcagcagctcccagctcttccacacagagcccacgcacaggatggggagtccaatcttgccctggaacaagacctgggtggagagcagaaaatggatatgggggccaacctagcctctccagtgctgaaggcgggagtttcctatgaccaacccactctatcccagttactcgccctcaagccaagaaacagtagacagactcaggaaaggggaaaaaaaaagggaggaaaataggagacatttgtaaagggcaaggagagaagaggaaggaaaaagcgttaagcaacaatagagaggaaggaaagacagaagtgagggaaatgaacagaaacatgactgaactgaaattaactgaaagaaaggggacaggctgggcgcggtggctcatgcctgtaatcccggcactttgggccaaggtgggtggatcacttgaggtcaggagttcaagacctacctggccaac

SEQ ID NO: 97522 - DNA, 33021 bp, Homo sapiens
agctccactggcagccacttctccatgttgggcatcggagacatcgttatgcctggtctcctactatgctttgtccttcgctatgacaactacaaaaagcaagccagtggggactcctgtggggcccctggacctgccaacatctccgggcgcatgcagaaggtctcctactttcactgcaccctcatcggatactttgtaggtaagagaaccagagagactgcagatgatcctcgctctggctgtcctccaacctttggaattaaatcaggtcttctagctacagttactggatggaaggagagcaggaattctgggtgctgtaatagacagcctggcccgtgagatgctaagtgttttgtgtactggataggccagttccctctccagctgtgtatctgaagaacgttgtaggaaaagcaggtcagtcctcaaagccaaggacacacagcacacagtgcagtggattagtctgtgcttaaatcttcctctagagttgaatgactgtcgtatttatttcctactttattcaatagatacttacttacattcattagttctacatttctgccactctgacctaggccaagttttgtagccagctcatgtgtaggcagacaggagatgattgtgatggggctgggaaaagcagtaacctgcccgcacatgcaactgctcccgcacagtgactggaaaggagcttttgcactccgtacctcctcctcaaccccagcactgtcctcgtcccacagcagttcattcacatgggttcatttcagtccacaaactcagaggggcaaggcaagtggcattatccccattagacagatgagcaagctgaggctcagagaggtggaaggtctgaactacatttatgttagctattgtgagtagcagagttggaacttgaacccaggtcttctgcctcccaagtccagcatcacaggagacagaggcacacttggagctggaaggagggtttgaacccaggaacctgagcaaggagtgagacttgggtcagtcatgtgtccttggagttgtaggtgttttttaaagctgtgctgatccacatttcttcaactgcccaagctgggcatttcacaccccaaccatagaatggacgacagcacattagatctgtacagttgcaggactttgcccagcagcagccaggtgacacgggttccctctcgtgtctcacagatgcctctctctcctcacaggcctgctcactgctactgtggcgtctcgcattcaccgggccgcccagcccgcccttctctatttggtgccatttactttattgccactcctcacgatggcctatttaaaggtgagagcagcagttataaacctgtgaaagcaataacttggattggcctgtgcctcggtttgcactctcctcgctggaggtgattctgcttaagcccctgagtgagcttgtgatctcgactgtgtgtgtgtgtgtgtgtgtgtgtgtgtgtgtgtgtgcgcgcgcgcgctaccctggcgttagcaaacgcttccagattcgtgcagccactgacagaaaatgctgatgagctagaccactacaccacctggtcgaggaataactaattgaaagccccagagcccagctgagggtacttcctgcttctgttcaaagcagtgccctcctgccacctaacagcttaacactacgttaaagtttgggaataattaagattgaatagtgttgaggcagcatatgataaaaccagagttcaagagcacattatttcccagatatctattctcagccccgttttacagatgaggaagcagatacagaggtcaacttacttgcccagctcacttgactcactacctctagagagttgataaaagcccttttcttgctcagggagcctaaaagcaccccttctagggagtcctcctaaaaatagtgggttatttttgaatgggtaagatttaaatgctctttggtttcccacagaagcaatctgatctcagatcaagcatcagaaaggggccaggggcatggtggctcacgcctgtaacccccgcaccttgggaggctgaggcaggcgggttaagagttcaggaccagcctggccaatatggtgaaaccctgtctctactaaaaacacaaaaatgaactgggcatggtggtgagtgcctgtaatcccagctactcaggaagctgaggcaagagaatcgcttgaacccaggagtcggaggttgcagtgagctgagatctcgccactgcactcactccagcctaggtgacagagtgagaacccatctcaaaaaaaaaaaatatcagaaaggggccaagcgcagcagctcatgcctgtaatcctagcactttggaaggtcgaggcaggagaattgcccgagcccaggagtttgagaccagcctggccaatatataggaagacttcatacctggaaaaaaaattttttttttttaaagaatcagacagctgtgtgtgcctcatgtttaaatctgtaacttagaaagtcccttgtttcccagggcgacctccggcggatgtggtctgagcctttccactccaagtccagcagctcccgattcctggaagtatgatggatcacgtggaaagtgaccagatggccgtcatagtccttttctctcaactcatggtttgtttcctcttagagctggcctggtactcagaaatgtacctgtgtttaaggaactgccgtgtgactggatttggcatttaaagggagctcgtttgcaggagagaggtgctggagccctgtttggttccttctcttcctgcggatgtagaggtggggccccttccaagagggacaggcctctccccagcgcgccttcctcccacgtttttatggatctgcaccagactgttaccttctgggggagatggagatttgactgtttaaaaactgaaaacagcgaggagtctttctagaacttttgaacactaaaaggatgaaaaaaattagcaaaccgaagtttcttcaatgacccctcgagaactttgggaccagtttcctataggggactcagtttcagagaactgagacagaagctcttctgtcgttatattcttctttcctttttttggatttattaaatattttctgtggtgtgaagtgacttattaaatccacagacattgagtgacttcttacaacatccacataagaatttgttgtaatgagttcatgtccacccagatgttgtgttggcagtgaacaagggcacggtttttatacatacgtacatatatatatataaacacacacatagatatatatgaataaacaaaaatgaaatcctgctaagatcacgctgtgtagctgacaggggcttgctgtcgttttgagcatgtcgagcagtttactgtggcttccttgtatatggataagctgctgtccttccccttcacaactgaccccgcagttacaaactagtatagcatttgtgctgattgatgatagactcatggacttcaggagcccttacttggttttgatcagtgtagcaaattagggatgaagagttcaaaccttttggccctttctttcttttctaggcttctccctcgcagggtgttccgtagtttcttctcgagccaatgcatgtattatagcagcaggtgtctttgtgctttctcatcatagtaacgtactacttgtaaatacatttttctattttctatttttttgtattttttttttgacattttgtttcattggtgtgctgtatattttccatgccctcactcctttaagaaaaaaaaaaaaaaggaaaaaagcaacacaatcctgtccttgctgttgtgattatagtcttggtttacctgtggtgacaaccgggtgttggggacacatgtcaaatgcccctctgagatgggccctaaattccagtaactggggaaagaaccagctgctgtgtcctgagagcctggccctgtgctgtggtctctgctgcaagcccagatttctgggagtaactagtgttaggtctgctgacctttacctaagcagcccctgcctggtaagaaggtgcccattgttcagaggcaaagagaagcctgcggttggcatgaggatgcctgacaacaaaggctggagaagggccctgagttccagcctctccccaagggtccccgccccagtggctgcctctgtcttgacctgtgtaatgaattagtgtgctgtgtcactgtggcttgaagtcactgtggatcaagctcacagggggcacccatcctgttgtcaacagagtctgaagcagtcagggtgttggattcctctgttgttgtcatcaattcctgctgaggggtttctggggttttgtttttaataaatgactcctttgtagcctttgtcacataatcttcactttggttgttggtaccaaacagagctcccagccatctcctccctgttctggaagactgatgggaagactctgtctgtccccagacctggtcatctgcagctctggcccagtcatagatacatcaaagaactgaagcttctgctgtccacagaactcaaaactgcctctgcattgggtgaagactaaaaatccacttgcggactctcccttccttccttctcagccctcgaggatgcatatagctaattaagcaggcccagagacagagaggggggctccaaaatgactcggattaagggcaagtgccagtgatgggtagaaataacgttatccttcatgcctgtaatcccagcactttgggaggccgaggcaggtggatcacaaggttgggagctcgagaccaacctggccaacatggtgaaaccccgtctctactaaaaacacaaaaattagctgggcatggtggcaggcgcctgtaatcccagctatttgggaggctgaggcagaagaatcgcttgaacctggaaggcggaggttgcagtgagcagagattgcgccactgcactcaagtctgggcgacagggtgagactccatctcaaaaaaaaaaaaaaaaaggaaatgttatcctggcagtgggtcattttaatttttctgtctttgttttcataagaaaattaaattccagacagaaggaacgtcgttattttgtcattctcacttctgtgcaggttttggggggaaatacccacacagggctgtgaatgcaccctggattccagttgctaatcttcaaagcccttaaaacactcccttaaaactttggcagagaaacagcaaatactctactcgtctcggagggttgagtgggtggctgcagttaaagcacacattagacttcccttccagtgctcgtttgctccccgctgcctgatacacttaggtccgcctcttattctgttttctcaaataccatggtttaggggttttctaggaagtctgctgcattaggcatggcatgctcatgaaatttcagcagattccttcctcactgatctgaagtcctttttcctcacaaagagactgtgtgttactagaactcccgctttttcataactcttttttctagtttgagctaatgaagatatgacagtaaagtctgtccaaagcctagtgtgttccattgctgttattacagtgcatacgctttctgaatgtgacagtgacagctccccgcataggaacggttcggtggcttgggactaagctactgtctgaattacttttgtagcaggctcacaggccttgggtaaacaggtaagttaggtcacccacaagaaaaacaaaagtactcgttctctgtgagggtggaggggaagggagttccattttgccaatcaagtgttaaaaatagaacctgctgtgtctgcttagcagctctcacgttactgctcaccagatcccatgttgtgtgtacgtttctgttttgtaaagcctagcgtttacgtcagagcctgggaatgcagcactcgtgtctatacatgggagtacatgccttagggacatcatttatacaacccccttctctacagagctatgtcagcggtacaggctcagaaggaagccatctcggtctctttctggtcttcagtgcacagtggccaggacagcctcccccacttcacygaatcacatttcttcagcagtttccaacagtgaaatcatttctaggacaatggctgctaacacgtgtcagctgaagcactgcagatcgagtcatccaactcaagcttcttcctcttattggaagggataaaccaggtaagactttttaatccagaaattattcctrttccctgcaatgtatagggtgctttctatctgcaaaactctaaactcaaatttctgcaggttcagattccaactgtctcatgcgcagagactctcccatcacaaaattcttcccgctccagccatcatctgtttcctcctcagcctttcccttgaaatccagagccctttcctgtccgttagaggcaatcagtcatgtttcagtgaagcttgaggcactgggccccccagtgaacaaaaccagacatcctgaccccctactcctgcggtctstgcagggcttgctttagcatgcttggcttgtggggagggggtgtggcagccattcccacacaaggtcacgcagggatgccacagtgcgttcaagagtagaatccacagccttctctccgtaactctgggccttgctgtaaatagcagaggcttgggctggggatcctgtatcactggacrggatgtgccaatgaagagaaggctgagaagcaagttggtgtaggagaagcccagtgctcctggtggacacaggcctgcattcaaccaaatgtctgaagacaagcgaaagcctacagccccaagcgcaatgatctttcgtcactacaggtttcagaagtcttaccgcacggagccagtggttagcaggtgcttgatacaaacatcctgcagggaggctgtgaagattctaactgcagcacttacggaggagcactttagcgtgcggtagatttcctagataacctgaggtcttaagaattcatgcggcagactccgcttcgcttctggttcctttcatttggagtctgcctaaccagtttttctcttaagttccaagacatcttcttcctgttgagtagaacctgtaaaacaygccacctgtctgcaggcgaacagaggctctgaaggttccaaaatagctaagcccacgagctgtctccagcccccatggagtcctgggattctcaccagatccaaagatgacaggaatgggaaccagttaggcagaggaagcaagacttgagagactgggagtggggaagccgccaggcagtgggcagcaggcctgcgcttgtgaggaatgggagacaggaagtgggtgtccacaggacagagacggagggggacagcacgatggtcactgcattcaaccaaatgtctgaagacaagcgatccagccccgggatcccgacaccagttgctctgtctcaccagagagcctctctccaggcggaccacctgtcagcctgctactgccacctttcactctgcccacctggagctgctggagtgtagccaccacgtgagcttctagcttttgtgtttgagcctttgccattagagattgaatttcctcacacctgcggttgctgtcgtgccttgatggggtttttatccccaggcagatagtaacatatcctgtgacagctccctggggaaggcggaaaccaatttcagagaaagaggctgagcgcttgctagtgcagggaggaactaagatgacgaagcatcgcacggatgagtcgtggccttgccggcttgayggcgggtagaatgcagtgccaccctccccaagaccaccatctggccaggagccccggccccacctttcctccttcscttgtgcctcctggcacttcccgcagccctcccctgttgagtgtaggcgttctgcccggggcagtcgctgtgagagaggccatggcctggactasggtgatgcgaagaacagaacttgctaccagattggatgcagggttggggactccacagtgactccacacttcttaacctgaacaatgaattgccaaaatagataacagaagaaattggggaagaagagttgttctagccaatagagcagctaaagccaaaaaaaaaaaaagtcttcagtgatgtaaagccttgcagagtatgcgagatgacctggacagtgagaggcaggaggaagactgctctgtggtgctctgagtgtgaaggcatttgtcatgcgcatcccccacacagccaccatggggctctggttagggatggagccccctgagtccragctgcttcatctgaaatggggatgaaggtgcctcatagaaagtattgagtaaatatgaggcgctcttctggtttactgtgttctcatatatttcacacacaatgctcagagagttggaatacagttaaaatcattagatctgtacgctgtcattattcaaaccaccacagctcccggttcatcattaggaatactggttctctcccctctgctgaggggtgatttcccccayccagggtcttgaaattttcttctacacactgaaagccttagcacaaagctccatatgcagagggggatggtgggtgaccctgcccatgcagttcctcattttggcttcttaaggccaagaagatcaacctctacccagattctgcacacaaaccagtgttgacgtttttatttttctgtactttttttttccataataaacactgcatgtgccctctttaacttcagtgtactttaaagtcttactgcttgttttgagggaaaagtttactacactgtgaagctcccattctgtcagtcttttgtgggcctgtattagttgatacatctaggtttttcttgaacacccttggaacaaaagactcatgggccagggccgggctcggtggctcacgcctgtaatcccaacactttgggaggccgaggtgggtggatcacctgaggtcgggagttcgagaccagcctgaccaacatggagaaatcccgtctctactaaaaatacaaaattagccgggtgtgctggcatatggctgtagtcccagctactcgggaggctgaggcaggagaatcgcttgaacctgggaggtgaaggttgcagtgagccgagatcgcaccactgcactccagcctgggtgacagagcgagactccttctcaaaaaaaaagactcatgggccaaactcctatcctgtgttaaaataaaacacagtgtcattctaagccacttggctcaggtcagtccactgaataggagagggacagtagccagactagagagagtgaaagaggagattccagccacgcatttggaaaattctcagtcctccaggacacagtgaagcaatcagggctgaggcaccgtctgatgaagcagatcaataactggtgggatgacccatgaccctccccaaaagtcgctgatgaaggagctgatgctaccttgaagggatgggcccgggcttcgtcctcagccctgtcctgtcccacatccctcttgatcatttggccagggacacagttgccaggcttcatttgaggagaacgtgaagcaaggwgaagggacatactcatgacctaaagaaagctcagaggcctggggtgtcaaagcagatctggggagatctgctggagagagccccagccaatgatggccacacaccgggtgtcagtcatgcctcccaagagccctttaataaaggcaggtgccattactgtcaccattgtcacaaaggaactcgccaagaccccaagatcacaaattgctaagyggcagaataagctctaaacactgkccctaatcattatattccatcctcatcccaggattagaaatgatctccaccccagaaaatacaggtaaggcataaacactgatggctctagggcctactcttagttccaaatacatttaaatcctactcttagttccaaatacatttaaatccatccactgcctgtagcaaataaagattcttgcaacagcgtctgcctgggtctccctaactgcagagtgtgttccatgctgtgggccagaatggtggcctgtcatctcagatcttcagtctcattatgtaacggcagattttatcatccattttatgtacccaaagtttcaagggcagctaatttgccccagatcttcctgcttccagagactgagctcattgcccagattatgagaaaataatcacagccaggttttgtagacacgacttgtttagcatacatacagaactgtggggagtttctgtaaacagggaaggaccatgcaaacagcatcrtattggagatggagatccaccaaccctagtaggtggcaggaaagagctggggttttggctgccaagccctgggctgacccagctgctgtccagaaggggcatgcyracaccttcctctccaataatgctgcagcagtgttgaccattactcatgagagggtatcacctcacacaaactaggagttcctaggaggaggggaccaggatgcatgcctcctagcaagccaggcttaaactagaatctttgagrcattcaaagcaactggatttcattgttaaaattatgactaccctattgctgattgatttttttttttttaagacagggtcttactgtgttgcctaggctggaatgcactggtgcagccatagcttactgcaacctcctactcttgagctcaagcaatcctgcctcccaaagtgctgggattacaggcatgagccaccacacccaacccactgctgatattaaaacaagccataaaaacataaaaacaactgtcagctgctgttctgatccccagtaatactgggctgttattcaaaycaatcctctggctaaaaacaactttaaaatatacatgaaatacagaaaataccatgtataagccctgcctaaatctgatttctgaaatacacagagggcagactctaaacagcccagctaaggccaaaagaaataaagacaaatttcagctgctgcccaccagaggaggatcaaagggttttttttgcttgtgttttgccttttcttttcttttytttttttttttttttttggagactgagtctcgctctgtcacccaggctggagtgcagtggtgcaatctcggctcactgcaagctccgcctcccgggttcacgccattctcctgcctcagcctccagagtagctgggactacaggcgcccaccaccatgcccggctaattttttgtattttttttagtagagacggggtttcaccgtgttagacaggatggtctcgatctcctgacctcgtgatccacccacctcggcctcccaaagtgctgggattacaggcgtgagccactgagcccrgccgccttccttttcttaaatttgagacaaagtctgtgtctgtcacccacactgcagtgcagtggtacaatcatagctcactgcagccttgatctcctaagctcaagcaatcctctcagctcagcctcccaagtattaatagctgggactacaggcacataccaccaactacttgggaggtttttatttgtagagatggggtcttgctgtgttgcccagactggtctcaaactcctggcctcaagccatcctttcgccttggcctcccaaaatgctaggattacaggcatgaggcactgtccctggctggaatcaaagttttaaatcttgagttcagccgttaaatgcctgctgtaaaaaaaacaaaacaaaacaaaaaaaaaacacttcaccagattttctgcaattatataattcaaaactgctatacatatgaacaagaaaatgtgatctatgctcaagaagcaattgacagaaactgactctgatatgactgacatgttggaattaacattcaagatgtttaaagtaattataaccatgctccaggatgtaaaggaaaatatgctcataatgagcaaataggaattgtcagcagataaatcatgacaaaaagaaccaaataaaaattctagaacttaaaaatacaacacatgaagtcaattcactagataggattaacagcacattggcagattaaagaatcattaaactggcaatagagctgggattagtaaacctgtgaggggtcaggtaatatttttagctttgtgggtcaaaaatcccctttataactactcatttctgccatcatagtgtggaagcaagcagccactgtaaatgagaataaacattccacctgtggccagtttcccaaaccctgaaatatccaatctaaaaaacagaaaagatacagaaaaaatgatcagagcctcagttatctgtgaacagtgtcaagcagtcttaacatatatatagttggagtcacagaatgagggaagagagaatgaggcagaaaggtttaaaaaaaaaaatggccaaatatggggaaagagtcaagaaacatggcaaatctcaagcaaaataaataaaggaacatcacacccagggacttcatagtctgaaaactaaacatagaaagtcttgaaagcaacaagaaaaaaaatgacacactgcataggggaacaacaatagatttacatgaatttcagcaaaattctcatcagaaatagtgaagactagaggacaatggaatgacacctttagaaaaagtaaaatgtgtcaacccagaattctatatccagtgacaatatctttcaagaatgaaagtgagggccaggtgcagtggctcatggctgtaatccyaacactttgggaggccaaggcaggaggactgcttgagctcaggagtttaagaccagcctgggcaacayagaaccaatctctacaaaaactacaaaaaaaaattagccaagtatggtggcatgcacctgtagtcctagctacttgagaggctgaggtgggaggatggcttgagcccaggggtttgagagtgcagtgaactaactataggcaccactgcagtccaggctaggtgacagagcaagactgtctcaaaaaaaaaagaaaaaaaaaaaaaggacaactcaaaaattgggaggaagtatttgtaaatcatatatctgataaggatttagtattccaaatatataaagaattcttgggccrggcgcrgtggcttacgcctgtaatcccagcactttgggaggccgagacgggcggatcacaaggtcaggagatcgagaccatcctggctaacacgtgaaaccccgtctctactaaaaatacaaaaaattagccgggagcggtggcgggcgcctgtagtcccagctactcgggaggctgaggcaggagaatggcgtgaacccgggaggcggagcttgcagtgagctaagatcgtgccactgcactccagcctgggcgatagagcgagactccgtccccaaaaaaaaaaaaaaaaaaaaaaagaaaaagaattcttacaactcaacaataaaaaagacaatccagttatttaaatgggcaaaagatacaaatagaaatttctccaaaaaatatatacaaatgggctgggcgcggtggctcacatctgtaatcccagcactttgggaagctgargtgggcagatcacgaggtcaggagatcgagaccatcctggccaacctggtgaaaccccgtctccactgaaaatacaaaaattagctaggcgtggtggtgcgtgcctgtaatcccagctactcgggaggctgaggcaggagaatcacttgaaccagggaggcagaggttgcagtgagccaagatcgtgccactgcactccagcctggcaacagagccagattccatctcaaaaaaaaaaaaatacayacacacacacacacacacacacacacacacaaatgaccaataagcacatgaaagggatgttcagcaccattagagaaatgcaaatcaaaaccacagtgagacatcacttcacacccactaggatgacaataactttttaaagacaataacaagagttagcaaagatgtacagaaaatggagccctcataacattgttggggtcgggcagggtggctcacacctgtaatcccagcactttgggaggccaggtgggcagatcacttgaggccaggggttcgagagcagcctggccaacacagcgaaagcccgtctctactaaaaaatacaaacattagccaggagtggtggtgggcacctgtaatcccagctactagggaggctgaggcacgagactcacttgaacccgggaggtggaagttgcagtgagccaagatcgcgccaccacactccagggtgacagaatgagacttcatctcaaaaaataaatagaaatttaaaaaaaaattaaaaaaaaaaccaccattgctggtgggattataaaatggtgcagctgctttggaaaatggcttcacagttccaccaaaggtaccatagttaccatatgatctagcagtttcattcatagttacagtttacaagaattaaaaatctgtatctaccaaaaacttatacatacatgtgcatagcagtattaataaccaaaaagaagaaacaaccaaaattgtcattaactgaacaaaatgtgtatgtgtacagattattattcaggaatgaaatgaataaagatgaggaccataacctatactgtatattttcttatgcatcctaagctagaaaccagggttacctttggagagggaattgggagtcatagaggctgcctacaattttgaacacataccaatatttttattcaaaaattaaaaattaaaatcttcaaaatgtaacactgctgtaaactcttaccatcaaactacataagcaaaactgcaacacgagaaatcgatagaaataaaaatgtaattgaagaataacacaatttctttcagtctctgacaatgcaagtagaaaaagaatgtgtatagagagaaaaagctcatagtgcctaagacagatcgatcatctgttctccccagcaccactaatgaagttctcccttttcttccggagtgataccaccattcatccagctggacaggacagagcccttctccctccatccccatgaccaggaaatgcatcactgactcttgtttgtttaacctgcctgccattccagggatccatccatttctttccatctcctgtctccacccagatccaagataccatcatctccctcttggatcattacaggagcctcctaactctccactctgaccaacctcctctttccacacctcctcactgcgctgcacaccacagccagaggggatcttttcaaaacaattttttttttttttgagacagagtttcactcttgtcgcccaggctggagcaccgtggtgcaatctcggctcaccgcaacctccgcctccgggttcaagcgattctcctgcctcaacctcccaagtagctgggactacaggcatgcgccaccacacctggctaattttttgtattttagtagaggccgggtttcaccacgttggccaggctggtctcaaactcctgacctcagatgacccaccggccttggcctctcaaaggctgagatgggaggatcactggaggccagaagtttgaggttgcagagagctatgattgtgccactgcattctagcttgggtgacagagaaagactctgtaaaaacaaacaaacaaaaacatttgtacaccatctctctgagtcaaatgcgccaaaggcttccttgtcacttccaggacaagrcagaaatctatgtgacccataggactgtacccgagatggctgtccgcctctccagctcatctcacgccgtgttcccgctccgtcctccagccattcttccattccttgaagaccatgctctctcccaccacagggcatctgcacaagccatttcccaggcstgggctgtccatctctaggctctttgtctcattcacgccaactcatccctcagatctcagttcagctgtcacctggtcagggaagccttttgtgactcagcattccagctcaggttcctctattttagtctctcctagaactctgctcctctcctgcgttgcacgcatcccattgaggctgcgatgtgattagtgtctgccactagcaccaccagcactagcttgcctgcaaggactgtgaaaaaaggaattgtttctgctcacccactgtttctcccaatggtttgcacagtatcttagatatagtagctgctgcaatatgaatgaatgaatcagaataaaattatcaacattcrttcaattttattaatctctaccatcatacaaaacataaccttttcagttctcatggactcttgatggaaacggaccatgtattcgattctcacaaggcctcatattcagaaaagtgaaaacaactgaccaccttctctcactaccacacagtgtgactgggaagaattaagaaaagaaactgccaggcgcagtggcccatgcctatcatctcagtatctgggaggccaaggagggaggatctcttgaggctaggagtttgagaccagcttgggcaacayagcaagaccccgtctctacaaaataaataagtgtgtcacggtggcgccacctgtagtctcagctacagagaggctgaggcaggaggatctcttgagcctaggaattggaggctacagtgagcagtgatcacgtcactacaatccagcctgaatgatagagtgagaccctgttgcttaaagaaaaaaaaaaaaaaaactggaatccaaaatcaacaagggttcaggcatagtggcttatccctataaccccagcactttggggttacaggaggatcacttgagctcaggagtttgagatcatcctgggcaacatagtgagacctccatctctactaaaaattttaaaaaggccaggcgcagtgactcacgcctgtaatcccagcactttgggaggctgaggcaggtggattgtctgaggtcaggggttcgagaccagcctggccaacatagtgaaaccccatctctactaaaaatacaaaaaattagctgggcatggtagcgggtgcctgtaatcccagctactagggaggctaaggcaggagaatcgcttgaacccaggaggcagaggttgcagtgagccgatgttgtgccattacactccagcctgggggacaagagcaaaactccatcttaaaaaaaaataaaattaaagaaaattagcttagtgtggtggtgtgcacctgtagtcccagctatgtgagaggctgaggcagaggatcacttgagtccagcactttgaggctgcagtgagctatgatcatgccactgcactccagcctgggtgacagagcaagacctcatctcaaaaaagaaaaaaaaacaaaaaacaagggctttgtctttttctctgctgtatctccagcacctagaataagtgctcaatatacatttttgaacaaacaaataagaatagaaaaataaaatcgatgatctgctcaaacataggagtgtcaaagtaggaaaataggagagaaaagaaaattagaggttcgaccaagaaagtacaacatcagacttctaggaatttagaaagcaaaccaaaaaaaaagagtgaatcaagctgggtacagtggctcacacccataatcccagcactttgggaggccaagatgggaggatcacttgagcccaggagtttgcgaccagcctggcaacatagcaatactctgtttctactaaaaataaaaaaaaattagccaggtctggtggcaaatgcctgtaatcccagctactcgggaggctgaggtgggaggattgcttgggcccaggagcctgaggctrcagtgagccataattgtaccactgcactccagtgcggacaacagagcaagaccctgtctcaaaaaaaaaaaaaagtgaataaaattatcaaagaaataatgtaatagttccaagaattaaagaacatggaggaaaaaaacatggatctctagatggaaagacccaccacgtgcccagctaaatgaatgaaaaatgacccacatcaaggtgttctggtgttctggtcagtaggtggcataaatagatcccagcccagcgtggtggctccattgctaaagatctgatcagtggtgacctgggaatgtcctggaggagggaatgctgtggcagctgtgatgatgcagaatttgaaggctatccagggtggaggtgggacaatgccagggaaagtgccgaggtggctgctcactgctcaatcgtcctgatgctctatctgcagcaagtgagaaactgagaactgtgaacaagcagttcacggctaagtgtgagcaccagagagccttggtatcgaggagtgtaaaaaaaggcttttttttttttttttttgagacagagtcttgctctgtcgcccaggctggagtgcagcggcaccataccattccactgcaccctccgcctccgccttccgggttcaagcgattctccagcctcagcctcccaagtagctgggattacaggcgtgcaccaccacgcccggataatttttgtatttttagtagagtcagggtttcaccatgttggccaggctggtctcgaactcctgacctcaggtaatctacccacctgggcctcccaaagtgctgggattacaggtgtgagycaccatgcccggcctgagtggataatctattgaaagaactaacgaagttcttcaacataaccagataaacagaaataaaaacgaaatatgtcagcaataaacaattttttttaatagtgggtgacttctggtttgccccaaggtggtgaactagcatataggttgttggcttcctgccttagccaaascctgagtgctatagagattaaaggaaagcatattgattcagggaactaaagatcagaagaaaattctagggagagaaggcggttgtgagcaaatgtagaggggagcacagcagacctgagtgaggcagagctgggggctatggcggatgaatcgggaccccttcctacttcagttattaactagaaggattcacatgacctgatgaggttatatcacagctaaggttgactaagcgaaggatacaccacgggaccagagagaaagatacacatagacaaagtccagggaggccgagagcaggctgcacggtgtgtttctttccaggtgtgaaccacagagatgtgagatgtctctgcccagggaaacacccaggtctcaaaacctgttgttctaagaagatggtcacataggcactttcctgccacatgaccagccatggtaaccaaaacacagcactccaaaacagaggccagacgcacatcctaagttttttttttttttttttttttttgagacagagtctgtctctgtcccccaggcyggagtgcagtggcacratcttggctcactgcaagctccgcctcctgggttcacgccattctcctgcctcagcctcccacccccggccccgagtagctgggactacaggygcccgccaccacacccacctaattttttgtttttgtttttagtagagacgggggtttcaccgtgttagccaggatggtctcgatctcctgaycttgtgatccgcccgcctcggcctccgaaagtgctgrgattacaggcgtgagccaccgcgcccggccgcacatcctaaatcttgatgttaaacattctgacatctgacaggctgctcatcctgccccagtgcaccaggcctacagattaacattcatcagtaactacatgcaccttccaagagtttccttctcagcttgtcccaggtcagtgccatagctccaggcactcccagagagcagcaaagactgagtaagccaggcctgctcacaacagaaacgcagactgtggaaacccttggcctttcctcttgcctcttttagaactctcaatagagccatctgggccagataccgtgtttttttttttttattaaaaaaaaaaaatactgagctggaagcattaatgtccacctattttaagtgtacagccttcgtgactctttccacatgactatacctgaaccaccaccactcggatcagaatataaaacctttccagcacccagcaagcttctcttgtgcctcttgtcagtggcccccaaggtaaccactgttctaatttcagtcaccacagattagttttgcttgcatttgaaattcatgtaatacagtgaatacattatgaagtcttgactataaacttttttgagacagagtctcsctctgtcccccaggctggagtacagtggtgcaatctcrgctcactgcaacctccgcctcccgggttcaagcgattctcctgactcagcctcctgagtagctgggattacagacatacgccaccacgcccagctaatttttgttatttttagtagagacagggtttcactctgttagccaggatggtcttgatctcctaacctcatgacccgccygcctcggactcccaaagtgctgggattacaggcgtgagccaccatgtctggcctacctttttttaaatttaactttgtttgcttgttttgagatgggggtctccttatgtttcccaggttggtctccaactgctggagcatcctcaagcaatcctcctacctcagcctccaagtagccagggttataggtgcacgccactgtgcccagctttgagcctaaccttttttgcttaatgttacatttgtaagattcagccatgttagcaatttatggtcagtagttcattcttttttatagttgtatgtatgctcattgttggaatacagcatttctcctcaataattgtaccaatttacccttccgcctgctctgagaggcaattccagttgagttacatttccactgactctgttaggagatgccttttgtggggacaaatgtttaactccttttcaatttgttctagtcttactggtctgttttttgtgtttgtttgttttttctgccttctctagaatcaattctgtgtatttgttttcctggaagataaatcatttatgtagattttaaatttcatcagcatgagtatgatagtttttttttttgtttgttttgttttttgagacggagtcttgctctgtcgcccaggctggagtacagtggcactatctcggctcactgcaacctctgcctccctggtgcaagcgactctcctgcctcagcctcctgagtagctgggactacaggtgcatgccaccatgcccagctaatttttgtatttttagtagagatgaggtttcaccatgttggccaggctggtctcaatctcttgacctcgtgatcctcccacctcagcctctcaaagtgctggaattacaggcgtgagccaccgcgcccggctgagtatgataggttttggtatgccatgttttcattttgtgtattaaatataaaatacacaaaaatcaaattgtattaaaatctcgtaccaaaaacatgagtcccctgactcgcccgtctcacttcctcggactcttttagtatttatatgtttatctttttttttttaagatggggccttgctatgttgctaatgctcacgtgagcgtggaagggaacggagtttcagatgagactgcagtcccttgctttcagtttgtgagaccctggacagagcatccagctaagccacgcccagactcctgaaccatgaaaactatgagatgggtttgtttttttggtttttttttttttttggktttttgacagggccttgctctgctgcccaggctggagtgcagtggtgtaatctcagctcgctgtagcctcgaactcctgggttcatgtgatcctcctaatttaacctcccaagtagctgggagtacaggcatgcatcactgagcctggctaatttttttttttttgtagagacagggtctcactatgttgcctaggctggtcttgcatccctggcctcaggtgatcttccctccttggcctcctgtgtagctaggactctagatatgcggcactgcgtccagctaatttattttttattttttgtagagatgggctctccctgtgttgcccaggctgctcttgaactcctgggctcaagccatcctcccacctcggcctcccgaagagctgagattacagggctgagctgctgtgcctggccctttaagatgggtatttcttcaagccactaagcgtgtagtgatgtgttgctagagtagaaaaccaataccagtgtagcgtcgctttctcatcagctccagcctgtccccagctgggtgacactgggcttcgaccgcagtcatgggcccggcagccaggagaggaggtgagggccgctgcagaggggcacctgtggccttgttgggagcggcttccgcagactcttccagtagcagaagccctcaccttcctatggagaggcagccaccctctgcaccctggagagtttgggctggagagcagcatcaggggcatccgttcagatggctccgttttccggatgccaggttttccttcccacgmccctgcccttggcctaagcaatctgccggggctgagtcttcaggctctggagctctgcaaattcctgttaggtctctggcctgcctgcaccatgtctgcccttctgctacacrtaagagccttttttttttttaacctgatacacaataattgtacatatttatggggtacgtgtgatattttgatccatgcataaaatgtttaatgatcaaatcagggtaactgggtatccatcacctcaaacatctatcgcttctttgtgttgagaacatactaaatcttctagttgttttgaaatatacaaaaaatactgataacaataatcaccatattgtgtgaacactagaacgtattccttctactaaactgtattttttaaaattttcttttcctaagatgagtcttgctctgttgcccaggctggagtgcagtggcacaatctccactcactgcaacctccacctcccaggttcaagcgattctcctgcctcagtctcccgagtagctgggattacaggcgcacaccaccatgcctggctaattttgtatttttagtagagatggggttttgccatgttggccaggctgttctcgaactcctgacctcaggtgatccacccgcctccgcctcccaaagtgctgggattacaggcgtgacgaccgcacctggctgaacccattttttaaaagggaaggctgggtgcggtggcttacgctgtaatcccaacactttgggaggccaaggcgggccgatcatgagttcaggagatcgagaccatcctggctaacacggtgaaactccgtctctactaaaaatacaaaaaattagccgggtgtggtggtgggtgcctgtagtcccagctactccggaggctgaggcaggagaatggcgtgaacccaggaggtggagcttgcagtgagccaagatcacaccactgcactccagcctgggctacagagcgagactctgtctcaaaaaaaaataataaataaagggaaaaccacacactgtatgagtccttttgcaaccagatatctgacaaatgattagtatcaagagtaaacacgtgggacaattacaaatcaattacaacccaaagaagaaacagacaatagcaattcacagcagaaaccagaatgaccaatcaccacgtgaaaagacgtgcagtttctcaagaaaccagggagatgcaagttaaaatcacaaccatattgaagaacgtttgtaaaatctgtgggtgccaaggaacggggagaatgcgcgtcatcaaccctcgcatatgcatagagggtgatccgaccactgatccaacctctggagggccatttggcaatatctggcgaagctgaagaaataaacagccttaaggcccagcaagcccacttcgatttaaatgctcacaagttctcacattagaaaaacacacatgccagaatgtccactgcatcatggtttatagagtaaaaagcaggaaactacctcaatatagtttatcccatgggacaccatgcagccatccacataaatgaactagaacttcacgtatcaacatggaaaaaccaaattgctaatattcaatcttcataaaaagtaacttagtgccgtgaagcacatctcaacagatttcaaaaaattcaaatagtgcagaaaatgtgctgagaccacaatgcaattaaggtaaaaaccagcaacagtaggtatggagtttcctgctggggtgatgagaatgttctggaactagatggtggcaatggttgcataacatgatgaatgtcctaatgccactgagtgtacacttgaaaatggttaaaactgtaaactccgtcacagtttttaaaaatcattaacaaaaaatacctcagaaaaccccatattaataaaataatactctttggccaggcatggtgactcacacctgtaatcccagaactctgggaggccaaggcgggcagatcacttgagcccaagagtttgagactagcctgggctggtcacatgtttagtagagatggtgaaaccycatctctactaaaaatacaaaaaatagccaggtgtggtggcgcctgtagtcccatccacttgggaggctgaggtaagaggcccacctgagcctgggaggtcaaggctgtggtgagctgcgattataccactacactccagcccaagcgagaagagaccctgtytcaaaacataataatactctcctaaataactgataaatcaaaatagaaagcacaatgggcctcagaaaactgagtaataaggaaaatatgacactaaaatgtatgagatgaagcaaaagccacacttagaaatgtatgaattcaggccaggcatggtggcccacgcctgtaatcccagaactttgggaggccgaggcgggcggatcacctgaggtcaggagttcaagaccagcctggycaacatgatgaaagcccgtctctactaaaaatacaaaaattagccaggcgtggtggcgcatgcctgtaaccccagctactcgggaggctgaggcaggagaatcgctttatcgcttgaaaccgggatgtggaggctgcggtgagccgagattgcgccactgtactccagcctggcaacagagcgagactccatctccaaaaaaaaaaaaaaaaagaaccaaagcatggagaacttgtcccagagggctagagggaaggaaacaggtggcctctcagctacatgcaatgcaggcccctggaccttgagaagagctgacttcgcagacaccgtgccagctggcacaatccgagtggagtgtgcagatgtgaaagttgaccagggtgggaaacggtcctgttgttctgtaagtgaacgtccttgtccttaggaaatctacactgaggraactgtatccagaggggcatgggctctaggacagttcgggctccagtggcccgggggcagagtccacattcagttctaarttaggaggagcttccactaacgggcagcaccccgtcaaagccaagggtttgtgccgactctccctcaccgaaggacagaccccggacccacgacggcacctcaaagcccccgagtgcacagactggctcttgggtcrgagcctgggttgcttcatctgaaatggaggaccccaggcctccgaggctgcacttcctggaaaggctcttcgtggccacctgaacgagccctgggcaggtctgagaagcagaaacccctccagggctgccactcggcctgtgctgactccagccctctgccctgctgggagcggtgtggctcaagtcggctacctttgaccctccagggcccagacccttctcagcgggtagggcaggggagctgaggggcctgaactccagccaagacagccaggtccccagcctgggatgaatgctgtttgggttcctctcccccatcacctggaggaagggcccaaagacaacctcaaccccacgccgcatctgcgtcaggagcagcgctgcctcgccgggcgggggcacagcgcctccaaacaccccctccccactgtccccgggctcatggggacagggaatgacaggccttcatctgcccccaggtggaagggctcaaatgcgctgcttctggaagcatcctgggtccccctctgctctgctacctttggcttgcacctgagcccagggcagggacaggagcagatcaggagaccccgagagagtgtgagccaggagccaagaccctgcggcacttacctggagccaggaggaaagcccagggacccaaacttctgcaggcggcacttacctggagccaggaggaaagcccagggacccaaacttctgcagactgcgcaggacgccactgacctcgggagcccaggaggacgcgcttcccagaagccacaggtgtgcctcgttagcagggaacacactacccgtgggctctgcgcacaccctgcctgtggggtaaatcaggacctaaattcgctcaaagaagcgcactcctattccccggggccctggaccaggcccaggtcagggcggggtcaagggcagagctgccctgcagagcagcagctccaggctggatccttcggctgcggggcaccagcacctggcacagaaatcccacttgggaggccgaggtgggaggatcacttgagcccaggagttcaagaccagcctgggcaacaaagcaagaccccatctctacaaaaaatttaaaaattagctggccatggtagtgtgcacctgtagtcccagttacctgggaggcygagacgggaggatcacttgagcctgggaggttgaggttctgataagctgtggttgtgccactgcactcctgcctgggtgacagtgagattctgtctctaaaaaaaaatccatccccaacaggggctcagggtccctgggcgcccctttgatgacagctcctaaagtcaccgtctccctcccgcttccctccagagacctcccagcaatgccagtttgactctctgccctgcctgcccggcggagggctgtccccacctcctttgaaatctttctttgctcactgttttctcttccagctgctgagatcgacactggcccagagggttaagagcttggaccttggcttcaggggcacctttgcccagagaaagccctgcaggcaccaggaccagggcaagcccccgcactggctggccagggccgcccccgagcgcgctagtgagcacaatggctgcttctcgaggttctgtgttctcccacctggggctcgaggcctccacagctttgctccccgactctggcaatctggggccttccttcctcctgcctggaggctggtcctgcgtagagaaccccttctagcccactggccctgcctggcccaccctccctccccaggggccactccctgaggcctgcaggacccagttcctattcctgaactgcctccttggccaatctggcctctgccggaactcaggaacctcccaggtggccaggcccctccccaagacccccaacactcacagggtgagactgtcagagagcaggactctgtgcagagaccaccatccctccccggagcacccaggagagggcgaggacacagactgggggacaggtgtgtttattacccacagtcagtcacacagcatgaatcaccacccctgccttcatcagactttacaaagggctgaggggcctctgggccagctccatggcccagccccaccacctgcccaacaccaggaccccaggcctcgtcatcctgaccccagccctgctcctgacctctgacctcaaggaaaagacagaccccaccaagggcctgtcgcactgggccttcatgccagggcaccagggcccgcgggaggacaactgaggtgtccctgagtgtcgctcagcccccccacaaccccgcccccaggaggccagggccacttagatgaggaacttgaggcacagtggtgaggaggcggaaaggcccagaggcggagctgccaatggtcggagggcctcattcccatgtgatctgatctgggtggcagcactgagcccatctggggtccccagggagcccccgccgggccgcccagtctctgagccggggttggggtggaggcccctggctcccgcgccttcccgcagtcctggggcagtccgccgcgggctcagctccggtagctcctgagcagatgcccggcgatcaccagccgctggatttcgctggtgccctcgtagatctcagtgatgcgggcgtcgcggtagtgccgctctgccggcatctctgtcacgtagcccatgccgcccaggatctggatggcctgagatgagaacagtggctcaggagggagaagaccccggcgtggggaaagctggagaaggggcagctggccccctcagagctcactgtggacactcacctggtggctgatggcggtcgcggcctccgaggcggccagcttggccatggctgcctcctaaacatgggggtacagtcagagccttcccttgaggggacccctccatcccctgctcccccactccctcagcaggggaggcctgtggagcctccccatggggctgtaaaccccaggcccacacctctgacccacggggccaaggagcagagacccgccccaacctctccccgtccctgggcccaccacattctgggccatggctcggggacccctgtgggcaccttgatgaaaggcttcttgttatccttcagcatggcagcgcgccaggtcagcagccgggcactctccagggccagggccatgtctgccaacttgaactgcaatagccccaccccacaccacaggtcagcagctgcccctccaggggacagaagggagggggaggaggacggagagcagtcaggaggccacactctccgcccgctgtccagcctctaggcccagctcctaaagctgccaccattacctggatgacctggagcttggtgaggggcgccccgaaggccatgcgattctcagcgtagttcacagcacaatcgagggcggtctgggcaatgcccagggcctgggaggcgatgccgatgcggcccatgtccagggtttgctgtggggaccgccctggtcagtggcccgccagccggggcgcgggcctggcctcaaggtgccacccccactgccgggctcaccatggctatcttgaagcccatccctggctcccccaggatgctgtccttggggatgcgacagtcctcaaagatgaggttggccgtggatgagccccggatgcccagcttgtcttctttcttccccaacgtgagcccaggcgttggcatggggaccaggaaggcactgatgccctgaaaggagaggcgggtggttttctcagagctgcccctcagccacaccctcacaccagcacacccaacaccaacccggtcccctccccacctccctcagaagctcaggccttgacaccctctgccggcttctggggaaggtgcaggcttcagtggcagctgaggagggacagggacagcccacttgccccagagcaaaaataggtccagtcgggccaaggagagaaggccctagaaacagaaatgacagcagcccaggatccggctgaacccctctctgggtgggcccaccttgttttgcagggctctgtccgtgctggcaaagaccacggcagccgaagcctcccaggcattggtgatccaggctttggttccattcagaacccatgagtcgccctcggcccgggcggtggtggacgcagctcctgcatcactgccgttccctgcccacacagacccagggctcagcgcacgccccaccccacacaacctaagggcaccagcctcactccctccacacccctgctggcagacacgaaaccctatgactcgggctccaaagatgagggtcccaaagctctcagtgatgggaccagagggcgaggggggtgtgcaggagctggcgtcttaaaccaggggaccccgaaggcaatcttcctcccagcgccgcggtggcaagagcgctcaccctaccaaccacacggggagcctcccctctggcctccgaagcagtgggcagttggcctagcaccttcctctcctcccctctgggcctgtcaccctaaggacaggtgaggggacagggcaggtacctggttcgctgagggcaaagcagccaattttgtcaccactggtgaaaggcgtgacccacgcctgcttctgctccttggagccaaacttcaagatgggccccaggtagagagactaggaggacagcggggagcggtcggaggccccaggcccaggcgcatcctgcccacctgcgggctgcacctcagggcctgttctgtccagggcctacccagtaggaccaaggcctgtgacgtctccagagagatcagggctgggagccgaggccagagcctgcccgctcacgggagcctccctccacccgtgtgtcccaggggcctgggagggggctcacgttgttgacactcatgatgactccggtggaggcgcagccacggctgatctcctccatggcgatggcgtaggccaggtaatcgaggccagcaccgccaagctcctcgggcacgtccatggccagaagcccaagcccgcccatcttcttcacctgggcacagggaaggacggcacgccatgggcagctgccgggggcgagcccaccctccccaagcccaaaccctcctgcccccgaggcagtgccctgcagaaactcaggccatgtgaccccagccacgcacaagggatccccaagtccagaagctgaagacccagtcccactgaggtctatatgatggcacttctcattcaagctgtcctgcccccgcctccacgcctgctccccgctccgtccacagccacggcagcgagcaagcagaaggcacaggatgctttcagggaactcagaggtaaggagcaggacagcgtgagccacactgaccttcgtccagccccctctgcacatccacacacacgcaccctccccaccacagggcctctgcacatgccacctcctatccctcagctggttattgcccctcctctccttctgatcgcagctcaggcctcgctgctttgggctgccatccccagcctcgctgagtcaaatccttcagtccctctcctgcagcacttctgcggctggaatttctcagggatgaacgtgcttctctggattaaggtcttttgccttcaccacgagggcacagactgtgtgtgctcttgctcactgctacatgcccaaggccagtgagagaatgaatgaaggataagagcttgggactcttaattctgggtaataatcatattaagagtgggccaggagcagtgatcacacctgtaatcccagcactttgggagaccaaggtgaggggattgcttgaggccaggagttcgagaccagtctgggcaacatagcaagaccccatctctaccaaaaacaaaataataataatagtattattactttcaggtgagtaatatgggaaatgtggaccacagaatctacctaacttcaaaaaggaacaagtaaaaccacttatctctgggagagcagggacagggacagggacggggacagggacagggacggggacagggatggggacgggagggaaccgttgcttttcacgagcccttttatacaatctcattcctgcaaacatgttattttattttattttattttattttattttgtgacagagtattgttctgttgcccaggctggagtgcagtagtgcagaactcggctcactgcaacctcttcctcccaggttcaagcaattctctgcctcagcctaccgagtagctgagattacaggtgcccataatcacgcccagctaatttttgtatttttagtagagacgggttttcaccatcttggccaggctggtcttgaactcccgacctcgtgatccacccacctcggcctcccaaagtgctgggattacaggtgtgagccaccacacctagtctcaaccatgttcttatactaccatgacttacataaactaataagaatgtttgctaatatattcttgtttttctatactcctgtgaatataaaagttttaccttccccgtccccaaaacagtactcacctcaaaggactgttctgaggcctgactgagataatacacatgaaaggcagagcccagcacctggcccaggctgaggtactgttgaacagcatctatcatcaagtggctgccaagttgttttttttttttttttttttttttttaaggactgcgcacagtgactcacacctgtaatcccagcactttgtttgtttcttttttcttttttttttttttttttgaaacagagtctcactttgttgcccaggctggagtgcagtggcacagtctcggctcactgcaacctccacctcctgggttcaagtgattctcctgcctcagcctcccgagtagctgggattacaggtgcctgccaccacacctggctaatttttatatttttggtagagacaaggtttcaccacattagccaggctgttctcgaacttctgacctgaagtgatgcgcctggctcagtctcccaaagaatctcagcactttggaaggccaaaatgggtggatcatttgaagccaggagttcgagaccagcctggccaacgtggtgaaaccatatctctaccaaaaatataaaaactagccaggcatggtggcgggtgcctgtaatcccagctactcgggaggctgaggcaggagaattgcttgaacctggaacgaaaatgttgcagtgaaccgagagcacgccactgcactccagtctgggcgacagagcgagaatctgtctcaaaaaaaaaaaaaaaaaaattattgtttttttagagacagggtgtcactgtgttgcccaagctggtgtcgaactcctggctcgagtgatcctcttgcctcagcctccctcatgctgattagaggcacgagccaccacaccaagcctagttcttactttggcaataacgtatggaaaagagggggcacctaggagcctgcagcacttctgtgacaacctgtgtgtccctctgtgaaattgcttatttgattcttccttgaactgttcccatgggaaactcacttgtaagactctaagtgc

SEQ ID NO: 97523 - DNA, 18268 bp, Homo sapiens
  misc_feature (1)...(18268): n = A,T,C or G
ttctttatcgtgcttttagtgcattcacaatgttgtgaaaccaacaccactgtctgattccaggacattctcaatacctcgaaaagaaaagaaaccctgtacccacagcagtcactccctattccctctccacccaaaccctggcagcaactaaatgactttttgtctatggatttatcttttccggatgtttcataactggaaacatacaacatgtggactttggggccagcttctttcactgagcacaatgctgtcaagcttcatctgtgttgtggcatgaatcactcctctccagggctgactaatgagccactgtattgaaagaaccacattttgtttatccattcatcagttgacaggcatttgggttgtttccacttttgggctataatgaataatgctgtgatgaacattcatatacaaggttttgtgcaaacatatattttcaatattcttgggtctatatctaggagcagaattgctgggtcatttaagtctaacactttgaggaacagctaaactgttttccttggtggatccaccattttgcattcctactagcaacatctgagggttccaatgtctccacttccctaccagcacttgttattatcttttttattatagccatcctagtgggtgtgaagtgatgtcttattgtggttttaatttgcatttctctaatggctaatgatgccaaacgtcttttctcatggttaatggccatttgtatttggagaaaagtcaattcagatcctttgtacatttagaaaacagggttgtttgtcttttccttgtttccttgggttatcaagaggacaaaatggaaagatgtgagtgacatttacagcccaagtccaggcatgtggtaagcacccaccgaatgctttgcacacataaaaatcatgctggtgctgggcaaggtggctcatgcctgtaatcccagcactttgggaggccgaggtgggtggatcacctgaggtcgggagttcaagaccagcatgaccaacatggagaaaccccatctttactaaaaatacaaaattagcctgcgatggtggcatatgcctgtaatcccagctactcgagaggctgaggcagcagaattgcttgaacttgggaggcagaggttgtggtgagccgagatggcacccttgcactccagcctgggcaacaagagtgaaactctgtctcaaaaaaaaaaaaaaaatcatgctggtgatcaggtgtggtggctcacacctgtaatcccagtactttgggaggctgaggcaagaggatcatgaggtcaggagtttgagaccagcctggccaacacagtgaaaccctgtctctactaaaaatacgaaaaatttagctgggcatggtggcgggtgcctgtaatcccagctacttgggaggctgaggcaggagaattgcttgaacccaggaggtggaggttgcagtgagccgagatcgtgccattgcactccagcctgggcgacagagctagaatccgtctaaaaaaaaaaatcgtgctggcaattagtctttatgagctaaaagtgactagtgacatctcagaagcagaggagtacaggacccatctgtgaagaacattccatacagaggagagaggagaatgagggcagaggattgcttaggaaacttcctggaggcctctgggggatgctgagttgtcacttgaggcctccttggaggaagcactcagagagatggaagcaggaagaggactgagtgatgcccctgtgacggaggctgctggggacagggctgggagcctggaagccagcaggaggaagggatgggggcacagaggcacacagagtgaaaccaggggcaatgaacatgacatcaggaagaaaggcaggcatctgaagaccactgggctccaattgagggggtgggtgcagagggtactgaagtcctggggctgaggacgatggaaggagcacagcatgttccatgacgggggtactcaggcttgacaggtgcggcagcacgtggggaccagattctctcccctgctcacttcaggctcctgttgtcccctttcattaggaaaacacgatattaacaagtgcaggcccctaacagtttgggttcaatacttactgtaaacaaccccacggagggctgtccccgagagatcatttgggacctccccggagcagagaggcttgctggaccacacagctgtcagtggcaatggagaaacaaatagatctgataaacagcaatgtcctgttctttagagtcactttaaaaaatggtatttatacaaagcacagaaagtacaaagcaaaaagcagaaaagtaaccaccccatcactgagacactagaataaccattgttaattcactggtgtatcttcttcttctctctacctccctgtatgtatgtaatttccattttgtatatacatgtattacatgtatatgtataattttagtctgagatttctagcagcattagcattttcccatttagttagaatttcttcctaaatatcatattttaattttagtctgagatttctagcagcattagcattttcccatttagttaggttttcttcctaatgatcatatttaatggatgtacaggattctattacatgatgtgcgacacttcatgaaatgattcttctattatcagatatttaagttatcaacagcattttgttgttataaatatgactgatgaaggtcttttgcagaaatgttataaacatgtctggttatagattccgaggagtggaattactagatcgagggacaggaatgtttttaaggctcttgatacagaatgatacattgctttccagaaatttttttccatatatgcaccagtaagctgtacaagagagtgcccgcctcattctaaccttcctattctgaatattttcatttcaaaacacaatacattgcaaggtgaaggtggtgaatgttcattttgatttgcatttgattgtggtcacgttgagcttatttgatagagttattgaccctcataatccctctttcgtgaatggtctgttcaattctctttgccatttttctatcgaagctatagtttttctgttatctacttgcacaagtttatatcacacttgttgcaaatattttcattgtgattttcctttaagttttatgatttttttttgacattcagggactgtaaatttttatatagtgaagtctctcagtcttttccttttttctcccttcgcttttcaatgcagagaatccctctgcacacagaaattcacttgtttcttcttgtacaaggcaggtgggttatgacagagactttggagctaatagacttgggctaaggattcagcaggtttttttttttttttcgagatggtgtctctgtctgtcacccaggctggagtgcaatggtgtgatcttggctcactgcaaacttctgcctccccagttcaagtgattcttctgcctcagtctcccgagtagctgggattacaggctcccgccaccatgcccagctaatttttgtattttttagtagagacggggtctcaccatattggccaggctgctttcaaactcctgaccttgtggtccgctcgcctcggcctcccaaagtgctgggattacaggcgtgagccaccgcgcccggccaggatccagcagtttatttaattccactgggccctggttcccctttcgaaaaccagtgctaagaatacctatgtggtaatgttgtggggcagattggatggaaaatatgtatcatgtttttagcacagtacttggtaaaaacaaatgaagcagttatgggttttttacttttgtttttgtttgtttgttttacattgaaccatttaatctctctggaattaatttaacaaatgatgcaggatacagatttaggctgggcacagtggctcacacctgtaattgcagcactttgggaggccgaggcggccggatcaccagaggtcaggagatcaagaccatcctggctaacatagtgaaatcctgtctctactaaagatacaaaaaaaataaaaataaaaattagcttgccgtggtggtgtgtgcctatagttccagctacctgggaggctgaggtgggagaattgttagaacccaggaggcagaggttgcagtgagccaagattgtgcctctctacactccagcttgggccacagagtgagtctctgcctcaaaaaaaggaaaaaaaaaaagatttatgtgtatttttctcagctaatcatctttcccaaaacctcttactgaataacattcctttaccctttggggttcctcttttatcatattttaagtcatatatctttctttgtgtttgtactctgttccatgtatatctgcttttctttccccaatatcataacaattataccacctaattttataaaatattttattttaggtgattttcatatctattcttccaggtgaaccagctaataatattgccaagttggagaaaactactattgggactttgattggaattgtacaaaatccataatatagctggtataaattgacattttggtaatattcagtcttaacaaatatggttgtccctgttattttaaattttgtaattttcttcatatagatcctgcatatttattgttataatttcttctgattatcttatactcttattactattgtgaatacattttcccctacatttcattataactgataacatacagggaagttttagattttataaatccatcttttattctgtcactttactcactcctcattatttcaaattgttttttggttgcttctctgggattttcttgtttgactctcatgtttgactctcgtgtcatctacaaattaccattgttttgtggtgtactttccaaatacttatgacacttattcagatttcataacttattgcatgggccagtatttctaaaacactacagtggggaatattggaaaaagaaaacatccacctcaaggagacatactgtgagaatcgctatggaccacctgggaagggcatgggatagcctctgtcacctagttaccacttgataaaaggtaattgttgctgtttgtcatgtccaagaagaagcagtcttcttctagttttagaaagagttctgaaggactgagtatttaatttttatcaaatgcctttttaatatctattgtgatgattatattataccccttatttcatttactggtaaaataattttatatatttatatttggtttatatatgtgaaaccattttgcatgattacaatgaactattcttgatacaatacttttttattgtactctgaaacttatttagggtttttatatatgtattcatagttgaggttgatttacctgattttggttatgttatggttttaagtcatgtatattttacaaaatattctggaggcatttatgtagcataattattatctgatttttgaaatacttaaaaaaagttggtaaagccacttcttctcaatgccatttatacagataattctttaatatttacttcaatttattctttagtgttgaattggtcttgttttctatttcctcccatgtcacttctgttaagttatacgtaattttcagagaacaatctatttgttgagattttcaaaatttctggcaaacaatcatgcatagttttgtataactgtaagttttctcttttattgtggctgtcttcattttctcatttctaactgtttgtggtgcccagggtcctggcaggaaatagatggcatgttcaacaggagtgataaagacaggaatggcaaggcagccagtggctggcaccctcaggatccattcccacccctgaactgaagaggcagtggccagagctgtgtcaccagaacctggcagggctgcagctaggagactccagaggtggagttctgtccctgcaaatctgcagcaggcagggtggggtcagtggaacaaatcagcccatccccccttcactcaccctgctggtgcctcgcttcagccaaacctgggtaaagcagcccccggagatttgctggctgcacagggcaggtggaaaagggtagagagtgggtctcgctgggggaggggaggcagggagaggctgtccagctcactcgcatttgtttctttccttgattctgtttgtcacaggtttgtccatttaatctcctacttttcaagtgacaggctcttaggttggttaatctcttctgctttttgtttttatattctaaaaaatgatctctggaccggacacagtggctcacgcctgtaatcccagcactttgggaggctgaagcaggcggrtcacctgaggtcaggagttcaagaccagcctggccaacatggtgaaaccccatctctactaaaagtacaaacattagccgaacatggtggcgggtgcctgtaatcccagctactccggaggctgagacaggagaacagcttgaacctgggaggcagaggttgcagtgagccgagatcgagccattgcactccagcctgggcgacaagagcgaaactcaatctcaaaaaaaaaaaaaaaaaaaaaaaaaatctctgtcttttcaggaagccctgttgcatctgtaggactgagatcagcttctgtatttctcttcttccctctcttttttaaatctttgtcttttcctctagtaccactttcttgagtgtgtctttttcctcgttcactttctccaatccatagctgctatttcctgcctctgtcgtgtgttaaattctgactctaaacgtcccggctgtccctaatggtcagtttcctttatctcagtttgctcatttttcacaatcaatccctccaatttctgatatgcagtggtctctcgaatcttcctgagttcacaaatcagacttgtccagaatttatttttatcagtgattctatttaagatggaagtaactccctggagtccttaggaaaatgcccttttctggatggtgacatgttttcataggtcaggtgatttttcttttctgacaaagaactgtcgagaacaattggatcagatttgttcagagatgggagtgggttaaaacgactggcactggatgggagatgacaattcaagatccagccggtggtggggccagagatgagggtgtggtgagacacacagaggatgggctccctccaagggttgagagggggcgcctcatacctgggtcttgtctttgagtagctgtcagacgaggaatagcccgctggaccctcaagctgttgtgggggtgctcagccagctcccaataatactcggccagcctcacctccatctctcacctcctggccagctgagccacctgttaatgctttctcccttctggaggggtccatgttagcaagaaatggcctcttttcattcatcaactttagctttctctctggctgtgattcttcaaggtttggagtggcgaatggtgaacagtttgtttcccaaggttgccacacattttcttgtccttctacattggtgcaaatagttttttttgtgttttttttttgaacgcagggtttccagcccccgttctcctaccccatcttgtccagaaatctgcagaaacacaagtcttaagaaaatgcaaaaacacagacaaaaacattagaaattagaaatgatacgtaacaagagtcacaaaaggatttaaaagcaattacaggagcagatcagcaaagcaagataggaacacaaagaggttcttgaattttatagttggattctctgtctctctgtgggtctgtccatggtgaagatgttcctgggtctggctgtcagygttcatttggctaggaatggccacacagaaatgctaagatttatctgaaagaatcaaacacgatgatgtttcttcctacttccacgggcttgtcctcccatattagagtagaacttctcgtactacatcagggttgacctggtccagaaatgctcttctactgagaagcaccttcctgcctcttctttgcctccacactcagcacagggtgggcacctgtcatcacccagcacctgtgggagtcacatgggaaatttgctgtaagccccccttcatttgggaatggaacaaatctcatttgttagcagaaggaagtactgttgggcccagtgctatcctaacccagatctccaatgggaataatcctgatctgattactctgaaaggtcatccagtcactgggaggagtytcagctgagagccagtgttagcgtaacaaggtgttaccaaatcaccacaaagagctggggaagggctgggcgggacccactgcccctaaagagcagtgagcatgttttccaggttatgttccagggcagcaattgccaaacactatttagttgtagaatctttgctttaaacattttgcatgcaagatattgtgtgtgtgtgtkcatgtgtacatacacacatgcatgcatgcatgttacatgtatacacatgtatgcatatgttgtgtgtgcacatgtatatgtgtgtgtgtgtgtgtgtatataggaccagagtgaagtacaaactgctggtggggtggcaggccaagtgagcaccttcctccaccgcttggcagagcctccacacccgtggaatacagtttggtactactgctcacccaacgacttgtgtgtggcggggctgatggggtgtgtgtggggtggtgctgtatgttttcccttgaaggttgaaactgattcagccctgggggtcagaatgtccagccctgtgcattggctatgcagggtcattaacatctgctgagatgttactgtctaagggggaagtatcttcttcctgttatactagcttttgaattctgatctgttttggtaacatggagctgtttctttgtttcagtgtttctagaacatctttgaaaaagccataaaggtttgtctgccacacttgattgaaccaaaaagcctttcctgttctgtgcgcctgcctctgactctcccttcgtgattatgttctttctctctgtctacaggctgatgtttgggctggctggagctcttccacaagtcagctgccctcagccaaataagaggctgttctcacccctcacctcatttgcatacctacaggaggaagtgccaagggaagagagcattgaaaawtaagagcacagcagagttgagctatctccacatttgtctggcaggctctgcaaaggggattgaggccagtggttctctgtgtcccagaggtgtccctgggagatgtagtgtcactggactagagattcatccttgctatctctgatgcaagacgattgtatcaattcaggctctggaggtaggacagggagcagaaggatggggactaaagccatggaagaaagacagaaaaatcaccttttctatgtgaagtgaagagacatgtggaagtgaaattactcaaaattctttttaagtacccatgatgcaaaagccataaaataaaatattgtaaaattagccacataaaattgtaaaacatctacacagctttaaaaacaacctgttaaaaataactccaaaatatattgtagcatatatcagagtcttattcataactaagcaaaaaatgataccaaaataagcgagtcaaagacacaaaagggaattcacagaaaaagaaatacagataactaaacatgggaacatgctgaaggacttttctcataaagaaaggcaaattaaagcaagttatcattctcacctctcagatttgcaaagattaaaaggtctgataacagccagttggcagggtgtggggaaatagacacattcatatccggttagtaggagaaaaaaaaggccacaacttcattggaagacagttggtacagttggtagtctctatcaaaatagcaaatctccaggtcatttagccagctgtcaccttctagtgatttacctacaatcactaataaacgtcaacacgtgtacagcacatggtgaaacatgatgaaaatagtaataaaccatctctcacttggcttgagaagacctctatgatcttttttggtgaaaaaaacaaatttcagaaaacggtatacatagtatgatattattggcatctaaaaagatatgcatatataatcttgtgggtatgtttaaaatttctgaacttacttacaaacaggaataggaaatctaagaagaggggctcatgggagtggggaaggagatgtttattttttattttatatctttctgtatggatttcattttttaaagttagtatatattttaaaaaatctagttaaacagggtcaagtgcagtggctcatgcctgtaatcccagcactttgggaggccgaggtgggtggatcacctgaggtcaggagtcgagaccagcctgaccaatatggagaaaccccatctctactaaaaatacaaaattagctgggtgtggtggcacatgcctgtaatcccagctacttgagaggctgaggcaggataattgcttgaacctgggaggcagagtttgcggtgagccaagattgcgtgccattgcactccagcctgggcaacaagagcaaaactctgtctcaaaaaaaaaaaaaaaaaaaaaaaactctctctactaaaaatacaaaaattagccaagtgtgatggcaggagcttgtaatcccagttacttgagaggctgaggcaggagaattgcttgaacctgggaggcagaggttgcagtgagccgagatcgtgccactgcactccagcctgagtgacagagtgagactccgtctcaaaaaaaaaaaaaaaaatctagttaaacaaaacataccaataacatatgtaaatgctcagtggagtgcctgtacctgagggggtgagtgtgtggagcttctacactgaggcactggcttcattacagaggctggtcctgtctacagggctctacgggccaggygagccttccgggctcaggagaatcttaagtagcaaaatggggcaagattatggtgggtgagaacagaccagcagctttaagtaagagcctaagatccaaatagctttccctcgatctcctgacagccttctggcctcagcagccgatggattccatgggtgttagctgctgccagggtttcagcaggctgagggccaccgcagtgtgcccctctcccaaggtgctagcacttgacagcccccttttcctctcacaggttttaggaaagtgaaaagtaccttctcctcctcacattagagatgactgtgccaaaggaaggtagagcttctagaaagagaagagaatctgggattcctaggannnnnnnnnnnnnnnnnnnntcctaggaccttcttgttagaaacaaccccaagcacttgctctccagctgctggggcaaatccaggtctcggcaaggctggtggccaacccctgggagataatccacggggcatagtgtccaagaggatgaagccatttgggggtggcagggagctcagcgggaacgaggtgctgagtgatccctgcccctgacaggtggcccctctgcggctgggcctggctttccattcaccatgggccgctctgcttgggcccactggagtcgtgtttcttcttcaaacaccccctcttttttgttgtttttttgttttgttttgttttgttttgagacggagtctcactctgtcgccaggctggagtgaagtggcacattctcggctcactgcaacctccgcctcctgggttcaagtgattcttttgcctcagcctcccaagtagctgggactacaggtgtgcgccaccacgcccagctaatttttgtatttttagtagagatgggatttcaccatgttggccaggatggtctcaatctcttgaccttgtgatccacccatctcagcctcccaaagtgctgggattacaggcgtgagccaccgtgcctggcctgcaagcacccactcttsctctatcttcttggcagccgagaggttaagaaagcccctccatgtggcagactcctttagatcagatcctttagctgccgggtccccacctaaatgaccccccccaaccttttcctggtgctccctgagtgcagaagcagtgggggaataagagtgcctcagcccacgattgctggacgtcaggactcacctccatcttaagagaacggtcagctccgaaattcggagactttgtgtccagattcctcaagctgtgtcaggaagtcttgtcttttcagttaagaggaaacygggtcttcctgcatgggttctaataaagtctttgatctatttcaggtatcggaattgcgtttacacttacagaattctgcccaatgaagatgataaattcactgttcaggtgagtcctttataaacctagaaatctgaacctgacttcagccgatactggcagagaaagggtgtaaacgatgaggaaggaagtgcacgcgcaggtagccggacgtgaaggcctggctgagcctggcttcctcccaggtgtccatggggtggcttagctggtaaactggggccctccaagtgaccctgctctgtgacatgacggagttgcatgccacaggctatttgtggtccataggtgtgaagaggaaacgaaggtgaagcagactgtccagagatgaagggaaaggaggggctgtggcttggccgactgttgtcttcagtctctcaaaggagagagaggaagtggctcaggagggaaagaagggaggtgaacttacaggagaacagaccgtgttttctgaggggctgcgagactagcacaaaacagtgcctttccatttgtagaactctgttctgtccgaggctggtgctcactgcatctgatttcaccaagcaaagtcaaaatgtgcaaaacttgcagttcattttttaatattttttatttttgagacagagtttcactcttgtcacccaggctggagtgcagtggcgccatgtcggctccctgcaacctccacctcccaggttcaagtgattcccctgcctcagtctccctagtagctgggattataggtgcccgccaccatgcccggctgatttttgtatttttggtacagatggggtttctccatgttggccaggctggtcttaaactcctgacagcgaatgatctgcccacctcggcctcccaaagttctgggattataggcatgagccaccccgccaggctgcagttaaatttaaaaacaaaaatcagctgcacccgtccaagcccgggaaggccaccctaagcacggtttactaaaggctttgtttcgccacaaaatgtgacaactgagtgtgtggaagccaggaaagctattgttatctggctacatgaagagcacatggaggtggcaagaaggaaggagacaaagtttccacatcccgggtgtgtgtgtgtgtgtgtgtgtgcacgtgacagagagagagagagagagatgctcagttctcagggactagagtaagaggcacagcagtgcatccacgtcccaagcagagtagccggggtcgacaaaggtttggatatcatgtcatggaagagcaatgacggcgttggaggagtttggttgaaaagaaagtggaagtgggaggggagaggcagggtacactcttcagtttcaaagcttgaagggaatgattcattttgtgctaactaggatgcagtagtagacagggagctggactcaaggtgtggggagaccacaggcaagtccctggaggcaaaaatcctccagaagttgtcaagagggagagcgtggtgagcagaacgcccctcaggaagacagcttatgaggatggaaggaattgcttcgaggagcgatgtgattgagagaggcccaaggggcatgtgtgatgcagcccggtccaggggcatttgctgcgaggcctccttaggagatgcgagtttaggctcaagcagaaccactccctgcgtagttaggctggcattgctgccggctgcctcatcctcctgcccctgagtccactgcagcctctaaggcacatctgctgaaggctttccactggcctagggcgcccgcaggtttggcctggttcttagcagtcaccaggagcagatgttggcacacctagtacgagaaggtcctttccagcgcttggcagctatttgccatgggaatgtctgtctctgacaggggctcttcaccatgtgtgggatgtgagcagcggaggggagccctgtctggggcaggcagttggcctcaatgacctctaccatttttttcaagtctaggagggcatgagcttttctggcagagttggcatctgtgataggtggtttgctgagaggagtcggcaaactctcttaagttaaaagttggtcgatgcttttgatcttttttccctttgtggtttcttctcttccttcaaagtgaagaaaactttaagtatgactggaaaagacatgactctgtggcttctagtagagtcggcacccgccgcctgtaaatgtgtagactgcgtctccggtttgcccctctctgtcaccatcatactcttgctactgtgacatcttgtgaccctgggaactgctgatgaaatccggggcctcatcaggctactgggcagggggtggtggtggtgcagggaacagaaactcgccttggctgactctgtaaggggtaaggggtgggcagcctttgtggagatgtgcagagccaggaaggagaaggccgccctagggccttggaaccagaagagcatggggtctgcacgcagcttctcccgtggatcagctcttctctgtggggccgctcttcccagccagcagcctcccttctcagtccccagtcctaagaaggagtctgatggctcagcctccacggctttctccgcatgagccactcaggggctgccagtctgtgtatgaatcggctgtcttggagcaggtacccccctctgcctctcagagatggggacagagtcgtgggggcagcgtgcctccttaaggtctccgcttagccaggacagtgggcgggcagctttcagagaagatgggcggctctgctggacttctctgctcctgaccccggcactagatctgtgacctccgcagtagctgacatggtacagggagctgtggacctaggtggtctgaagaggttttccttcaaggtgaattaaaggggaattctcataggattctcccaggtggactcaccttcgaaaatctacctccaagagtaaatgacagcagacgtccactgaggaccaagtgcacactcatgcccaattaagcagactcagagcccttcggggaagctttagcagttattgatctctgcctattttaactcaagttcctcttttcatgttgaggcaaaacctcacagtcttttctgagcttagccacagtttctaaataactcattcctgacacctgagcctgttcagtgccaccagaatacgaggctccccaaaataagaatctggcctgaaattttgccaagtgaagcaccgaaaggctttcattgtttcttagtttagtaactttagctcttttcctggggacttctgttctcttgtcaacaccaaagatctcatctttgttctttgcagaccaacttcatggagttggcccacgtgtcatagcccatgacagccctgtatcaatcagggagaggagctgcctcacctgggggactcttttctctcactccatctttcacagacttaaaaaaaatccgagatgggagggcaggatgcaaactgtaacttcatccaaccccctcgttctaaatatgagtgttgctgagaactgcggaagttggaactcacagccaggcctcccggcctccccggctaagctttcttccttccaatccagaaggtgtttccaagcctgtctggagtcccctggggaaggatgagcccaggactctgcccagagggacagggagacagggcaatgtggcctctcagagagcttggcctcttgcccttcacatggttatagataatatttgatcccaggtggcatctgtcccttgtggtaaatcagtgaggtgcccctagaatgaaagcagactccattcccggctgggatctgggttcaagtccaatttggtcagcgatgtggccttgggcaaggactgccaagaaactgctggaaagtagagatcacacacatacctcccagcacaaggaagctgctggggaggagggtggagacagcagggagctggaggtgctttagagcattctaggcagtgctgggagtggtggggaaggaggggtaaattttggaactccatctccctcagctctgctctttgggctatgggcttcatgtcttcagggacctgagtacgctctggaactgttaagcagttgttcaacagctgctgtgccactcaaaccctgagaaccttctggactcagcttgcactgcttttcctggttgggggagggttggggcagtgctctgagccctgtgtgaggccagacgaaggcagaacggctcagccccgcaggcctgactgtcccacaccaagagagtgggtttcttgtaaagccaaaactcctttcttgacttggaaagggaagtgactctcccctaagagaagcggtgcctatcttgagctgctcgctgcagactgagctgggaggctgctgctgcctttgaaatggcccctctttgggaaagtaaggaagagtctgaggtcctgcaagccgccctcatgggccagctccagggtggccagggaggcctggagtggcctcagacgtgtcgcataaatggctgtctcaaacctagggccacagttgaagcaaaagaggcccttcggctccaccctacaaccttttggcccttgcgtcctttctaacatccttcccaccgagaggaataaagcagaaaattagaactacccataatcccctatcacatcaatgttctctgtgaacttcctgtcttttcttgaggttgagattgtatctaggatattgattgtttcagtcaagatgggagcacccccaggtgtttttctgttttgttttgttttgtttttgagacagggtcttgttctgtagaccaggctggagtgcagtggcgcgacctcggctcactgcaactctgctcccaggctcaagcaattctcccacctcagtctcctgagtagctgagattacaggtgtgcaccactatgcccagctaaattttgtatttttctgtagagatagggtttcactatgttgcccaggctggtctcaaacgcctgggctcaagtgatccacccgcctcagcctcccaaagtgttgggattacaggcgtgagccaccatgcccagccacactcccaggttttcatgcaagtttagatgaagagttagaaaatatctatctcatagaccctttcattattctttcccgatttggaagaaaaaatccagtggtctgagccattccggtgagttctaaagaagagacacttgtgactcaagtccctggtccctgacggtggctgtcacgtatctccgggcgacatggcttttggagagggaaaacaaaacaactttctaaaagctgttccgtcacaagcatccgggaggtgaacggttgagccattgttattaagctcaggaagcgagtggcagctgttattgttctgagtggtcactgagtgaagtaaagattccgtctgagccgccgggcaaaggatgtggctctaacacacttcctgaagttgcacaacaaggggcacagaaaaggttcagggcatagaagcctagcacggccagggctgccctgtgtgggctccacagccatgccaaggacaatgggccccaagggggtccgtgctggtggaggggttcctttatgctctgacactcaccttctagaagcctgcattttgaattggtttttctgtctactgcagaatatggacagatctattttccaagcctctgaatatctcaaaacatctttagttgtctacacattcaagagtaatttgatagatataaaattcttggaaccaactgttcgctcaaaatcctgtaaaaggtacagcactaccttcaagaatgtagtgttacaggctgggtgcagtggctcactcctgtaatcccagcactttgggaggctgaggcaggtggatcacctgaggtcaggagtttgggactagcctgggcaacatggtgaaaccccgtctctactaaaaatgcaaaacttagtcgggtgtggtggtgcatgcccgtagtcacagnnnnnnnnnnnnnnnnnnnnnnnnnnnnnnnnnnnnnnnnnnnnnnnnnnnnnnnnnnnnnnn

SEQ ID NO: 97524 - DNA, 16488 bp, Homo sapiens
tgaaggtgaataagagagcaccaatatcaaatgtttgtagattgcatcatattgtaaatgtacgaggaccacagaatttgagagatggaggggaagttagagatgatctggcttgtgtccctctttttttttcctaagttgaaaaactgtgacctagagagatgagataatttgcttaagatcacatggctggttcggaagaggggaaaaaaggagtgctgatgaaattcagtggaatgtcaccttctaatttttatcacctattattttgaaataattttaggcttacaaaagagaaatagtacagagagttctttgaaacttcacccagcttcctctaatgctaacatcttacacaaccatggatttaccaaaactgacattggtgcaacattattattattattgttatttattttttgagacagtctggctctgttgcccaggctggagtgtagtgatgcaatcttggatcactgcaacctctgcctcccgggttcaaatgattctgctgcctcagcctcccgagtagctgggattgcaggtgcacaccaccacgcccagctaacttgtatttttctgtgtgtgtatgcgtgtgtgtgtgtgtgtgactgacttccttaaaacagtaatgacttactgatagtcagctattgtacagaaagggtatcacaaacctctttgtcttttggatcatgcctctgttttcagagcaggttgttttcccaggtgattttgatgacatcccacctgcagctttttagatgtgtccaagttggggacaatcccggcctgttcaactgacctggatacaaaggctgtcagggctggcagtggtgcaccttgaaccttctgccactcttgcgtcttggatcttgagtttcatttctatttttgtcgggtatagagcattctttgctcttggttgcctagtttatccagagaaggactttggggccaaaaggacacaaattcaaacatcagtttccccacctaattatgggagctcaagttctaaaattcaactgttctaaaattcagtttcttcctttgcaagatggggacaataatggtcaccatgcagagttgttgagggattaaatgtatccagtaattggcatagcacctcgtgtgcaggaggtgcagaatgaacgtggaataagtgaatggctgccaatgagggagacccggttaggtgggtccaatggaaggtctttttcttttctttttagagatggggtctcttctgttgcccaggctggagtgcagtggtatgaacatggatcactacatcctggaactcccgggctccagcagttctcccgcctcagcctcccaagtagctggggctataggcacgtgccaccatgcctggctaatttttaaattttttgtagagatggggtctcactatgttgcttaggctcagtggaaggtcttgaatgccaggcaagactgcctgcactttctggggtgggggcaggcactgcaggagtttgagaagcaggagtgatgggatgagcgctgtgctttaggcagtcaagtgcagagtgtgctggatgaggcagaaccgtgggaaacaggggacgggcaccgggaatcatccagcaggctgtcgtgctagtgcctgttctggtgagggctgagctgggcctggactagaaagaagggaccatgtgagactgtgcagaggtcccgcctaccaactgctatggaaataaacaagacacaggggctggagaagttgggactccaagatgcatgaattctgggtcctagtgaaaaggtgaacaagtcatgaacagagataagagaaatcaggataaagagataatttgtgggaggaaaaaatgcatttggttttattcatgttgcctttgagatgctgacagactatccaagcagagacaagtggaagagatgattgcggcgccagagcctgggagaggccagagctggccatgaggactgagcgtcactgccagaggtcaccaaggaagagaacatagaggaggccagaagttgggggcagaggctcacttatggccgacagttgagagaggggttagagacagagacggagaacttggatgtgctggttcgcaagggctgctataactaagtattgcagactggggcttcaacaacagaaattcatttccccagttctggaagctagaagtccaagatgaaggtgtgggcggggttggtttctcctgaggcctctctccttggcttggagatggctgtcttctccctttgtccttacaggattgtccccctgtgcatgtctgtgtctagtctcctctccttataaggataccagtcataacagattaggtgatgacctcatttcaccttaatgactattttatccttataaggataccagtcataacagattaggtggtgacctcattttaccttaatgactattttaaagtacctgtctcctgatgcagtcccattctgaggtactgggggttagaacttcaacattagaatttggggggacacagttcagcccattaaccctggaacagaagcagaatattgaattttaaaagaacccaagggaggagtttcaggaaggccaggggctggctgtggcctgtttgtcttagacacacccttgcctcctgccgcctctctatctctctcctctggtccacaaggaggttcctggaggctcttctgccgtggggcctctagtgaagttccgccatggggcgttgggctggaggtgtggagcggctacagtatttttccgccttcttcccctgctgatgtctccagcagcagttgtttctctgtggctccatctcccacagcactgatctgtgggttccagcttccaccaggggaccctggatcccgggcgacggtaacttgacctgtgttgtgtgccctcagccctacagagggtcgcggcttctgctctttctattccctgggttgcctcactgtcccttctgtggtgtgtgtccgtttgtttatttatttatttatttcagacggagtttcactcttgttgcccaggctggagtgcaagggcatgatcttggctcactgcaacctccgcctcccaggttcaagcgattctcctgcctcagcctcccaagtagctgggattacaggtgcctgccaccatgcccggctaattttttgtatttttagtagagacggggtttcaccatgttggctagctgatctcaaactcctgacctcaggtgatccacccgccttggcctcccgaagtgccgggattacaggcatgagccacagtgccctcccttgtctggtgttttgtcatgttgtagccagctctctgtattaaatcccctctgagtatctagtagtttttgttgattggtagaaatagcatggtcaggaatgccaggtactgcagaaagatggaagggatggaaatggaaaatggtcagatctttgagcaatgggggtagagcccagaattccagggcttgagaaggggatttctgccaaaccgatgggtgtataccaattctcatgaaggtcttaatttggacctactttgagactgcatactttttcatatttatcagacagctgggtacagtctgtttttgaagtgctttttcagctttagctgtcctccttttttggttttctgacttttcctcattgatttggagttctttgtatattctagatatgaatcctttatcagttatgtgtgttacaaatacctattctcattccagagctgctaaaaaaaaaaaaaaaaaaaaaaaaagacagggtctttctctgtcgctgaggctggagaccagtggtgcgatcacagctcactgaagccttgaccttctgggctcaagtgatcctcctacctcagcctcccgagaagctgtcaccacaggcatgcaccaccatgcttggctaatttaaaaaaatgttttgttttttttttcatagagatggggtttccctgtgttgcccacgctggtcatgaacttctggactcaaatgatcctcccactttggcctcccaaactgttgggattacaggcatgagccactgtgtctgcccccaagtcctttttaaattaaatttcctttttatacatttcagtggcctgattatgtaattcttatcaatctagcagattcagtatattaatatggcaaacctaataatattcccttagatgtttcaatactattcataaactcagtaagatttcaatatagaagtacccatttcaaattagttataagaatgtacttaaaacagccacatactctaacacacttcaagtatatataagaccaaaaatatgcatagattccttattaatacagaaatataaatctatggctttgcttctttcaagcctttctatatgtaactcagttttactggattaggagatggatactgtacagttactgtcctagttaactgaggccattgtccatcagaggtttcactgggtttctttcctcagtctttaaggagacagtgaatcctacttattgtcattctgtcaacaattctgaaatctcaaggagggtgaggccaggcacgacacatgcctgtaatcccaatgctttgggaggctgaggcaggaggacagcttgaggttaggggttcaagagcagcctgggtggtagggcaagaccctgtcttttaaaataataataaaaaaattaaattcaaaagaaggaagatgatctcttagcctcttttagttgaagttagaacattacttacctctgcttgctcatagaagtctgtagctcccacatagactgataaattctcaggatgaatttaatttttacaatctttggaatgaataaaatcttgtaccatgtcctgtttttaggctgatccaactctgaaggagtcttaaaccagatgcgatgagctttggttctctcccgcgactctgtgcttcggaatcccagctttagggtctttgtattgatgccctcttgggtcacaaacaaccttctaaaggaagaatttgccacctactaatctttatcaatacaacaaatgaatcaatacaaacataaccaaataacgagactcagcagtaacacattttatcctacattcttttcgaatatttaaattttattgaggataaccatggatttcatggctcttcatttttttttttttttttgagatggagtctttttctgtcacccaggcttgagtgcagtggtgcaatctcggctcactgcaacctctgtctcctgggttcaagtgattctcctggctcagcctcctgagtaggtgggactgcaggtgtatgccactgcgcctggctaagttttgtatttttagtagagatggggtttcgccatgttgcccaggctggtcttgaactcttgatttcaggtgatctgcccgcctcagtctcccagagtggtaggattacaggtgtgagccaccgcgcccagccggctcttgaaaattgggtaccttcataattgggtgtatttcaatttgatactcaaatcgtcctgatttggcacttctagcttgtctcctgcatccttctgcctggacctatttttctttgaagcttctcctgcttcctagcataagatgttccagcttatctggtatctcttgaacaccagaatcagtgatttctccaaggatttctagttccttgtaatgaggagaagagcacccattcaagaatctgagcactcaggtgcatcttggggtaaggctactctgaggccatctcagtgaaagagctaggaaagataattattttcctcttaaagatatgagttcaaatgcatatttccaatagttaaagatgttctaatttaaattcttttgatgctctaaatattgtctacttttctctttattttgattaacaaaataaaattactttttgcttgatttgacgattgttccaaaaacaagaacatgttaatatacgtattaaagttactgaatagagatcaagattttcttttctttctttttttttttttgagatggagtcttgctctgtcgcccaggctggagtgcagtggcrcaatcttggctcactacaagctccgcctcctgggttcacgccattctcctgcctcagcctcctcagtagctgggattacaggcgcccgccaccacgcctggctaacttttttgtattttttaatagagacggggtttcactgtgttagccaggatggtctcgatctcctgacctcgtgatctgcccatcttggcctcccaaagtgctgggattataggcgtgagccactgtgcccggcgaagattttctacatagttccttggttcttagaaagtatcccaggctgggcacggtggctcacgcttgtaatcccggtactttgggaggccgaggcgggtagattgcttgaatccaggagttcgagacaagcctgggcaacatggcaaaatcctgtctctacaaaaaaatataaaaattagccaggtgtggtggcatgtgcctgtaatcccacaactttgggaggctaaggtgggcagatggcttgagctcaggagttggaaaccagcctgggcaacagggtaaaaccttgtctctacaaaaaatacaaaaattagccaggtgtggtggctcatgcctgtaatcccaacactttgggaaactgaggagggaggattgcttgagcccacgaggtcgaggctgcagtgagtcgggattgcaccactgccctccagcctgggtgacatagcaagaccctgtctcaaaaacaaacaaaacaagctatccttctcagctctggccatttgactgatgagaattctgaatgctctccaagttcaaacaggtactgagttaatgtcagtatgataggctttccctggggaagttctgccatgtatttaatgggggataggacagtaaacactctactcyctcttgtccccaaactattattcccagggcatgccttcctaagggcaagaaactagagactttttgagtctgtggagacttttcctatagaaagccggtcatgttgatgggtttcagaggtggtcttcagtggctagctgggtcattcttgttcctttctgcagtgttcttataaatgacaaagtcttgcttctaaatccctagtctgaccgggcgcggtggctcacgcctgtaatcccagcacgttgggaggcygaggtgggacgatcacctgaggttaggagtttgagaccagcctggccaacatggtgaaaccccatctctactaaaaatacacaaattagccaggtgtggtggcatgtgcttgtaatcccagctactcgggaggctgaggcaggagaatcacttgaacttgggaggcggacgttgcagtgagctgagatcgcgctgcactccaacctgggcaagtgagacttcatctaaaaaaaaaaaaaaaaatccctagtctgtggtcttattttccacatcattttggaaatgtcttattagagtctagagtagcccagacccagggaatgacagaggaagatgttagcagtgcttctctaactttaatgtgtttgtgagtctcctgggattttgtcaaaatgcagacgctgatttggggttgggtggggcctaggattccgcttttcttgcgagcttccaagtgatgctgctgctgctgctctaaggaccacactttgagcagtgagggactacaggatgaggatcaggtgcatacacattaatatcccttggtgtattatttttgcatccttcccctattcctttgttatataggggtgatgaaactcaactctatccttgacctttgcaaaatgaaatcattttagggcgggatcataaacagagcttgttatgtgactgtttcacttctcactgtgcccttcatatcttcctccctctattccttccccaggcatgaatggtatcagtactcttcaatgcaagggtcagctcatgttgaaccatggtggtccccatgcttttaacctagaattggtatacaggattgaccccaaaatgtaattttcccatgatgtattctgagaccatatctcgaaacacctaagggtaaacctagaaaattcctattggccaggtggagttasagtacctgtgggaaggtgtggtctcaaaacccttagggaatttggaaaaactggagatgttggtcaccttcagatagaggagatgacctctccatacctagcaggggtggggagtggtccttatagccataattcagcaaacttcaagaaggctatctgaaaggttgttcagtgaaacatttaggatttatcactgttgagcacttttcatcttcaaattcctgacttgtagtcctgtgttgtcctggagtggccaagtctctcctcagcgggaactgcacgtccttctccagtgacacaattttaaggtcttgttaccatgcaggaacccactttccrgctgccactgtcctgtagagaagtgtaggatatggctttagtcctgtttatcactttgtttttcttctatttctggtccacagagatgcttgcttttaagcccagttatttctttttggattttctctcttttaaaaatctatcgctatatgcaagggggaaaatatactatgttatctaaccaaaagtctgaagttctgggagtgggtrttctatgcagctatattaaagcasatgaacaaatggccaaggtactttaaaaatctatctttatggctaggcgccatggctcaaacttgtaatcccagcactttgggagatccaggcaggagtttgactgctygagaccaggagtttgagaccagcctgggygacacagcgagaccctgtctctatgaaaaataatttctaaaaaattagctgggcatggtggccaggaagatcacttcagctcagagttcgaagctgcagagagctgtgattatgccackgcactccagcctgggcgacagaacgaraccttgtctcttaaaaaaaatctatcctagctgggcgcggtggttcacgcctgtaatcccagcactttgggaggcagaggcgggtggatcacctgaggtcaggagttcgagaccaccctggccaacgtggtgaaaccctgtctctactaaaaatacaraagttagccaggcatggtgacgggcacctgtaatcccagctactcgggaggctgaggcaggagaatcgcttgaacccaggaggcagagyttgcagtgagccgagattgcaccactgcactccagcctgggtgacagagagagactgtctcaaaaacaaacaaacaaaaactatccttagattaagacatggacgtggtgtacatgattgcttttgctgcatcttgccacctattttcagcgagggccagaataggaagccactggatggaattctttgctgtgcttcgcagctgttcagaacacgttctttacataatgccttttaaagaaatgaggttctatgggagaagcctctgtgtcaggactaattatgcttcccttggagacaagaacaccaaatcatggtgatgttttccttttcccactggtgttaggatgcttacagtcaaactgttgacccacatgtagcaagaacaccatagggagccttcctggcacagcctttttagaggcagccttcttggtgcttatctgtcttcaatttctgtttcctgtccttatttwaaaaaacattattgcatcccgtgaatgtatgtgattgaccttaaaatcttttgcatgaaggcttagtataatttaataaaaacggccttatcttattttcccaagtcgactgggtagcggctgtggagcgctctgggactcccggtgtgctgctggttagtaaaggttggccttggcagctatgaacataggcagagccccctcctcaatccgcctcccacccctccaaggaagggaggccggacttggcttaaacaggtcgggcagccactggagcctcccctcccccgcatccacaacatacccatcccactcctcagccctggcgcggccccgcaccccggcctccactccctcgagccccctctccgggtgcagccccggcgtcccctgaccccggtgcacaccccccgccccagcgctgcccctcgccgccgccaccagccctgggcgcggcctccggagctccccatcacacagccgggcgcggcctcacccccccccgcccctcccgccgcagcctccagttgcccgcgtcaccttccgggtccccgcctcccccgccgtccccacccccgcgccgcctggcccgggggggcggcgcggcccttccggccggggcggggccgggcctggggcgctggggcgggcgggcaaggcgggctcgccctgccggcggcgcggccatgctcatcacgctgtgctacctgtacctgtgggcgcgctggggtcgccggccggctgagctcgtgcgcgccacggtgcggcggctgcgtgcctcgcgctgttccttcaccttctgcggcgcggccgcggagcccccgggcgcccgcgtgtgcctgagccgtggcggccgcgtcttctgcgtcagcgacagccaggtgggcgggtcgggcgggcgggcgacccgggccccgcgagccggaagtgcccccgtccctgcgcctcgtccccgccgggagcccgggagttcgggagccccggagtggcgccctcagtgcggcctgtgcggcccgggaggggctgttgccccggggcccagagagaggccggaggtgcgggactcggaccacggacccggtcgcctcttcccggccagccgggcggtgctggacgcgtgactctaggcgcgcacctgtgaggacgtgagctgtggattgacagccggacgccagcagtgcccacctggggtcgcccccaacctcctctcccacacttcgagccggcgtttgggtgaccgtgaaccaggagagacagctgtggcgggccgggagcggtggcttatgcctgtaatccctgcactctgggaggcctaggaggaaggacagctttgagcccaggagatggagaccagcctgggcaacatagctagacccctctctacaaaaaacaaaacaaaacaaaaaaaacacttaggtcggcgtggtggcacgcgcctgtagtcccagctactctggagggtgaggcgggagggtcacttgatcccgggaggttcacttgagccccggagtttgaagctacagtgagctatgattgagccattgcactccagtctgggtgacaaagcaagaccctgtcttaagaaaaaaaaaaaaaaatcccaaacaaaaaactcccacctgtgtcatcagctttttgtcagatgtccccaaatttacaaaaactgcccttttccctctccatcttctgtcagttggttgcatcattcaccaacttgggcacccgactgatggtctttgcgtcttttaaatttcagttgacagtcagcctttgttttttttgacccagtgcttaggatggtggttacgtgttcagcccactctgtcacctaccttgtgacttgggccagtcaattaatctctgtaaaaagtctgctgccttgctgtaaagggaacaatagatctttccattcagctgtttttggaaatgggcttagcttcacagtgcagtactgcacaaaatttcatggacatcggtagcattgttctcattaatatttaaacgtgttttgcttttaatctgtttcttgtccctttcctctgttttctggaatattgcctcacttttagcactaaaatgacgttttctgcatatgtcacaccgtaaagcccctgtggggaattgaatcttatctcaggtttgaacattgcctggaggctgtgcttagatatgggttgaaattgtgccactagcaaataaaaaatactctttcttgttagtaccatatatgtattatgtcacactgaatatgaatgactgttttctcaggtcccccaaggtactagttatgcaaataactagtaccacctccacataactgacactacccagacaaaaggggaagaagttcatgcattacatacaatgtatggcttagagcgttgggaattaacctgattgagaaagataactcaataaaatggcaaaaaattgaggggtgagctttttgtagtagtttccaaattggatcaattacatttaggatttaagtcagaatagaaattttggacatataaaaacatggagatgggaatgtctgattttcttggacagttttacttttgaacattttcatgactccgctggccttctgttaactacactaaccataactagtgattttcagcccttgcctacctgtgcaggccggagtaggagtggcctggtgctttcatggattctgtaactctgctctgtcactctgcacagtaagctttgcctacagatttggttagatattgctgcgtcatttcctagttttccagactagatgggatggccatgctctgcatccctgtagcctttaaatcacagttcctattctagttcgtatctttttcttattaggaaatgagactgtttagcatagcagcttgacctgaaatagtaaatttaatagttgttgggtttaagctgtgatgttgaaggtctacaggtggaaagcttgaccatttatttgtggttggctactgttattttgagatttaaaatatgatcaggttgatgatttggtggatatctcagtctgcttgggtctacttttgagggatacctcagtctacttgggctgaaataaggacacacctgaatctcatgcccatatgttgagatggatctcattctgtcacccaggctggagtgcagtggcgcgatctccgctcactgcaatctccacctcccaggttcaagtgattctcctcctttggcgtcctgagtagctgggattacaggcatgagccaccacgcctggctaatttttgtatttttagtagagacagggtttcaccaaagtgttggccaggctggtctcaaactcctgacctcaggtgatccgcccaccttggcctcccaaagtgctgggattacaggtgtgagccaccaagcctggcgtgttctcatatgttatacacttaaaatcaaatgcatgaatactgaatatgtgtgtttataattgaatgccctacaatcaattgataagtttaaccaaagacagtttatacaaattggcagtatcaagctttttgtctgtttaatgtacacattctatgcttggataaagtggacatactttttttttgagatggagttttgctcttgttgcccaggctagagtgcaatggcacgatctcggctccccgcaacttctgcctcccgggttcaaatgattctcctgccttagcctcccgagtagctgggattacaggcatgcaccaccatgcccggctaattttgtatttttagtagagacagggtttcttcatgttggtcaggctggtctccaattcccaaccttaggtgcctcagcctcccaaagtgctgggattacaggcgtgagccaccgcgcccggcctaagtggacatactttttaaccactatattgataattatgtttactgagggaggggcaaattctcccctaaattttcattcattatttagttcaataggtttttatcaagcagatttgaactgatatgcagcacagtggagcctgcctagttaccttcgttctgggtgatggtgaaagcctcctgcataccccgctcagatttcatctttttcttctctggctatatcctgtatgtgaaagccttttcaaatcaatttgctgtttttcttagagagatttcaggaaagaaaacgagagataactgggtatttctgatttgctaaccaatcttgattctaatcttctttttgaaaaactacaatcactcctgactggagtttacattccattaaagtatgtctgattgcgtctgcatatggtaaatgcctttccctgaaatagcttttctctctggatttaactgctgtgtgagcatccagagacttgcacacttcccagatctccgggagaggagcagggttgatttcactataaggaaggtgtaaagaaaaactgcctggtgccctgtgctgtgatggctgtagggaatgaaggaacagcccttcaggcttctgtgagtaaggagcttctgttggtgggtacgtacttctaggcctcctcatcttttttttttttttttttttttgagatagggtctcactctgtcacccaaggctggagtgcagtggcatgatctcatctcactgcaacctcgggctcccaggctcgagtgatcctcccacctcagcctcctgagtagctgggactacaggcacccacccccatgcccaactcatttttttggtatgttttttgtagagataaggtttcaccatgttggccagggtggtcttgaactcctgggctcaagcgatctgcccaccttggcctcccaaagtgctaggattacaggcgtgagccactgtgccggccagcctcctcatctttaaatgtacttcccggttagctactgtgtgctaagcagtgaggaatggcggggataggccccgtttcagaattcatggcttgaaaacagtggtctagagatattaaagctgtcctgagtcatcgatgggcttttgcaggtgcttaaacagtcacagctaaacaagaaacacacggttcctgcggcctgcagaggagcatcagataagcttatttccatgtcacttggaattataggggagggtatgtttcagagggggttgaaatttatggcagttgtggtatgaagtgacaatctcattatatttctttccctctatacagtccattgaagacttgaacaagtgggccctatttcttgtgtctccttttatacttgaagcagaacacatagcatttgtgacggagagcatttgggtacaaagtgagaatttacagagatcatcctcttcagaaacagtgagtaccatgtttacttgtgtcccataaggaactgatgtgtcttagtcaaaaccaaatttgctttttttttttttttcctgagacagagtcttgctctgtcacccaggctggagtgcagtggtgtgatctcggctcactgggacctccgcctcctgggttcaagtgattctcatgcctcagcctccagagtagctaggactacaggcgtgtgccaccacaccaggctaatttttgtatttttagtagagtcagggttttgccatgttggctaggctggtcttgaactcctgacctcaagtgatccacctgcctcggcctcccaaagtgctgggattacaggtgtgagccaccacgcccggcctcaaatttgtctttttatgagtgctctttcctagcctttgtggctccctttctctttggatattttgggttaaatatattagtaaaattattttcacctgtttctttttatgtttttaatgtggctgctagaaaaatttattgttattatttttcagacagggtcttattgtgtcacctaggctggagtacagtggtcattatagctcactgaagcctcaaactcagggctccagggatcctacctcctcagcctcccaaaatacttggattagagatgttagccaccacgcctggtcactgctaggaaagttaaaaccacgtgtgtggcttgtatttgtggctcacgttatatttttattgagcagcactctctctcaggtcatctcatccattcctacaatttcttgcttcctaaatcaacctgagtggctggggtatatcaccacctacgtcctaaacgtctttccttgagtattctgaaaatacttcaacctcagccacatgtccaaaatgagttgtgtttgtattcttctgcttcaaagagagaaaatcccaaattaacacgccagccggcttttcctcgcacctcctcctcgcttccgtgaagttatgagttgtaacagcactccctaaattgttagctcctctccttcatctccactgctcctcattccatcctcatgttcattatcttttgtctgagctgtgaaaataccctgtctcatgtcccttctttgggcattcctcttgatggccagagttagtcattctggacccacatccagttgggacagtgttgcataagcttttggtggatgtcatccctccaggtgcagtccatgccctgaggctcctggaggtctgaccccagtgtacccttgcagcttccttcccctcacttgtgggtcctcacccgccattgttccctgctatgtagatcatccagtggggattttgctgatgctagccatgtttactggattcccatttcatgaagattatctgtaagatgctgtattgagagaagaagaaaaatggggaagtaaacaagaagtaattgactggaattcagggtgaaccaaaataaggggaggcaggtgcagatagtataggatagcgagagactttctgatgggggccctggagcggg

SEQ ID NO: 97525 - DNA, 14134 bp, Homo sapiens
gtttgtgaggcaggtctgtggctcctgcaagttcttgttgagcagaatgatcatgtggggtggaaggagccacccagtgtcctaggggtcccagctagcccaggacaataaagactcacaggatgccaaagcaggaggggggcttggcgagcttttccccaacccctgggtttcacaggttaagaagccgagacccagagagacacagtgtctctccctgatccttcagcaagtgagtggctggtcacagcagccgctgcagcccccgctgccagtcctccaccctttggccacctcacaccatctgcaggcatcgtgttcaatagcaggtgaggtcactgaagcaggcattttgaaaggttagagactaattatgaccagagcattgtttcatgggtgtcttacatgggaaagaggtcttttaaaattatttgacttctgaaccacatttctccaaggagcactactaaatgaatttattttcatacttagttctgtaacaagcaaactgtgccatctgccaagttccactgtatcaagctgaagcttgttttctaacattgcagatgggacatgcattagaacagcagcagggagggcattcgggctctgtacaggcagtggtcgaactcccctcgttctttggttcttgaggcacagagtagcctcctggaggcagaggtgtccgcctccctggcctcacctgtcctgcagtaggttatagtttttgaagatcagtttctagaaatgaagtgatatatattgttcatgatcctaaaagataaataggtcactgctagcttgtactgtaatagtctagaataataacattgtgaagagcatggcagctgtaccatgaaagggtgaaagtgtgctgtttctgggtagaatccagtgaatgaggaatagatacgttatcagtccaataaatgagagatacgtcatcagttaaaaatgtaacaaatggtaacagtgtgaggtaatacatatgttaattagctagatttagtaatttcataatgtgtaggtacttcaaaacgtgttgtacatgacaaatacattcagttttatctgccaattaaatgagtaatatgcttctcttccttttcctctcaatcagcactgtggactattaagtctctcttttcttcagaattttattattaattatgatccttattctctttgctcaaattatcccagatttggtttgaaaagtaggctcccatctccttttgacagggcctcttggatctttgatcacttcctcactctctggcataataaggtattccaggcgtaaccttgtacccagctctggaatgagctgtttttatattttactttctacatttttagaaggaactctggttccttttagtggggaatggtatttagatacaaaggtctgggaacttcttcttctgagaatggcagatcaagatcttaccagacagatctcccacctccatccctcccacccccacatacagaaaataactatgaaaactgggtataattcagaaagcagctgcctgaagccattgagagtgagcagaagcaggcaagtttatggtgggagaacctcgttgggacaaggtgggtcttgagctgcactcttgagctgcaccaagtaagctcagggccaagggcaggtggtgcagtgagagggactcctagaagaaaagggctggagaggggatccccaaattctgtttatatacatctttgatcgctgaaccatacatgcatagaatagactcagatcacaataatgacaaaaaaatctgtgcttgctgccgaaagggtcagagtttgcagttcaggttcagctaattgccaaccaaaagaactaacagtcatccaagaaaaatcgcaaaatcccaaacctctacagtttaaccttcctcacatctgggatacaaagctaaaataaccaacatttgaagaaccaaggaaatagaatactgtctcaaatcaagaaaaagagaaatcaaatgaagttcaaccccaaggggaagcagatatggagagtcacacaaggttttccagtggctgttataactatactaaatggctgggtgccacggctcacgcctgtaatcccgacactttgggaagctggggtgggcatattgcttgagcccacctcagagtctgagaccagcctgggcaacacagggaaaccccatgtctacaaaaaatacaaaaattagctgggcatggtagtgtgcccttgtagtcccagctactggggaggctcaggtgggaggattgcttgggcccaggaggtcatggctgcagtgagccatgatcacaccactgcactccagcctgggtgacagagtaagaccttgtctcaaagcaaagcaaaacaaaactatcctaaatgaaataacatgatatatgctcactatgaatgaaaagataagatagctcagcagagaaatagaatgataaaaagaagaaccaaatggaaattctagaactgaaaatagttatctcaaataaaaatttactgagtggacttaacagctgaaggcagagagggggaaaatgacagaggaaaaagagaaaatggagcagaaaaaaatagtagaagaaataatagctaaaaaatttcagaattcagtgacaagtagaaatttacagatataagatcatatgctcaagaaacaccaataagaataaatatttaaaaatcccacgctggttcttgcaaacttttgaaaaccaaagttgaagagcaaatcttgaaagcaacaagagaaaagccatacagtaataatccagttaatggctgacttctcactggaaaccttgcagaccagaacggcatggaataacattttcaaggtactgaaagagaatcagaaaattctaacccagaatttttttttttttaagttgaggtctcgctctgttgcccaggttggagtgcagtggcatgatgtcggctcactgcaatctctgcctcctgggtttgagcagttctcctgcctcagcctcctgagtagctgggactacaggtgcgaaccaccacacccagctattttttgtctttttagtagagacagggtctcaccatgtggtccaagctagtcttgagctcctgccctcaagtgatccgcttgcctcagcctcccaaagtgctgggattacaggtgtgagccaccacgcctgccctaacccagaattttatatcttgtagaaatatccttctaagattgaagggaaataaaggcatttttcgataaaagaaaaaagaatttatcaccagcagacctgcactgtaagaaatgctgcaggaacttctttcagttaaagggaaataataccagttgggaactcaggtccttggaaaagagtaaagactactggactggtaaatatttggatcaacacaaaatactagttttctttctgcttttttcttcttaatttcattgttaatcatataagaattttaagcaaaaattataacactgtcttgcgaggcttataacatctatagatgagatacatgtaacagctgtaaggtaaagaccaggggtagatacggacctcgatggtgagaagagttctttattatagaggttgtacagtactgactgtaggcagactgtgaaaacttatatttctaacttgcagccaacttaaaaatgtaaataaatatgtgttaagccaatagaagaactgaaatggatattcaaataattttttaaagacaggaaatggggaacagaggaaaaaaatttgatttttttgactaaatgagtaaaaggaaatagttttttaaaattaggttgtaataatatgatgagctattcagtaaccatttaaccttgggtttttgaagaacatgagcatgggaaaatgctcccaatgttacattaagtgaaaaaagcaagatgctcagctagtgtagtatgacaacaattttttaaaatacaatgatatagtcacccatgtaacatagaaaaatgcatcaaagaaaatataccaaaatgtcttttggtaaagtcatgagtgacttaatgccttagtcttactttttttttttttattttctagattttctacaatgaacatgagttatcacaaaacttactttttagctattgccagagtcctaaagtggcacggtagtgtttcattttatacacttcactaagtttttctaatagtttttagctgattcttttagattttctaagtgaacagttgtgcaatgtgcccataatataacaattcagttatatattgagtcatgagacctgttaatgtctaactgtctgctttaatgaaggggagtgtccctgagaacattcaggcactgatcagtgcccagaccacagggactcccacctctggatgcgtccagccggatccacagaacagggtcgtggtgaggatgaaacgcggtgatgaacataaagtgccagactctgtacttgaccatcacatgctgtcactcagtgttagcggttattattgtgaggacgaacctctggcagcacatgtttctcagggcaggggacagagctgaacagtggcagcagccacaccaggcagtgggcggatcatcagaaaggatgagttattaacagtgggccccttagggtggtcagttctgagcagctgtgcctaagcatgaattctatctggcctgctttcctgattttaaaatccacacccgtatggagatgctctcgcttttgtgggccctgaatgaatgatgaacagtaataatgctgacatgtggcctagcatgtggcctccctccgtagcttctatcatttcaggaggctcgccttgggagaatcgggctccaggtttattccatgaataaagagtgtctctgtggtccacagcctttgttggtcctggtggtctctgtcctcaggttttcatgctcttgcgtaagcctctccccttgcaggtgggtcggacctactggatcacttctaacaaatcaaatatggcaaaagtaatgggatggcaactccttttttgcacttctgggtgacttctgtcttgcttgcttttcctcttctccctacccccagctctgagggaagcaagctgacgtgctatgagtagccccatggcaaaagattagcagctactggggcaccgaggcctgtggcagactacagatgaggttgggaagggacaaagtggaggcggagccacccccccaggcaagccttgagatgaccacagtgcccgctgacaccttgagtgcagccttgtgagagaccctgagctaaaggcatcctgctgagccaacccagactccaggcacacggaaatcgtgggtttcttaagttgtctcgggctgcttagttttgcgttcatttgttacacagcaatagataagtaatacgctctcttaaacaacttagagtctctgctgacttcccctacctcgtcccattcctcccacatttagtcttctgggaattgctctagtttcaccatgggacccttttatttttgaaatttttcatcaaggcaccaaatgccttttctgcccatttcttcatctttccatcttgcttctagcccggcaaccacttttttgctgtgcggtcaaaagatagcacactgaccgtcacctttcatttcacttggtttttttttcggaaacctcacctgcttctttcaaaagttgtagaaagatgtggcttcattgtgatctagagtccagagcagggactctcagcctgctttttgtctctgtcatatctcaaagatgatgtcacacagggaaccacactgtgggccagggcagtgaggtggcttctgaccacacacagttcccagtctcctagctccaagccctcccccttaccagctgtgtgtgttggcttcctgagatgaatggtggaaaaggctctggtcctgactgtgctgaactcaatggcgatacctctggactcgagcagcatgtcagtacagcttagccatgtgacccagaacatgtctgtctaccaagtttctgtatgtgggaggcctggacaatgacggccgcaatttccctctccttaaatagagcttcagggaaagaatccctctgtaagtgatagaagatgagcatttaatattttaaacctgagcggaatgattgtaccatttgcaaactgtaataggagccaccattgtccctgggcccatgaagagttatggagaaaagtaggtcatcacacctcctgaaaatatttgtcaattgaaaattagtttctcataaattacctctttattcttttaactcctacttcatgaagtggacgtctagtgatggacgcctctatgctgtccctgtggctagtggtctgttcacaccattcctggctacgttaggtgtccccagtgcagagaattaagtcatagtaaaagtatactctggattttaccaagaggtcacggagagcccctcttcccttggcagtcagcggcattcttattacacttcatttatctacttgggaggactcgggaggaccagctgggcccctgtctgcactcatcaagagttaatttctgagcgaggtgcagtggtcatgaacaagtgcagaaggtaccctggtggccctgccagacaagaggggcccttaattagcagccacgttcaatcaggctgcttaacctgccgcagagctggggaggtcatgtccttcctgccgccctgcctgtaaacacagcgcccggagccgggcccgggactccgtgcggcctgggaggaggaaggtacctggaagcaaggaagacagtgcagacccgaacctgacccacttccaggggatacctggactctgctgttactcttgatggagtagtgagggttaaccgagagagaaatttttttttctttaaaatttggaggcatcttttgtccttgccaacttcatatttcccaagctggacatcttactggcttgctttctttgctattaaaaaaagtattacttatgtcgtcatgtttctggcatcgcctagggctagccatgcactgagacctcttgctgtagtggaaagtcggaatccttcaccgattttgtagccttgcttaatctctccacaatgtcctttgctcagatacaaaacaaggatgattgtactggccctgccacctcatggagctgttaagagggaaccatggagagacagtttgtcaactgtcaaaccctgtgtcaaatatcagctgatagaattggacgccaggattggagtgcttttacttggctcattcattataggtagccaaggtccatttttattttaacagtcacatatagaataccaaaaacctgatgttgttggtagatgttttataccgttttagaaacgccatctactatggcagcagttagtaaatagcaaataaatacaagcacttgcccacgttctggccaggaaactcaaatcttaaatgccctttgaggaccacagagggtcagagagatggggatggcaggaggaggaagggataggagggttatttttagctccataggacatcttgcttagtcatgagacactccaggtgtttgcctggggaaacttcaggtgggctgtggcatttagtcagctacctaggtcatggtgggtaattctgggacaacctgctgtagggttcttgagcagcctcttcagtgtcctctggagaagctcagcttctgatggtatatggaggaacccagcggcttctgggatcccagcctatgagtaaytcgagttacttagcacagtggctcgaaattccttctggtgatcaaagaacccacaaaacagaataggaggcagcgccccatgcccttgtcagtgaggcagagtgtaacttgggagtttcagatgagtggcagttaccgtacctgctgggagcgttgcattgaacccagggaccagccaagaggaactaatggaccccgtggaagatcatttgagcctcagctacgggaagagctggatgcaggccggggaagcggattggtggactgcacattcatttaaggttgaaatgcttagcattgtaaaggtgactgtgaattttaagcttcattctttattgacctggcagatsggagagtgctgtgtcttggtgtaatgaagcattatgttggtacagtgaaaaggaaactgccttcctggctggaattcggtctccctaaaagctcatggtctggtgaggtggatggcttgggagtgaatgtgtgtatgtgtgtgtgcacagacgttgttcctgatggggaaattgagacccaattgcccatcaaattgcccgattctacctggtggtttcctgaaatggatgtttgatagcaaatccattcctgtattgcaggctttttttttttttcaataaaaaaacaaacaaaacaaaacaaaacactttggaagtttttttcaccttatgagtttttttttctttctttctacttctgctttggaaacatggaaatgattcatgtagagaaaaaaataattgaaattgaggaataaatcagttgcgggatacttcttacagccaaaacctgtcggggctctgagctctgtaagggaatgccaaaagcaagctgctgcctccagaagcctcgctgtgcgcctcgtgggcataaactggaaccttggcaataaacttctgcacacaaggtcgccctgtgcgagcgtttctggaatccagatttaatactgcatacaacaccttgttttgaaaagagaagatcactgctttcaatgttatggaagtctattccatgctgaacatcgaaatactgatgctctctaggcagagaccatggagaaggaagctggggacgttttgtcctccctgctgcctgcctgcaggagtggactcagctgagactgtgccatgagcctccttctcatcacaaaggccggcttgtcaatggaagaagatgtgccagacagccacttcacacccagctcagtgacgccttgggctttgtggacctagtagtgtgttctgacctgtcttcaaactccatccacccggttgtcaccatgacaatgagtattccacatgggtttcatgtctagttaaggggacagggttaggaactggaccctgatcgcccagagtttttcttcacatccataattttgatttaatcatgttcacccatatctacacccatctctttgacctctaaaataagaattagaagtcttattttgagattatcaggatattaacttctatttcagttttgaaacactccctgtactggctcatatatgactatggactggtgaaagcctgctctcaggctgttccgttgaattgtgtggggatcgtgccttttttatggaactacacaacactggatcccattgggagtgaaaaggtaaccctacttctgtcataaatctgttttatcacaggatctctgttcttcttgaagttcagtacgacgcaaagaaaagtggaaagggcttgagatttggatgcggaggtcagggaatgaagccttggctgtgccactcatctgcttggatgctaaatgacttctccaagccgcagtttcttcacctggaaaatggcaataacaatagcaacttttcaactttttttattgactaaattttctgaatgaataaataagacatagtgaaaagtgccgtgtaaacatctgtaaagtacaaggcagatgttaattgtccacggagagaatgtttatgacacagaaaacagtgattcccaaccctatttcatttttctcctgggcgcatagtcccctttcagttgggctggcgttgcctggacaaccaacagacagatggacatgaagtacgcttcttccaggcctggcccatgagattctcccactgtccctttccccttatgccgcaatcttggaggccttgtgggaaaatggcggcatcccaagttgcaagaggcctgtggccctcagtcactgcttggaggagagctgcctgactagccctggacttgggccactgcagttggacttgtttcagctaatgttagcctgcctcgatgaatcacaattttgaaagagaatattatttgctactgttagtgtataaaatagttgtattcttgtataccttatgtcatatacattatgaatattgttattaaagaatattatatatatcatattgctgctaaaattgcaaatgaaaataagatcaatgctgaatgcagtggctcacacctgtagtcccaatactttgggaggccaaggcatgaggattgcttgagaccaggagtttgagaccagcttgggcaacatagttagataactgtctctataaaagaaattaaaaaatttaaaaaaaaaaaagaaaggaaatcaatctgtttgcaatttttataaatagaacataactactcacagtgaagcaaattaatatctgaagttttgctaaatttttgtgcatcccttgactaggaaggaaagttaatagactctctgagatccattcatgctagaaacattaataataataaaaagatgaactgccactgattaagtacttactgtgcaccagacatgctatgccaaaagctttgtagacaggatgggcatgtgccttgcaatgagatggcagatgtggccttgatctatgtatttgttctttctttcaaattatttttattcctgttaaaattgaactatgagacagatgcctgtgtttttttccttttcttgattgtcataacctctccgattgttataatagaatgtggcacagatgatttgggctggagagctaattatgcatgataacctgatttctaaaatatcacaggatagaggcaactactaaaatcaatttctagcggtcagttgcaggttgaaaagttacttgcgtctctattgtgaactgggtgtgttttggctggcacgaatgacaagggtaatcattgagggggcattgacggcttaccagtgattgaccagtctggtctttaattttcctacataaatatgttcagctgcatatttatgtaggaaatacataaatttccggcatgtcccatgtcatcagcctcaggcatcccagaacaatgtccataatacaatctccattcaggcgaatgttgccatggatgacacagctacatatcacagccatggatgctttgtgatgaagccacttcagacttgtcatctcatctctttccttcaacacctctctccgcccctcaactaagtggagggaattaacactgtccacttagaaatggcagccaacactgaacttgctattcttggtgggttccataatacctgggcttgcgttgtgaagttttgtgagttaggctgttttaaggtaacagatgatggaaagagaatttttagttactgtcttttacttgaagtgaagcaaacattctgaagatgggagagaatatcgcgtagtattatagctgagccatagtccgtggaaccccatagcctgatgacctaggttcaagtcccagccctgccattttggtgggttttagtttccttaacctatgaagtgggagtaattctagtaccttcctgcctctgtttcctcactggtacaacggggttaataatagtgctgctccataggatgaataatttcccataaactgccaagagcggtaccggcagggagccaccctcagctttccttgtgactgttatcattcctgtgactgcatctgttccatacctgatggagagcttggtcacagagtctctgttttctcagctgattgttcaaatgactgctgtttctttgtgtctctttgttcaccaagtagttacggagtacccactgtgtgccaggagtgcattctaagtgtgcccacatctgtgtcttctgttttcagcatgaaaacatatgtttctgctgatccctgccagcatcaacaagtagtgcctcatccctcaggctctcaccatggtcctctttgatgatggagtggtggggtcaagctggccacagagtctgcggggtcatttgagctcacagtgatttgtccagaagttgttttcctgtgttttcagtgtctaatgttgatcacggttcataaatgtggaaatggtggaaatgggtcataggaaactcacaccaccctgattagaaagagggacggctggattttcctcacggggcttgcgtgtctaaatgtttacattttattcttattagttgtccacaaacaaccctatgattttggctagttactgaatttctatttttccaaatttgagaactgaggcttagaaaactggagcaactttctgagcctctgggctgaattcgggactctgatttgtagggtcaagttttcggctccttggaaatctggcagatccaaattggatggaactgtgttggacgttgttggcactgcttacagatgagagaggctggggagacccagcacttcgttaacacaggccgacgaaagtatgtgagtgagcatgcaggtggggtgttcaggccgcagccccttcccttctctatgtctgtgtcctacagagtgtcccttagtcccctgccttaagaatcatctctaaattgatggtttccaaggtggtatctctgatctcttccctcacctccagattctcacatttatttgctgcctggatatataaataaactgtagttcaactcagatataatttttacatatccaggagacatcttaaaattaacttgccctagtattcaagactatgcgtgttggtgtaaggatagagatatacagatgaatggaacagggtaagtgtccagaagtagactcacctgtgtgtggccagttgatgtttgataaaagtgccaaggtcattcagtggagaaaagatagccatttcaataaatggtacttgaaccattgaatatctgcctgcataggaaaaaaatctcaactgttacatgacaccatatggaaaaattaagtcaaaacggatcatagacctaaatttagttgcaaaaactgttaagcttctcagagaatatatttgtgacattggagtagggaaagatttcttaaatgagacacaaaaagcatgaactataaaagaaaaaatgattaaaatggactttgatctaaaaaaacttcttttttttataaaacacagtttaaaaatggaaaaggtaagccacagactgggagaaaatatttgcaagacatatatctgacaaaggacatatagccagaatatataaagaaccttacgactcaatattaagacaactcaatttttttaaaaggcaaaaatttgaaaagacacttcagcaaagaaaatttataaattcctaaaggcacatgagaaaatgctcagtgtcaccagtcttcagagaaatgcaaattaacactatgataagataccacttcacatgcattagtagggctgaacttaaaaaagactgacaataccaaatgttgacaagaatgtggagaaactggaactctcatgtgttactggtgggaatgcagaatgataacagccacttttgaaaacagtctggaatttatcttgggtaaatccctaggaatggcattactggatgatacatagtgagcagatcaatcagtcagtcaatcagttgatagatggatgcctttccaagataaatgaaaacatttgtccatacaaagactgtatgtagatattcatagcagctttatttgaataaccccaaactggaaacaacataaatagtcatcatttggtgaacggataaacaaattactagaatacaactaggaatccaagcaatataaaagaacaaaatattaatttgtgtgacagcatgggtgaatcttgaaaatattatgctaagtgaaaattcatagtcctcacctccctggaagccctgtgtgattgcctcccttcctcccccaaatacctgcacacacacatacacacactgtgcacacacttcatccagtggtctgggcctcctcgttgggcctcaggtcaagcacacgctactacctccatcctttgtgtttactcttctccctgcccggatcgttccttgccaaggtagcttcccgagtctctcacttccttcaagtctctgctcacgtgttagcttatcagagagggcttctccccaccatccttagctctcactacttcttctc

SEQ ID NO: 97526 - DNA, 13174 bp, Homo sapiens
accaatggaacagaacagagccctcagaaataataccatacatttacaaccatctgatctttgacaaacctgacaaaaacaagaaatggggaaaggattccctatttaataaatggtgctgggaaaactggctagccatatgtagaaagctgaaactggatcccttccttacaccttatacaaaaattaactcaagatggattaaagacttaaatgttagacctaacaccataaaaaccctagaagaaaacctaggcaataccattcaggacataggcatggacttcatgtctaaaacaccaaaagcaatggcaacaaaagccaaaattgacaaatgggatctaattaaactaaagagcttctgcacagcaaaagaaactaccatcagagtgaacaggcaacctacaggatgggagaaaatttttgcaatctactcatctgacaaagggctaatattgagaatctacaaagaactcaaacaaatttacaagaaaaaaacaaccccatcaacaagtgggcgaacgatatgaacagacacttctcaaaagaagacatttatgcagccaaaagacacagaaaaaaatgctcatcatcactggccatcagagaaatgcaaatcaaaaccacaatgagataccacctcacaccagttagaatggtgattattaaaaagtcaggaaataacaggtgctggagaggttgtggagaaataggaacacttttaaattgttggtgggactgtaaacttgttaaaccattgtagaagacagtgtggcaattcctcaagtatctagaacttaaaataccatttgatccagccatcccattactgggtatatacccaaaggattataaatcatgttgctgtaaaggcacatgcgcatgtatgtttattgtggcactattcacaatagcaaagacttggaaccaacccaaatgtccatcaatgatagactagattaagaaaatgtggcacatatacaccatggaatactatgcaaccataaaaaaagatgagttcatgtcctttgtagggacatggatgaagctggaaaccatcattctcagcaaactatcgcaagaacaaaaaaccaaacagcgcatgttctcactcataggtgggaattgaacaatgagaacacttggacacaggcaggggaacatcacactctggggcctgttgtggggtgggtggaggggggagagaaagcattaggagatatacctaatgtaaatgacgagttaatgggtgcagcacaccaacatggctcatgcatacatatgtaaaaaacctgcacactgtgcacacgtatcctagaacttaaataataataaaaaaagaaaaaatgttctgcaccgttaaacaccaaggaaatgaaaataaaaccacaatgagatatcacctcatgcttcctagaatggctactatcaaaaagacaaaagtgttgacaagaatgtggagaaaatggtacacttctacactattggtgggaatctaaattagtatagctgttatgaaaaccagtatggaagttcctcaaaaaattaaaaataaaactaccatatgatccagtaattttactactgggtatacatatccaaagaaaatgaaatcagtatgttgaaaagatacctacactcccatgttcactgctgcattattcacaatagccaagatatggaatcaatctaaatgtccatcagtagatgaatggataaaggaaatgtggtatatgaacacaacagagtactattcagcctgtattaaaaaaaaaagaaaccctgacatttctaacaacatggatgaaactggaggatatgatgttaagcgaaataagcaaggcatagaaagacaaatactacatgatcccactcacatgtagaatctaaaaaagacaaactcacagaagcagagagtagaacgggttgaagggggagttggagggatgagctggagagatgttggtcaagggacacaaaaatttcagttacataggagtgataagttaaaaagaaacactgtataacagtgtattgtatagttaaaaattgctaagagattttttaagtgttctcaccacaaaaacgttaagtacgtgaggtaatgcatttattagtctgattgacccattctacaatgtatacacatatgaaaacataatgtacagcatatatacaattttctttttttatatatatattttgtattatactttaagttctagggtacatgtgcacaacgtgcaggtgacatatgtatacatgtgacacgctggtgtgctgcacccattaactcgtcatttacattaggtatatctcctaatgctatccctcctccctccccccaccccatgacaggcaccggtgtgtgatgttccccttcctgtgtccaactgttctcattgttcaattcccacctatgagtgagaacatgcggtgttcggttttttgtccttgtgatagtttgctgagaatgatggtttccagcttcatccatgtccttacaaaggacatgaactcatcattttttatggctgcatagtattccatggtgtatatgtgccacattttcttaatccagtctatcattgatggacatctgggttggttccaagtctttgctattgtgaatagtgccgcaataaacagacgtgtgcatgtgtctttatagcagcatgatttataatcctttgggtatatacccagtaatgggatggctgggtcaaatggtatttctagttctagatccctgaggaatcgccacactgtcttccacaatggttgaactagtttacactcccaccaacagtgtaaaagtgttcctatttctccacaacctctccagcacctgttatttcctgactttttaatgatcaccattctaactggtgtgagatggtatctcattgtggttttgatttgcatttctctgatggccagtgatgatgagcattttttcatgtgtcttttggctgcataaatgtcttcttttgagaagtgtctgttcatatcatttgcccacttgttgatggggttgtttttttcttgtaaatttgtttgagttctttgtagattctcaatattagccctttgtctgatgagtagattgcaaaaattttctcccattctgtaggttgcctgttcactctgatggtagtttcttttgctgtgcagaagctctttagtttaattagatcccatttgtcaattttggcttttgttgccattgcttttggtgtttcagacatgaagtccttgcccatgcctatgtcctgaatggtactgcctaggttttcttctagggtttttatggttttaggtctaacatttaagtctttaatccatcttgaattagtttttgcataaggtgtaaggaagggatccagtttcagctttttacatatggctagccagttttcccagaaccatttattaaatagggaatcctttccccatttcttgtttttgtcaggtttgtcaaagatcagatggttgtagatgtgtggtattatttctgagggctctgttctgttccattggtctatatctctgttttggtcccagtaccatgctgttttggttactgtagccttgtagtatagtttgaagtcaggtagcctgatgcctcccgctttgttcttttggcttaggattgacttggcaatgccagctcttttttggttccatatgaactttaaagtagttttttccaattctgtgaagaaagtcattggtagcttgatggggatggcattgaatctataaattaccttgggcagtatagccattttcacgatattgattcttcctatccatgagcatggaatgttcttccatttgtgtcctcttttatttcattgagcagtggtttgtagttctccttgaagaggtccttcacagcccttgtaagttggattcctaggtattttataaaatatgtacaattttcatgtcacttaaaaaatcattaaataagaagtattaaaactataatccaagacaattttctagaaataaaggaagacttgaatttacatactgaaagggtccactgggtaccagtgaaaacctgtaatgatcaacttcaacacatatccttagaaaactaatagactttaaaggtaaagaaaaaaatcctcatggtcactgtacaaaaaccaaataccttataatggcaggagagttcaattgtcatcagacttctcaaaaaacaatatgaagtaagggaatcatggaaaagcattttttttaactcaaagaaataacatttgtttttgttgttttttgtttttttttttttgagacggagtctcgctctgtcacccaggctggagtgcagtggcacaatcttggttcactgcaagctccgcctcccaggttcatgccattctcctgcctcagcctcctgcatagctgggactacaggtgcctgccaccgcgcccggctactttttttgtattttcagtagagacggggtttcaccttgttagccaggatggtctcgatctcctgacctcgtgatctgcccacctcagcctcccaaagttctgggattacaggcgtgagccaccgtgcccgaccagaaataacatttgaatccaagatttaaatactatcaagcagccccctgaagcctaaaggccataaaaaatttacaaagtaagcagttttaaacatgcaaaatctgcaacataagcccttcttaaggaatcaacctattcaaagatgaacttcatccaaacaatagactagtgggaggacttgaggaaaaagacagtgatcatttattatatttaattatagatctagaaaagttagagatggggttgaagaataagaagatatgatacatgctgtgtgttatgaatgtatattctgagagtgctatgatttggacatggtttgtccccatgaaatctcatgttgaaatttatttatatatttttttaattttcaatagctttaggggtacaagtagtttttgttacacagataaattttatagtggtgaaatctgagcttttagtgtacccatcacccaaatagtgtacagtgtacccaacaggtgattttttaatcccttaccaccctccccctttctgagtctccgatgtccattacagcattctgtatgctgttatttatccacaaggttagtccccccttgtgagaacatatggtacttggttttctgttcctgagttactttacttaggataatgatccccagttctatccaaggagctgcgaagacattatttcattctttttaagggtgagtagtattccactgtgtctatatgtttacatcatatatatataacattttctttatccactcattggtttgatggactcttaggttgattccgtatcttttccatggtgaattctactatgataaacatactagtgcaggtatctttttgatataatgacatattttcctttgggcagatatcagtagtgagactgctgaactgaatggtagatctgttagttctttgataaatttccatactgttttccacagaggttgaactaatttacattctcaccaacagtgtataagtgttccctgtctgcgccaacatctattgttttttgacttcttaatggccattctgactagggcaaagtggtatcttactgcagttttaatttgcatttctgtgatgactagtgatgttgagcatttttcatatgtttgttagtcttttgtgtatcttcttttgagaaatgtctgttcatgttgtttgtctactttttaagggattatttattttcttgctaatttcagttccttgtagattacggacattagtcctttgtcagatgtatagtttacaaatattttctcccattctgtaggttctctgtttactctgcagattatctcttttgctgtacaaagcttttcagtttgagtcccatttatttatttttgttgcatttgctctgtctcttactaataaattctctgcctacgccaatatccagaatttttcctagggcttcttctaaaattgttatggtttcaggtcttacatttgacccttttcctgttttcaaaaaaaggtgtggcttgctgccagcgctcatttaattttacataaacacgttctttgaggctgaagcaaatctgactgatagtcartgtgaaaataaaatataaaaactgttcttggagttatttctraacagaactaacattagaattgtctgaatcatcagaataatctatttcagaaaaactgaattcatgaaactaatccttggccaacaacttttcatgaacaatgttagcatcatgtgtaggaatgctgttttctaagatttgacattttcagtggytgagattttattttgtaagtggaaataccgctactaaaaatggagtgctataaataggataatgtcttttgtttccaaagttgatatactagagcaatgcaaamataataatcatagggtgctattttgtggcaaatttactttggggtaaatgatgcagccgcaagtgccactggcgagtattctcagagcaaatggggaaagggttaagtctttaatccatcttgagtaaatttttgtagacggtgagagatagggaaccagtttcattcttctgtgtatggctatccaattttccagcaccactgaatgaatagkgtgtcctttcccccattgtatgtttcagtctgctttgtcaaagatcagttggttgtagttatttggctttatatctgggttctctattctgtttcattggtatatgtgtctatttttataccagttgtcatactgtgttgattactgtagccttgcagtataacttaaagatagctaatgtgatgcccccagatttcttttgtttgctcaggactgcttttgctattcaggatttttggttttatttgaatttaggattttcttttctaattctgagaaaaatggtgtttttggcaggatatgatggcacacacctgtagttccagctgcttgggaggctaaggcaggaggctgaggctgaagtaagccaagattgcacaactgcactccagactgggtgacagagtaagatggaaaggaaagggaaagggaaagggaaatggaaggaagaagagatagagaaagagagmgagagagagagagagaaatagagaaagaaaaagagagagaaaaaaagaaagaaaaaggaaaagaaaagaaagaaaaagaaagaaagaaagaaagaaagaaagaaagaaagaaagaaagaaagaaagaaagaaagaaagaaagaaagaaaggtaggcaggcattggtggtattttgataggaactctactgaatctgtagattgttttgggcagtatggtcattttcacaatattgattcttttaattcatgaacataggaggttttctatttgtttgtatcatctatggtttctttcatcagtgttttgcagttctatgtgtagagatctttcacctctttggttaagtatattcctagggtttttttttttcctttttttgcaacaattgtaaatgggactgagttcttgatttgattctgcttggtcattattggtatatagcagtagtactgatgtgtgtatggtgattttgtaacctgacactttacagattcatttatccaatctaggagattttggaggagtctttagaattttcaaggtataagatcacatcatcagcaaacagagatagcttgatttctcttttctaacttagatgccctttatttcttctcttgcctgactgttctagctagaacttccagtactacgttgaataaaagtggcagaagtgggcattcttgtcttgttccagttcttaggaagaatgctttcagtttttcctcattcagtatgttggctgtgagtttgtcatatatggcttttattattttaaggtatgttctttctgtgcctagtttgttgaggagttttatcatgaagggatgctcaattttatcaaatgctttttcttcatctactgaaatgatttttttttgtttttaattatatttatgtggtgaatcacatttgttgatttgcatatgtcaaatcatccttgcattcctggtatgaaacccacttgatgctgaattatcttgttgatatactgctgaatctggtttgctagaattttgttgaggatttttgcacctatgttcattaggaatattggtctgcagttttccttgtttgttgtgtcttttcctggctttggtattagggtgatactgggttcatagaaagaattagggaggattccctctttctccatcttttagaatagtttcagtagaattggcatcagttcttctttccatgtctggtaaaattcagctgtgaatccatctggtcctgggcattcgttgttgttgttgttgtcattgggagattttttattactgattcaatctcactacttattacttggtccattcaggatttctgtttcttcctgattcaaatttgtgggattgtgtgtttctaggaatttatccatttcctctagactttctagtttgtgtgcacagacatattcacagtagtcttagatcattttttccagtgttctacacattcagagaaactttctaataataaactacagaagtgatctctgaaagtatagtcttcatgttgaagtttaactgccagcatgacagtattggaaagtggggcctaatgggagttgtttgggtcatggggccagatctcttataaattgattaatgccatctcacgggagtgagttctcactctaacaggactggattagttaccatgacagtgggttgttataaagcaagtcagcctcctcggtcccctctctctctgcacaagcccctttcccttccagtttcctccatgagttgaagcagcacaaaacctttatcagatgagctgtccactcttgcactttccagccaccagaattatgaaccaaataaacctcttttctttataaaacatccagcttcagttattctgtcgtagccacactaaacagaataaaactgaggaaactgggtacagaaggaaggggaaagaagtctagttcattgaatgttttataggcaataggtagaaaataaagaataccattaaaaatggacaaatcggatagtaaatgattaagacaatagggaccacaggcattttaaaaagtataaattgaaaagcagcacctagaacaaaactataaaccttaccaaacacgaaaagacacttaaaaaaaaccagaaggacagaaaacaatgtagaaaaaatgaacacaacaaatataatatacataactttgaaagatatggaagagttaaaatgtatcagttataaataaatgcaaatggatttaacttagacattaaaaatatttgcaatttggctcataaagacccaaaaatatgcaatattcaagaaagacacccaaaacaaagtgattcagaaaggctaaaaataaagtgatgggcacagacagacacagcaggataatgaaaacaataaggaattaataggagggtatgtgtgtgatactggtgtcaaacaaaggagaattcaaactaaaaagtaatatatgatgggtaggaaacctttaaatgtgagaagtcataatttaaaatggagatattagaattatgaatatctagtcgacacagcacagcaactttataaaagcaaaacctccaggagacagcaaagaaagagaaagaaccacaccaaataggagatcaaacagataaaataagtatatagaagacagaaacagcaaaataaagacagatttttaaatgcatatcaaactttttacagtagagagtaaaccttctcaagtatatatagaatattcacaaaaaaactggtcatacattagcttataaagtagaaattttacaatgctctctgactataatgcaatagaattatacattattagcaataacaaagaaaggtccttccaattagaaataaacctgttaaacaattattgggtaaaagaaaaacataaaccaaagtttaaaaattcctaaaaaatgatataattgacccatattaatcagtgatatcattcttaaggatgtgatcaaagtaaaattcataggcttagatatttttatcaataaaaatgaaagaaaaagtgaattaaatgcctagctaaaactagcagttaacaaagtaaaaaaaaaattttaaatcatgaaaatagagattaataatgtagacaacagaaaaacaatagttctaataaatcaagattcattttttggaaaaatttaacagaataggcatgcccctagctaatttaatgaaaaaagagggtgggaagcataaatatgtaaaataagaaatgacaggaggtaaataactattggaaaaacactgaaataaccatgttaataactgtaagattctattttacagacatcatggccaatatattagatcacctaggtgaatgggtaatttaccaggcaagtaccgtttattacaattggacccattagaggtagaaagctcaaacagaccaatttcctgagaagaaacagagaacgtcattaaggaagcatcctatcaaaaacgcaccaggctaaaatagcttcacagagtgaaaccttcaaaaactagattgttcaaattctctgtaaatttttccagagaactaaaaagaaaggaaaacttcatatttctttttatttgtatgtatagtatcaatacctaagcctgataaagaaaatgcaaagtaaattacaaattaatatcacaccaatatttatgcaaaaatactaataaaatattaggaaacataatccaatgccacattaaaagaatgtcacatcataaccaagagatacttattccaacaatgcacagttatttcaatattagggaacccattaatataatacactataccaatagatttaggtagaaaaaccatatcattacctccatagatgctaaaaaagcttttcaacaaaattcaatagtctttcttgataacaacacttaatggaaatcagtggatacttcctattatggaccagatactggtacgccccccaaaattaattgctgttgaagtcccaactcttaatatgactagagttggagttaggctctttagagaggtaattaaaattaaatggttttagttttcctaaggtggggcgctgatccaacaggattagtgtacttataagaagagacataagagaacctgctgtttctctctcctcatccctccaacctcgtcatgtgaggacacaggaagaaggtggccatctacaagccaggaagagagccctcaccagaaactgaattgcttggcatcttgatgtgggacttctagcctccaaaactctgagaaagtaaactgctgtttttttaagccactcggtctatagattttgttacggcaacctgagctcagacactttaaatttccactaagataaggaacccggaaaggatgctcactctctccactactgtttaacgtagtcctggactggaggtgttagccaatacaattagataaaagaatcaaccataggcataagaaatggaaaaaaaggaagtagaactatctctatctgcagatgtgattgtgtatctgaaaatccctagaaagtgaatgataaaactaactgaaataattttaaaaactcagtaaaatagcagaaaaaaatcaacatacagaaatacaatctcacataattaggaacccgttacaggatataacagcaaaacaaaaacacctccatctccattgcaacaaagcagataagatgttaaggattaagtttaacaaaaaatgtgtaaaccctacatgagaaagagtttaaaacaatccttaaagacaacaaaagtagatgtgaagaaaggagaaaaaaaaagagctcttggttttgaacttaagataactcaacatcataaagttaatttataaacagcataatgtcaataaaaacaccaacgagcttttttgtggagttagataagctgatactaaacttcacatggataaacaaacaggaaggaagacccaggaaaacactaaaaatgaacgtttctgaaaggagactaagccctatcaggcattaacacataccataaagcctctgaaagcctttacaaaacagtcacattctggtatgtggatagatacatctgtggagtgcaacccaaagtccagaaatagacccaagcacatacagaactgcagtatatgataaaggcagtatttcaaaccactgggacaaagataaacttttaaatgcatggtgatggggcaagtggttagtcatatggaaaacacaatgagatctatacttcatgccatacaaaagaaaaaaaccccgatgtaccagggatctaaatataaaaaatgaaatcatataatcccactatgaaaaaaatgggtaaatttatctttagttgggatataggaagaagctttctaactaggacttagaatctagatgcaatttaaaaaaagactaatgaatctaactataaatacatttttaaaagtttgcatggttgaaaaaaagtaacataaacaaagtcaaaagacaactgacaaattaggagaaattatttgtagcatataccactattatgtttatagactaatatccctaaaagataatgagaagtcctaaaacctgagagaaacaaagaccaataaaacttgacagatgggcaaatggtgtgtgcctgtcgtcccagctactcagggggctgaggtgagatgattgcttgagcccaggggtttgaggccagcctgagcaatatagaaagacctgtctttaaaaataaaaaaaaacttgacagaaaaacgggcaaaagacaggaagagataaaaagtaaaaaaaaaaaaaaaaaaaaaaggccgtcaacatatgggaaaaaacagttcaatttcactcatagtaagagaaatgcaaattacaactatactgagcactatttatcattatcaattggcaaaacttaaaagatatgacaacacactttgttgggaaggctgtggaaaacaagcatttttatgctatggaaatgcaaactggtataacttccaatttagcaatgtctaacaaagtatataatttaccttttgactcagcaatcacttcaggaatctacacca

SEQ ID NO: 97527 - DNA, 14152 bp, Homo sapiens
ccccccttttctggctagcacttgttcatctattcagcaggcacttacgaagcaccacgaatgtgacaggcaggtgtggggccaggctctgtgaggagtgaaggggggtctgcccttgacgggctcatggtcttgcaggaaggtggaccagtgactgtgtagatctgagaagcgggaaagggactaggaaaggaaaactgcaccttcccaggacagagcaggcagcaggagcatttcccaggggcacagagtagcacggcggtttggagatgccgcggggagctgaatggtatggtcaagtgtggcaccagctgccagaccctgggaccctgggactctgggaccctcggaagcagacccaagagttgagctgccctcctctgggagatgcatggggtctactggatgtgaagcaggagagtagggagggacatggccggacggatgctttggaaagaccatgggggcagcacatggagaagacagttggaggactgagccgtggacagggagaccagcaagggggttgtttgcacatccagaaaaggacagggcctaaaccagtgcagggtgttggggcaggagccagggataaactggccctgtgacagcaaacctgcagggtgtggttgaccaacatcactgactggacccagaggccgagggcagagggggcaagggtaacttgaggtttctgctgctatctgataccttttgccaacactaggcattgccttccttttgtcttaggttggcatcaacaaagtctttgcagaggtgctgccttcgcacaaggtggccaaggtccaggagctccagaataaagggaagaaagtcgccatggtgggggatggggtcaatgactccccggccttggcccaggcagacatgggtgtggccattggcaccggcacggatgtggccatcgaggcagccgacgtcgtccttatcagagtgagcgtggctgcagccaggctgtgggtgctgggagggcaatgggcagaccccttcctcactgtgtgctcctctccatcagaatgatttgctggatgtggtggctagcattcacctttccaagaggactgtccgaaggatacgcatcaacctggtcctggcactgatttataacctggttgggatacccattgcagcaggtaggcagctcttacccactgtgctccagctgcgcccagaaaggcttctgtctcccaggttcctgctggggttagtgagtggctcactcactggctggctagaggcgttttagaaaggctgtttttttttttttttcatgtcccctgctttatatgtctttaaatgagaaactgtggagaggacctgaaaccttcattcactctggtcctttctaaaaagctagtggagatgcttggctgtattttctgatccctattttattgtggccttattttctgagccatttgttaagtcatatagtctgagaaataatcattagtaagaattatggggcatctgctacatgctaggcacaattattggtgtttcagaaccttatcctgaacattaatcctgcccaagtttcactctgagttacacaaatgatcatggaaagaaatggctctttgaccaggcatggtggctcatgcctgtaattccagcactttgggaggctgaggcaggagggtcatttgagctcaggggttcaagactcacctgggcaacatggtgagactccatctctacaaaaaattttaaagttagctgggcgtggtagcgtacaccttagtcccatctgggagtacagaggctggggcagaaggatttattgagcccaggagttggaggtggcagtgacccatgatcgcaccactgtactgtagcctgggcaagagtgaaaccctatctcagaaaaaaagaaaaagaaaagaaatagatttttctgctttgtaattccccctcattccccctccttaagaaccatctctcccccgccccctgctccctgccccctgcccccaggaacatggcaatgaaaagttccagagtgctcctccatgggctgaggagagatcaagtttgtaatcacagcattcctgcctcagtctcccttgtgtctgagtggttagtggtgacttgtgtaacagggccttggcttcctgagcccagtgagtcaggcaggtttacttcttgtccccagagccggctcaggagcttaattcccccagtgtatgtgcctctgccacacaaagttgaccatacctgtctcctgaccctgtcctgggacctggctctcattcctcttctaaagatgtcatgaagccctggaggcgagatcatctgctagagaaggactgtggccctcagccgtgtttgtcctctgtgggactgtggctacaggatgggcaactggctccctcagctcctgccgcttttctcctcccgctcctcccactccttgtggtttgtcgctgccctggagctcgccctgaaatgggatgccacctgtgggtggttctgggaacatcagggcgagtggaagagagccaggcccactcaacagcatcccacacccagctttctaggaagcctcactttggggggggcctgtgggcaagatccattggcaggggcttctgagcacgccaggtggagacctcactgggggccgctgagggtggggcagcccggtgcctgaagccctctcctggctcctctccccagacctaggtgtgagtgcgagttctttcttccccaggtgtcttcatgcccatcggcattgtgctgcagccctggatgggctcagcggccatggcagcctcctctgtgtctgtggtgctctcatccctgcagctcaagtggtgagtcccctcaggtggagcatctgtgggaggctcccaggaggccttgtcattctgcatgcttagcacagtggaacttgcctctcatttcccattcattcacctgggacaaatgctgcagtggcagcccacatggagcctggtgtgcatgcatgtaacttatcagcaccatgagcaggcaattcactgctgcccattcacgtgctgggctgcccttactctgctcctcaagggctgtttatgtgaacatcaagcagacatgggtccctgtgtatgatctatcacttttttatttaaaaaagatgttcacttatttatgagtgcattcatttaacaaaagttagtggcagcctacaatgtgcaaggcatttgcttaggaagtttctaaatcaggtgagctttcctggaaccatagggagtttaatgtccttttccttggaaactcttgaggttttgatactgaatgttattaaaagatggatgagaggccttcaccaggcttagaaaaaaaaaaagccttgtttctagaatggctcagatgctgttgcgttcctgctttccagctataagaagcctgacctggagaggtatgaggcacaggcgcatggccacatgaagcccctgacggcatcccaggtcagtgtgcacataggcatggatgacaggtggcgggactcccccagggccacaccatgggaccaggtcagctatgtcagccaggtgtcgctgtcctccctgacgtccgacaagccatctcggcacagcgctgcagcagacgatgatggggacaagtggtctctgctcctgaatggcagggatgaggagcagtacatctgatgacttcaggcaggcgggccggggcagggacttgcctccactcaccacaagctgagcaggacagccagcagcaggatgggctgagctagcctccagctttggggacttccgctccctggatatgtccagtcatcctgccctgcagcacgcggccttgtctgggtgcagctgggcttggcctggagaggacggccctgcctgcctcttggcctcacgggaccgtcagcatgggctttgtcttggactctagtccttggctggactgtagaaggtgagaggcgagtcaccctcctcacagacctctgcttggagtatttaggatgactgctgtgaaatggagaacagtttcatcaggaccaaaaaacctcactgggcctttccagagaactgcagacctcactgtcagggtctttctgatgacgcctgtctgtgtgcatcatgtttctgagaccacagtttacctcaggtgtgcctgttgctttcttcctgcatagtctgttcctttcttcgtacatagtctgttccttttctctcctgtgtgcttgtcagtggggacccctcgcaaccctgcctgtcacctgggagggtgggaccaatgtccttgtggtctttgctgctgctctcaggcgcttctccaatgctctggagtgtgcatttcagcttgaacctgcttcctggctcacacatccccagccagggagcttgccacactcttcttcaagttgaggagagttcttttttgcttaaagcccccttctccatggagtgttggcttctcaatagagtgttgttgctgaccagctggagtgagggcctcagagcctgacctgagagtccgtactcggcttcctgtggggtgtaggttctcgcgattcaggacgtccttccatatccctgcccagcctgtggtgcttgaaacgtttgccccatgggaaacgtatgtgtgcaggagcctccctgcacggcccaaggggcttcgttttcagtcttctgactgtcacctcgtggggttcagtagagaattcatgtgactagcgcctggccttgtgtggcttggaggaaatggtactgcccaaataggaggaaaacacagcctccctgagcctgcattctgcacgctgcccaggggcttcagaaaaggagtggccacagcaccccgaagggagcatctgtttacctggcagtggctctcagagcagcagaacgggttcagttttagactctgaagttggttgtgattgacagaaccctttgggagcaaactagtagagttggattaaattctgggtgaaacccttttctcccacacaaaatagttttagtgatttttttcattgtccattacttgccaggggcagttttagcagcacttttgatagattacgtctaatcctcccaaccaaccagcagggtagctattactgtccacattttacaggcaaggaaacaggctccaagaggctgaggactttgcccaggatgacatagccaatggacaagcagtgtctgtcagctgtgaaggcttcactcttattgtccttctaccttgaatagaagttttcctgataagaataaacgaggaaaaggtccttgcctcctggaagaacaaatctaccaggtgatctattcattgtttcaactcagaatgcacttgattcaggaggtcatctgaccttcaccttggatggttagtttcactttttacatatagtttttgcagggttttattttataaaatccaagcgcgctgttgattgtgttttccttgttttcagcccccccactccagcccgcagcacatttccgctgtccgtcagtaattgtgtcctctctttatgcttgcttggggaatgttgttttctgactaggctgatcattatctaaagaatctaattctgttgatttttaaaacttttaggaccataaacgttgtgttcatatatggacatggaaatatttatataattttatagaaaataaccttttagatggtcaaagtgtaaggagtttttttgtcagataatcatttctacttcaaaaacatttcatgcaatattagaataaagttcctgtcattcctctaaaaatctgcctgtgagtgagatgcgtggtcagaggccagtgccgtcttgtcttcacgagggcttctgtgaggcactggcttggcttcatgtctttttagggggcagaggaggataggattttaacagtagggggaatgagggtgggcagagcccccttgatctgccatccccagcactggtgtgagtccctttctctaatgcaggcctgcctcagcggcgtgtggggagaacgctgaaaggcagctcctgtcaaagtccctgccccgctggatcggacacaggcttaaattaccgcatcgtttgcacccctctgttctagggtgagtgtctgcaaaaggctgttctcaaacacatctcaatcaggagggatatgttttgggttccttggccttgagggagtgagtcaggaggaggagcagaaaaatcttgactagtrggctctgctgggaaagctctgtgggcatcttggggtggccggggggtgtaagtgagccacacctgaagggagttgacagtgtaatcttcacccacaccaggacacttcaaagagtggaaggaggcactatgaatagttatgccaggacaactggcctaaaccgggactatccaggcaaactgggacatatactcaccttccttcaaagggaaatagacattgtgacatctccattgacacagactacgtactttagaaccttgcctgatcataggttccagagacatgctggtggcatagtccgttatcatatttcaaggttcycccccatatccacgtcttggtacctacacatctctgtagaatcattgaggtgattatctcatggctcattgtgactgcatagctagatggccagccccgccctccagcataccctggaggacttcatgccatgcgtgcttgactgtttttccggatgcctgggtacagaaatttcatgttgtgtgcatgtcccattgtgaaaagtgagggtgataccaccttaggaagggatcccatttctttagaagatagattctttctttttcttttttttgttatactttaagttctaggtacatgtgcagagcatgcaggtttgttacgtaggtacacatgtgccattgtggtttgctgcacccgtcaacctatcatctacattaggtatttctcstaatgctttccctcccctaatcccccacccctcagcaggccccagtgtgtgatgttcccctccctgcgtccatgtgttctcaytgttcatctcccacttacgagtgagaatatgtggtgtttggttttctgttcttgtgttagtttgctgagaatgatggtttctagcttcatccatgtccctgcaaaggacatcaactcatcctttttttttttttttttgagacgaactcatccttttttatggctacatagcattccatggtgtacatgtgccacattttcttcagtctatcattgatgggcatttgcgttggttccaagcctttactattgtgaacagtgctgcaataaacatagtgtccatgtgtctttatagtagaatgatttataatcctttggatactttctaaaacttgatcacattttcctgatatattcctcaggcagaataaatcacagcattccaaataacttttagtcttttaagaccttagtgaagaattgtgatgggattacctttttaataaacaaatgcagtaattctcattttttttcaaaaatgacatctggaaattgacatgttagaaaatagattctcaaattattctgctagattaccaaggaatcaagattaataaataaaamcttttttattaaagattaaaaataaaaacttattttttataaatccagcatagaccaaaatcagccaatcaaatagtttaattagaaagagattatttgaattgcwggggttttttttttttgctctaaaaaattatgacagtgttttagtaggtaaatttcctaatgtgtatacaattgagttagacaatttttatttgcatacatttttcttaattgcatctttgttttaaaaaaaaaacaaggaacgtatgtgcaaagaaatgctttaagcagccacttaggctgactgtcagtttccctttgcagattaccttgatgtgtgaggaagctgatttggtattggaaagtattgtggagctaggaggaatcaaactgctctattttcttcattttcaaactcaccttgggcaggcacgtaaacaccattgtccaggctttcattccagagggagatgtctactttgctgtttttctttgtgtgaagacaatgacagtggttgaaattacaggatagaatatgagaatgctaagtaatactgtgaaatcccagaatctactttattcaggaagatgaataaacagagatgtaaaaccatctaagggctaagatgaaaagaattaatggaaatttaacatttttgccctttgaaatggagacggctattaactgttctcaatttaaacataataactgcttatagcaaaaaattaagcatatagaaatatagaaagtggggggggggaaggcaaatactccctccccagccccaaaaggaaagccagtgaacatgacttcatggagggatgtcctttgtggatgaaccacatcgggacatggagggagcaaagccttcctgctccttgttgaccgacacctgaccaagtgtcagccatctgagacagaggtgctgcagtggcctcagagaggcctgttgagagcagatccaggtcctggtcaggtcaggggacagacaatgctcaaatacctccaggctgctgagtgctgggtgcctgggcaggttctgtcactcatcttgcctgtctggccctcctcacagtggcactaagagctatttgcataactgtcccatttccacagacgggatgaagccttaggttgttcagttgactgtccgggacacagaaggggcgttcaaacccatttggcactggcactaaagcctgtaatctattatgctccatctggaaagctccctcttcctcccaaaggtgaatgctggtgctttccttaggagttgaatctgtacttcctcagcatcccttggtccccttatgtggacaagaaaggtgtcctttggcaggacagtgtggcttatctcaagagccatcccgtgtctatctgaccaaaacaacctcctagtctgcagctggagccaatttaatcattttttatgcatctagaaatgcaagtatcagaaggaaaacatgggagaaggggaagagcatgaggctggaggttagccctgccactggatacctccatgctacaatatatgcaacacctgtactagcagcccagggttttagagcctcagatatgcatttagtgcagagtacatgttaggatgactcgacagtcaacgtatttttatcatcatgtgcatctgagcttcatgttaaatattcttgcaagtttatataactttttttttttgagatggagtctcactctgtcctcaaacaggagtgcagtggcacaatctcagctcactgcaacctccgcctcccaggttcaagcgattctcctgtctcagcctcccaagtagctggaactacaggcatgcaccaccatacccagctaatttttgtatttttaatagagacggggtttaaccatgttggtcaggatggtctcgatctcctgacctcgtgatcccctcatcttggcctcccaaagtgctgggattccaggtgtgagccaccacacccagcctggataactttttttaaggcttgaacattttttaaaagaaaaggtttttaaagggctcacagtatttttgatggctccaaagctccatgttctaccacctgtgtttgggtctacagaactccacctcaaacccctggacagaaatctgtcttcagcagttgattacaaagctaataccctggtagcttagaaaatagatcctcaccaaatccctgggggccactctacaaactgctccagacctctattttctcatctgtttgataagaactgccctcattactgccctgagctaggaggttggaaggggcagtccacaggaaacctgcacacaagtgcaaggtacgcagtggtcacaggcgatctcaacaggcagtgaatgtgtcatgccgtctccctcagatcatcctacctcttcgcagttgagtgcagtcggggcttcagccttctcatctgcacaaatggggataataatagttcctgtctcacagcactgccatgagggtatgatgaggtcatctgagtaaagcaattagaatagtgcccggcacatccggagtgctcaagaaatgctagcggctgttgtcatcgttgctgttaagagtgatgatgtctgtattctaggaaaaaacaaacaaacaaaacaaaccacctcagcctttgttcctggagcaggtaaaagccacctttctatgttgggccagaggaagttcctgttctggggcctgctgctaggacttagtggactgatgacaaaagtttgcctttaaaaagagctgcgtttgtccagttactggacaccaggccagacccccagttctcttggttcttggtggtctttgcatgtgtcctccacctcagtgtgccctgggtccagtggaagaccacggaatgtaggggaggttaatagcactggctttggagttggggcagacccgagttcaaaacccgactgtacccctcaaggaagtcactcaccattctgggcttctgaatcggtgtaaaatgagttcactgctgcctccgtggcttgtgaaggttaaggggaattatgtacataaaatgcctagcacggtgcatggcacacagcagacactcataaaaggcagtcatcattagaatggcactgatggggcatccccaagtagggactggagaggtaaaagctctcagggagcatctgggatggaatgggatgcaggctcctggaaaatatttattgaccgcctgaatgatgctggtgcacattggggattgaggacgtgagtgtaaagggtgctagtgaacaagagtgtggagatgaggaaagtgatgagttttaatgtggcatttcagtctggttttagaagacaggaccttatgtcattcagcccacctgccttatattcagtaattcgatcattttcagcaaccttttaaaatatctttaccttttctccaggacagaattacatcacctttagatatgaattcctaaagaatgtactaatttttgattaaaatagaacaatcttgctctgctgtttctgatgacccagctttgggggctaaatataaacctagcacggtggtgtggtacttccatcacagcagcgagtgggccgtggcatcgtgtgaatttaatcacagaataacctgctattaatagttcctggggtggggtggggagcagtgaggggatcgtctatttatttatttattttggaggaatatgggtgttttataaacttccattttctccttcctatttaatgttcggaattaatgccaaaatccatataagcttagatccagctaaaaatgttaacatgtattacttctgggaacctcaaagaagctgatattgcctgtttgtgacttaggatacacttacttgggtttattggggtttcctgtaaagtatgaagcactagatgctttaggctgggggctttgttttccccttaaagctccaccaatctctagttaatctttgtttttctgaataacagtgttttatatatatgtttgttttattattttattttttaaattgatagataaaattatatgtatctatgatgtgcaacatgatgcttagaagtataaatgcatcacagaatgatctagtaatgttttaatgttacttatgctatcactgtcaattatccttgctccctgtcccaccttagagcattcagaggataattccatccctcctgctcccagcatgcccctgtccccacccactgtgcgtgtgcgtgcgcgcacatgcacacacacccacacccacacccacacccacaaacccgccccaccccccccacccccaaccatgaagggaccttaacctgttttgcctctcacgggctcttcccttcttcctgagcctaaacattcaggctgctctaatgctccagggctttcccctgtgtcatccatgggtttactctgattacgccctcacctcggcagtggggaggactagtgaattgtgtccactgcccatgaagcagatctcctggagggacccaggttagcttggcctctcccagcaagtgggaagtcaccagaacgggggctgtggagctggaggtggcttcatccacagtgagtgaggaagagaaaagccacagcaaggaggtcactgcgggaggggctcccatctccaggtccccagggaagtcctgagcccatgctgagcctggaaggattcagggaaggcacagagcctgcctcaaggaaccagtgcagggaagacaagacacacacacatacaccacacacaccacataccatgcacacatagacacatacaccacacacacacaccacacacaccacataccacacactcatagacacacaccacacatatatgtcacactgcacacaccacataccacatgcacctcacatacatatatgccacacataccacatacacatagacacatatgcacaacacacatacctcatgcacatttacatacatatatgcaccacaccatacaccactgcacacataaacacactactacacacacagctaatgacagaaggagctccttgtcttaggagagggatttggtgaggagaaaaaatcatgtccggtctcagctttggggaggaagggtggcatctgggctggcactgaagtgtgatttcatggaagaatatgaaggtggaggcctgggtgggtaaggggtgtttaggggaaagccacatggtcagggcagaatgggcagagtgtctctccttggcaagctgtgggaggaagtgtggaaggggcatgagttaccaaggaaggctctggtacacatctctatgcatctctgtaactactggaactgaggggctgtctgggatggctctatgtgtctatatttgtgttttgtgtgtaggggtgtgtgtgtatgtgtgatgtgtagggatgtgtgtattgctatttataaacaaaccatctagattagtacaaggaaagaaaaaagttaattccacctttggtagcatctgttctaagaatcacttccttgtttgtttcaatttctatggaaagtgctcaccggcagtacttttgctgatgatgtaagatggcaattaagtggagaaattatcagaaagctgacacaattttctgctagttttaatcagttttagaagtcagtcgatgaaatgtgatgttcctgccaggtgcttagcttggtatgaaatgggactcctgtcctcaagctgctttgctagggggtgcctagacgaaggcagtggagttttgggaaaacaaatgagcaactaagaaagagctaaacagtggcgcattccttctaagtgcaagagaaatttagaaaggagtaatgtctagtaatgccaggaaggcttcccagaggaagaggtgtcaagggcctgaggtgcttacgtgtgctggctcgccccttgccagcagatcttgttatgtcaaaggttctgagaagtcctgcagcgtaaaatccgcatttcccaaacatactggtgggaccacagaatctctcctcccacaatacagtttatatcagatacagagaagagatcttctgggaatgctgctgagagagggtgagaactgagtgaggtcaggcacaggagggatttgctcgggaggggaagagagggcttatggtccaggtggtgcatgattgttgtatgcagtgggggtgcatcctggctgctggggagagcgggaaaggggatgagtaggctgagtggggccacactgtttggagacaggcagaattcaggcaggacggaaggaagcaggcacagccagcagtgctctcttctttctcttccaccaactcaggagactccaccatcccctctctgccccattctctgaactgtggccccaagaatgcagaagtgggggtcctaggaagaataacagggcagatgggggctccatccctagactcaaccccactggcaggattgtggagaccatcaacagacccagcaccccctctcctgggactgggggaaagaggaaaagaggtttttgtttgtttttgttttagagaaggggtctggctgtgttgcccaggctggtctggaactcatgggctcaagtgatcctcctgccttggcctcccaaagagttgggattacaggtgagagccacttaagc

SEQ ID NO: 97528 - DNA, 17869 bp, Homo sapiens
tgggaggccgagccaggtggatcacgtggggtcaagagtttgagaccagcctggccaacatggcaaaaccctgtctccactgaaaatacaaaaattagctgagtgtggtggtgggcgcctataaccccagctacttgggagactgaggcaggacaattgcgtgaacccaggaggcagaggttgcagtgagccaagagcatgcaactgcattccagccttggagacagagcaagactctgtatcaaaagaaaagaaaagaaatacattggtttggttcagaaaggtcggatgactcaaagtaaggggagggggtttggggggcttccagggtacaggtaaatttaaatattttgtgggccaggcacagtggctcacacctgtagttgcagcactttcggaggctgaggcaggcggatcacgaggtcaggagatagagaccatcctgactaacacggtgaaaccccatctctactaaaaacacaaaaaattagctgggcgtggtggcggtcgcctgtaagcccagctgctcgggaggctgaggcaggagaatggcgtgaacccagaaggcagagcttgcagcgagccgagatcgcaccactgcagtccagactgggtgacagagcaagactccatctcaaaaacaaacaaacaaaaaacattttctggttgacgattggttgagtttgtctagagacctggcatccatagaaaggaaacgttcaggttaatataaaagattgtggagaccaaggttctttcgaagtctcatagtggctgcccttagagacaatagatgacaaatgtttcccattcaggtctttaaaaggtgcaattagttaatatgtttaggactgggaaggtctggaagaaaaagatccagctatattaatagagattctttacagatgcaaattttcccccacaaaggacaactttgcagggccatttcaagatatgtcaaagaaacatgatttggggtaaaatgttttgtcttctttgtcacgtaattttgtgcctgagtcagactggaaaatatctcacaatatatagggttaaataaaacccatctgggccgggtgcagtggctcatgtctgtaatcccagcactttgggaggcctaggtgcgtggatcacctgaggtcaggagttcgagaccggcctggccaacatggtgaaaccccatctctactaaaaatacaaaaattagctgggcgtggtggcgggtgcctgtaatctcagctacttgggaggctgaggaaggagaatcgcttgaaccagtgaggcagaggttgcagtgagccaagactgcaccattgtactctaggctgggcaagaagagtgaaactcagtcttaattaaaataaaatgaaataaaataaaataaaaatagaagccatctgatgaggatatatgcttggtagggcatgactccccagacctcttagatagtgtcacacacgtccgtgtgaagagagtccacagtaggctttgtatgagcaacaaagttatttatttcacttgggtgcaagtgggctgagtccggaaagagagtcagcaaagggagataggggtggggcagttttataggatgttggtgggcagtggaaaattacagtcaaagggggtttttctcttgtgggcaggggcagggcttacaaggtgcttggtgggggaacttctgagactcattgtccaggagaaataacttcacaaggtaatgtcatcagttaaggcaggaaccggcaatttttacttcttttgtggtttttcagttgcctcaggccatctggatgtatttgtgcaggcttgggctcagaggcctgacattcctgtcttcttatattaataagaaaaataaaacaaaatagcggtgaagtgttggggcagtgaaagtttttgggggtggtatggagagataatgggtgatgtttctcagggctggtttgagtgggattaggggcatcatgggagagattaaactgaagaaagattttggggtaaagggtgataaaccaagtgtgatcagggtgaggaacaggaaagaaggaaatatgaggaaatggagtgaatgccaggtggatcagagagatacagtcatgggggtcagatgtggtatcaggaataatgtgggaggccggatttaagtctgggccaggaacaatgataattgtgggagactcaacaaagagtgagaacaactgaaggagctggaggtcagaaagtatatgtgtcaagtgtgaagagaaaaatagattttgaaatttatgggaactgtagagagtaagtggagcatgagcatagcttttgattttgaaggcctctaaaagtataaagcagcggcagccactgcacagagacatgtgggctagcccagaacagtaaggtcgagttgtttggacagaaaggctacagggtgctgtcccggctcttgtgtaaattccgaccgcacagtcttgtacttcggctgtgtgtaatggaaagggttgggttgagttaagaagcgctagtgtgggagcagcttctagggctgtttttaaggcatggaaagaggagtggggaagaatttaggatctatggggtcacctaggtttccttttgtgagtttatgtaatggtttagccaggatggcaaaaccaggtatccaaaggcaaaagtacttaaccatgcgtaggaaggaaaggagttgttgctttgtagaaggggctagggtttgggagatttgccagacacaatcagcagggagatcacgcgtgttttcatgaagaattacagtgaggtaggtaacggatggagacaaaatttgagctttggagggggatacccgatatcctttggagaataaatgttaaaggagcaggagggtgtcttgttgagaagattcaaaggaggggctataaagtagaagatcatcaaaatattgaataatgtgagaagtagatggacggaaagaaagtaaatcatgagaaagaacctggctgaagtaatgagggctgtccctgaagtcttgtggcaggacagcccaggtaagctgctgggactgatggtgtcaaggtcagtccaggtaaaagcaaagagaggctggtatgaggggtgcaggggaacagtgaaaaaagcatctttaagatcaagaacggaatagtgagttgtggaggaaggtattgaggacaaagagtgtacgggttgggcaccaccgggtggataggcaaaacaatttggttgataaggcacagatcctgaactaacctgtaatacttgtccagtttttggacaggtaggacaggagagttgtaaggagagtttgtaggctttaaaaagccatattgtaacaggctggtgataagaggctttaacctttttaaagcctgctgtgggttgggatattggcattgagcaggataagagtgataggggtgggacagttttataggatttgggtgagtagtggaaaattacagtcaaaggggatttttctcttgcgggcaggggtgggggttacaaggtgcttggtgggggagcttctgagactcattgtccaggagaacggatttcacaaagtaatgtcatcagttcaggcaggaaccggccattttcacttcttttgtggttcttcagtgcctcaggccatctggatgtatactcgcaggctgggctcagaggactgacaggtaggaatttgggaaagataaaaaaaaaaaatcagagcttagtcctcacgcctataactaaaaatagaatccttagcccccacttaccaactttggcccctagtggccaaaggtatctcagaaaaaccttaaaactgagttcctggccatgatgggaggggaggtcaggcacgcctcattatcacccctcccttttgcagtttagacacaactgaccagcagtaatgttaaaacagaatcataagaccggcagaaccagaacagactcttcatggcaatcagataccaaatcacaaccaggacctcaggccgtgccaggcaagggtgaggtcacacaccctacacttcaacagtcaactctgttctgcctgccacaaggtttttcttttgcttgtttagcagctaaacaagaactgcctcgagataaagaagatgaaaacaatcgcagctcatccagcgcgctgacacggagcaacagagcccctgctccacagccctaactccagctttccctgggcaagagactgatttcagtaacttcctccagatcagaagaccactgacaacagactggttctgcatggtttacagacctggcaaatttcggtgccttcatgtcctgaaaagaccctttgacatacaggcttaattgtagtacatttaaatattgtcctttaggaggccgaggtgggtggatcacgaggtcaggagatcgagaccatcctggccaacatggtgaaaccccgtctctactaaaaaggcaaacattagcagggcgtggtggcgcacacctgtaatcgcagctactcaggaggctgaggcaggagaatcacttgaacccagaatacagacgttgcagtgagccgagatctctccactgcactccagcctggtgacagagtgagaccccatctcaaaaaaaaaaaaaattcctcatgagagagttaaagttcgtcttattctcacactgagattttggaatgagctgtgtattttacacgtgccaaagtctctaatcagagccctatttcaggtgctcagtagcttctgtggtcaaccttcaactccacgggacaatgctgttccaatggcctccccagcagaagacaggcagggaacaaggctgaccccagagggccaggccacagcaggggctgaggatgcctggtgaatggatgcctgggagaaaggatgccagaattcgtgctcgaggacatgatgaaacagggaaagactcaatagaataaagaaggaaggggacgggtgcggtggctcacgcctgtaattccagcactttgggaggctgaggcgggcggatcacgaggtcgggagttcgagaccagcctggccaatacggtgaaaccctgtcgctactaaaaatacaacatttagatgggcatggtgtcacgagcctgtagtcccacctacttgggaagctgaggtaggaaaatcccttgaacctgggagacagaggttgcagtgagacgagattgtgccattgcactcgagcctggctacagagtgagactctgtctcagaaaaaaataaaaattaaaaataaagaaggaaggagaaggatggaagcgaatctcaatgaacaaaatgcactgggacctactatgtacccagaaaaatgaaaagtaaataaataaaataaggacttgcatggtggtttatgctcatagtcctagaactctggaactctggaaggctgaggcaggaggatcgcttgagcccaagagtttgagatcagcctaggcaacatgcgaaacccatctatacaaaaagatacgaaaacatacaaaaaaaattagccaggtgtggtggcacgcgcctgcagtcccagctaatcaggaggctgaggtaggaagatcccttgagcctgggaggtcaaggctgcagtgagcccagatcgcaccactgcaccccagcctgggcaacagagagagaccctgtctcaaaaataaataaataaggaaatgccctggggctccaggcccactctctgctcccatcgccccactcccgcactcctcctgctcctagtctgagctccccctgccttcctcctcctccttcccaggtcaatcctgagacccatagtcatgcagaaaggtgcttcctctcttggttctgcgacaacacactgtctcctaacaaaaactaccaggtcacctggtacacatcttggagcccttgcccagagtgtgcaggggaggtggcaagttcctggccaggcacagcaacgtgaagctcaccatctttgccgcccgcctctactacttccagtgtccatattaccagcaggggctccacaggctgagtcaggaaggggcctccatggagttcgtgggctacaaaggtgagacgtggggggctgaggtgactgggtgcaggagggacagcatggggggcagatgggtctcctgatatggtgaacaccacccggactgcgtgtatgtcccaaattacaattctttctttgcgaatgacatgtgaaatttagaggctcttctccacactttaaatttgactcaatattttcaaggcagatgtaagttattagagaatgagactctctataaaaatgaccccttcatgctgtggcctccacagaagatgccccgagtcacgtgcccacatggcaggcatttattttctcacagatctggaggctgcaagtacacgttcgcggggtgggttgggttgtttgctctgaggccgctcctcctggctggcagagagtctcttctggctgtgtcctctgtggcctttcctctttgcacctgcacctctgggatctctctgcctccaaatatcaacttttttttttttttgagacagagttttgctcttgctgtccaggctggagtgcagtggcacaatctcagctcactgctacctctgccttccgagttcaagcgattctcctgcctcagcctccccagtagttgggactacaggcatgcgccaccacgcccggctaattttgtagttttagtagagacggggtttctccatgttgctcaggctggtcttgaacttgtgagctcaggtgatccaccctcctcggcctcccaaagtgctgggattacaggtatgagccattgtatccaggctttttttttttttttttttttgagaggaggtttcactctgttgcccaggctgaagtgcagcggtagaatcactgctcactgcaacctctgcctcctaggttcaagcaattctcctgcctcatcctcctgagtagctgggattacaggtgcccagaaccactctactaatttttgtgttttttagtagagatggggtttcaccgtgttggccaggctggtctcgaattcctgactgcccacctcggcctcccaaagtgctgggattaaaggcatgagccagggcacttggccacccttctccttgatggacccccgccaagcgaatttgtgcccacactagaggtctcgtttaaagtaatcatctcggccgcgcgtggtggttcacgcctgtaatcctagcactttgagaggctgaggccagcagatcacttgaggtcaggagttggaaacaagcctggtcaacatggtgaaaccccgtctctactaaaaatataaaaaaattatccgggcgtggtagtggacgcctgtaatctcagctactccggaggctgaggcaggcgaatcgctggaacccgggaggcagaggttgcagtgagctgagatcgtgccattgcactccagcctggaagacagagtgacgctgcatctcaaaaagtaaataaataaaaaataaaaagaaattaattatccgttggctgggtgcggtggctcacgcctgcaatcccagcactttgggaggccaaggcgggtggatcacctgaggtcaggaattcaagaccagcctggccaacacggcaaaaccccatctctactaaaaatacaaaaattagccgggcgtggtggcaggtgcctgtaatcccagctactcgggaggctgaggcttgaatcgcttgaaccagggaggcagaggttgcagtgagccgagatggtgccactgcactccagcttgggcaacggagtgagactccgtctctaaaaatattaattaatgaattaattaatcatctgttgaaaaggacctgtctccaaatacaaccacacattgaggtagaggggttagggcttcaatatattgatttttgggagaaacagggcaacatggcaacaagccacagtcactgtgggcgggcctgagtggggagtgcaggggttcctgtcctatgtgtctgtctcccaggggagtcccgacctgaccctcacagcccctccactcagaccttcctgcgtgctccacccacctcattcctcctacacccaacagcacccagccctcctgcctcctcatgcccctcccttctgaaatccctcccagcagtgcagctctgggctaggacacagyctagggaacgtgactgagaaagagccaagaaaacactcagtgatgaagttggtgtttaagtaagattttcagtgaaaagtagaattgggtactacatggaggcttgagatgttcagagctttttgagaaagcagaacagaaartagaagggcaaccaggaaccagaggggccagasaaccggaagmgcgggccctccgaggagacagggagtgggcacctggatcttgggcctgtcaacgaagagtcaaactcagtaaaatatttgaagagatgtattctcagccaaatacgagtgaccacggcctgtgacacagccctcaggaggtcctgagaacatgtgcccaaggtggtgggggtgcagcttggttttatacattttagaggggcatgggccatcaatcaaatacatttaagaaatacaggagctgggcgcggtggctcacacctgtaatcccagcactttgggaggctgaggcaggtggatcacgcgttcaggaattcaagaccacccttgccaacatagtgaaaccccgtctctactaaaaatacaaaaaattacccgggtgtggtggtgtgcacctgtaatcccagctactcgggagattgaggcagaagaattgcatgaacccaggaggcagaggttgcagtgagccaagaccacaccactgcactccagcctgtgggacagagcaagactctgttccaaaaaaaaaaaaaaaaaaagaaaagaaaaggccaggcgtggtgtctcatgcctgtaatcccagcactttgggaggccaaggcgggcggatcacgaggtcaggagatggagcccagtctggccaacatagtgaaaccgcgtctctactaaaaatacacaaaaagttagccgggcgtggtggtgtgcacctgtaaactcagctagtcagggggctgaggcaggagaatcgcgtgaacccgggaggcagaggttgcagtgagccaagattgccccactgcactccagcctgggcgacagagcaagacacaatctcaaaaaaaaaaaaaaaaagaaaagaaaagaaaaagaaaaagaaaaaagaaaaaaagaaacaaaaaaagtaaagaaaagaaatacattggtttagtcctgaaaggtcagacgactcaaagtgagggaagcggggttggggggcttccaggctacaggtaaatttaaacattttctggttgaggatgggttgagtttgtctagagacctggcatccatagaaaggaaatgttcaagttaagataaaagactgtggagaccaaggttattttgaagtctcataatggctgcctttagagataatagatgacaaatgtttgctattcaggtctttaaaaggtccaattagttaatctgtttaggactgggaaggcctagaagaaaaagatccagctatgttaatagaggttctttacagatgcaaattttcccccaccrgggacaactttgcagggccatttcagatatggcaaagaaacatgttttggggtaaaatattttatctttcttctttgtcacataatgttgtgtctgagtcagattggaaagtaactcacaatatatagggttaaataaaacccatttgtgccaggcgcagtggctcatgtctgtaatcccagcactttgggaggccgaggcgggtggatcatctgcagtcgggagttcgagaccagcctggccaacatggtgaaaccccatctctactaaaaatacaaaaattagccaggcatggtggcggggacctataatcccagctacttgggaggctgagacaggagaatcgcttgaacccgagaggcggaggttgcagtgagccgagaccgcaccattgcagtccagtccgggcaagaagagtgaaactcggcctccattaaaatacaataagataaaaaaataaaaaatagaacccctctgatgaggatgtatgggttgtaaggcatgactccccagaccccttagataggattttgggcaagattaaataaaacaaatcagagcttagtccaaaggcctatgaactaaaaataaagtctttagcccccaccgatcccccccaactttggcccccagtggccaggggtatctcagaaaaaccttaaaactgagttcccagccatgatgggaggggaggtcaggcacgcctcattatcaccccacccttttgcagtttagacacaactgaccagcagtaatgttaaaacagaatcataagacgggcagaaccagaacagactcttcatggcaatcagataccaaatcacaaccaggacctcaggccgtgccaggcaagggtgagatcacacaccccacacttaaacagtcaactctgttctgcctgccacaagatttttcttttgctctagcagctaaacaagcactgcctccagataaagatgaaaacaatcccacctcacccagcgcccggacacggagtaacagagcccctgctccacagccctaattcctactttccctgagcaagagactgatttctgtaactttctccagatcagaagaccacagaccatggactagttctgaatggtttacagacctggcaaattttggtgccttcatgtcctgaaaggaccttttgacatacaggcttaattgtggtacatttaaatgttgtctccaccgcaatgtgaggacggataatacagctgcttttttttttttttttttttaatagattgttgtttgtttgttttttgttttgagatggagtctcactctgtctcccaggctggagggcagtggtgcgatctcggcccagtgcaacctctgcctcccgggttcaactgattctcctgcctcagcctcccaagtagctgggatttcaggcacatggcaccacgtccggccaactttggtagttttagtagagacgaggtctcaccatgttggccaggttggtctcgaactcctgactgtcatacatgtccatatagaagaccacctaaacaggctttgtgtaagcaataatgccatttattcacttgggtgcaactgggctgagtctgaaaagagagtcagcgaagggagataggagaggggcagctttataggacttgggtaggcggtggaaagttacagtcaaaggcggtcatctgttgtcagcaggggarggggtcacaaggtgcatggtgggagaccatgagacccattgtccagaagaagaatgtcataaggtcgattgatcagttagggtagggcaggaacaagtcctaatggtggaatgtcttaaggttggttaatcagttaagggagaaactggctgtttcacttcttttgtgtttttttggctgttccagacttcttggctgctgcaggccatctggatgtatatgtgcagttcacaggggtcacaatggcttagctctggctcagcggcctgacactgacctcagatgatccacctgcctcggcctcccaaaatgctgggattacaggtgtgagccactgtgcccgcctgggatcatatgttacacgcatgtttgttcaataagcatggagtgcagccacccacatgaatattcatagctcctcctgtagcctgttcaatatgtatgtttagctaaccccttcagcataaagctcctgccccaacccctcctgcttctaaatgtctgtctctggtgttaaccagaggctgctcttcccaggctgctggatggctaccttgcaggctgtcacccttaacaagaaataaagtgtcatttgcaaatgcatcccttgtgtaatttgtaggtcaccgcgccatgggaacacgctaccaggggaagggagctgtgagacgcgcagggaggctccagacaggctggcctgggacaccagccgctgcccttccataacatggggacaagagagggcaaaagttcagcccaccacggaggatctccgggcaggagatggggaagaaggagaagcaggaaggaaagagctcagtgtgggggcgcgcatggcatcccggtgggacatctgaggcccacacccacctgctgtccctccctcccacggtggcctccgagggtgacggcctggggggaggcagacgcctggccatttactctccctccctgtccccatggccgctgggtgggggccgtctctgggatgatccccgagggcaggatccgggagtccctgcggaggcatcagcctgtctgtcttgatggtggagaggaggctccagctgggcgggaccaccaggggaggggcttgtgctctgctggctcagcctggtgtggacccacctcccgggcgctggctgcaatgactttctctttccctttgcaattgccttgggtcctgccgcacagagcggcctgtctttatcagaggtccctctgccagggggagggccccagagaaaaccagaaagagggtgagagactgaggaagataaagcgtcccagggcctcctacaccagcgcctgagcaggaagcgggaggggccatgactacgaggccctgggaggtcactttagggagggctgtcctaaaaccagaagcttggagcagaaagtgaaaccctggtgctccagacaaagatcttagtcgggactagccggccaaggatgaagcctcacttcaggtaccgctgcccgctctacccactgggcccctctgctgccccttcttgcctggtggctctgctgggcgtcagccctggccttcccctgccccagccccagccctgggctccctcccctctgactcccctgcaccccctactcccagccaggctccttgccctgctgtgttgtcgccccactgctgcttctgaatgggccgcctcccccatctgtcccagcccaggtcccctgctgagactctcccctgaaagtcatggctggggtggtgctcccggccctgggagggtgctccctctgtgtgcttcccgccattcctgaactctggaactgggagaattgaaccaaaggatgagtagagcaaggtggaattttgttcacagggctttgatggattttctgtaagatttactttgcttaaataccaagtcttaggagagggtgtggggagggaatggtctctgaagcacaggataaatcatgtcttccaaggatgtctccactgtgggcagaggaggatgcagatgaccccaaacacacgctcctcctccactatcagcattcactgtttataaatgacaccagtaacatggaatatagtggccgggtgcggtggctcacacctgtcatcccagcactttgggaggctgaggtgggcggatcgcctgcggtcaggagttcaagaccagcctgaccagcatggataaaccctgtctctactaaaaatgcaaaattagctgggtgtggtggcgggcgcctgtaatcgcagctacttgggagtctgagacaggagaatccattgaacccaggaggcggagtttgcagtgagctgaggtcgccccattgcactccagcctgggcaacaagagcaaaacttcgtcttgaaagaaaaaaaaacaaaaacaaaagaaaaaacatggaatatatgggaaaaaaactcaatgatcaggaggaatgttgttattttaaaatttagtaagaagagagcccggtccccaatggctgcctcctgcagggccagtgatacagagactggacagggctggcctggaaaggggcccccactccatttgtccccagctctgtggcctgggcaggttaccccgcctctctgcgcgtctggcccctcctctgtaagacgggaatggcccctgccagcctagggcagcctcacatgagctcacccccgcgcagcacttagaagactggcctgggcctcagaattcggttctaccatgatttaacaataataatatacagaggtgaaatgtcaggaaggaactgagctgaaaggttaaaagctgttattttggggtgaagagttttattctgtctctctctctctttttttttgagacggaatttcgctcttgtcgcccaggctggagtgtagtggcgcgatcttggctcactacagtctccgccgaaattctcaggggaggggagggatgggggaggcctagagccgtccagggggctgtgtttagtggacatcagcccggagggcccccaggagtgctctctacattggctggtttctctcttgtgtcttcagaaacacagtggagcgaatgtatcgagacacattctcctacaacttttataatagacccatcctttctcgtcggaataccgtctggctgtgctacgaagtgaaaacaaagggtccctcaaggccccctttggacgcaaagatctttcgaggccaggtaccacccggactccaatcactttgcaggcaggagctaagccagctgggaaagcaaaccacgcactgataagtgaagtgcccggcggcgggctatccagtgtgtccttctctcccacactttccaagtccgtggccctgaccttcctgctggaccgtcctgggatcggatcgtggagggggtttgcctctgcacaaaaggccttgtgtttccgtttttcttttcttttcttttttcttttttttttttgagacagagtttcactcttgttgctcaggctggagtgcaatgacgcgatctcggctcacagcaacctctgcctcctgggttcaagcgatgctgtcgcctcagactcgcaagtagctgcgattacaggtgcccaccaccacgcccagctgattttttttttgtatttttagtacagatggggtttcaccatattcaccaggctggtctcgaacttctgacctcaggtgatccacctgcctcggcctcccaaagtgttgggattacaggtgtgagccacagcgccggcctaattttaatatttaattaatccaatgtggctaacatattacttcaacattaattaacataaaattcttgacaagataatgaagtttctttttcttgtcacaccgagtctttgaaatgagctgcgtgggtcacgtacagtgggtggctcgcacctctaatcccagcactttgggaggccaaggcgggcagatcacctgaagttagatattcaaaaccggcctgggcaacatggtgaaatcccatctctactaaaaatacaaaaaaaaaaaaaattagccaggcatggtggcagtcacctgtaatcccagctactcgggaggctgaggcaggagaaccgcttgatcccatgaggcagaggttgtagtgagccaagattgcatccttgcattccagcctgggcaacaagagcgaaactccatctcaaaaaaaaaaaaagaaatgagtggtgtatttttcaggtgcccaggtctctaatcagagccccatttcaagtactcagtagtcccttggccatgtcaccccccccgacatggacagtgcaggtccagtgggctccccactgactgcaggcagggaacaaggcagaccctagagggccaggccacagtaggggctgaggatgtctggtgaatggatgcctgggagaatggatgctagaattcacacacgaggccatgaacagggctgggaaaacttccaaactcagggaagcacgtgtcttggtgcaccttgtgatgcttcaacagcaggactgagatggggacatttacaatgaacagaaatgtatgggctcgagttctggactctgggaagtcccctgtcaatgcaccagcaactttccagggcctgcgagctgcacagtcacgtgggggtgaaggttgttgccagaagctcaggggatgctccagacagagtggcctgggatgtcgagtcactgctgctccgtgacatgggggcaagaggaagcagtttagtctgacatactgcccccccagctagagggcaagagacagaaagaggggctgaagtcgcccttgaataaccacagcagtggcacccacaaaggtgcagttcccacagcctcatagctgcttgtaggtgccacctcttaaggccattaccatagcaattaatactgaacatgagctttggagcagacaaacactcaaaccgaacagggggatggaggaaaggagcttcaatggcaagatctcctggactcctgtcctggcccctcctccccctgccccacccctgctctcctcctgctccccctctcagagcttgccctgaccctgctcctctcccaggtgtattccgaacttaagtaccacccagagatgagattcttccactggttcagcaagtggaggaagctgcatcgtgaccaggagtatgaggtcacctggtacatatcctggagcccctgcacaaagtgtacaagggatatggccacgttcctggccgaggacccgaaggttaccctgaccatctttgttgcccgcctctactacttctgggacccagattaccaggaggcgcttcgcagcctgtgtcagaaaagagacggtccgcgtgccaccatgaagatcatgaattatgacggtgagaagtgggaggttcaggggtgtgggagagactgcttaagtgtctgtgatgggtccttcccacacatacctgtgggtctgctctgatgcctgcaaaggccaagtgtcccaggggagcctgtggggttgggtctggcgctgactgtaactagtatctagaatatgtctgggaggggagggtcccgaggtcacagaagagaggccagctgggcttgactgcgttctctcttctttttcttagaatttcagcactgttggagcaagttcgtgtacagccaaagagagctatttgagccttggaataatctgcctaaatattatatattactgcacatcatgctgggggagattctcaggtgagggtctccctccaggctcatcgcctcgctcctctcacctcctgctcatcctcttgaggcctcccctctgttccagaccaggtcctctcctggccaggccctcctgccttccctcctgccccctgcctgccctcgtggttacactccctcacccacactcctcgtgctccctccacctccctgcctcccacctgctttcctgggcccttcctgtgagtgagaggccccttctgcctccagagcaacctccatccacccccacagcctgggagccccaacctggccccttccatctccctggcataaccgaatttgtcgtaaaactggacgtagtaagtgggcatgaatagtcacaagcccggcagtcagaagctttgagcaacatccttaaaggccaacctgagcccctgagaaggagctgcctccatggaaacagagcttcaggcttcggctgccatagaagatggccgggctgggtgcccacagggcaggcatttattttctcacacatctggaggctgcaagtccaaggtggaggggtgggcggggttgtgtcttctgcagtcgctcctcctggctggcagggggtcccttccggccctgtcctctctggcctttcctctgtgcacctgcactcgtggggtctctctgcctccaaatgtcctcctcgtttatggaccccagtcatgtgaatttgggcccacactgaaggtctcatttaagttaatcatctgatgaaaggacctgtctccaggccaggtgcagaggctcatgcctgtaatcccagcactttgggagtccaaggcgggtggatcacctgaggtcaggagttcgacaccagcctggccaacatgttaaaaccccatctctaccaaaaatacaaaaattagccgggagtggtggtgggcgcctataattctagcta

SEQ ID NO: 97529 - DNA, 21160 bp, Homo sapiens
agaggagcagcccgggagtgggggagcaggggagcctgtcgggggagctaaggaggggctcaggagtgttgggtgcagaaggaatggggtgggtgaagcacacaggaacatctgggtggaggggctgtgagagtcaggtcaggactcccctgggaaacagacacacaggacaggaacccctgcactccccacccaggcccgcccacaatgactgcagcttcttgccgtggccttcactgtttctccccaaaatcaatgtattgaagccttaacccccgctccctcaaagggtggctgtatttggaaacaggtcctttctttcttgtttgtttgtttgagaagaagtttcgcttttttgcccaggctggagtgcagcggcgcagtctgggctcaccgcaacctccgcctcccgggttcaagcgattctcctgcctcagccttccgagtagctagaattataggcgcccaccaccactcccggctaatttttgtatttttggtagagatggggttttaacatgttggccaggctggtgtcgaactcctgacctcaggtgatccacccgccttggactcccaaagtgctgggattacaggcatgagcctctgcacctggcctggagacaggtcctttcatcagatgattaacttaaatgagaccttcagtgtgggcccaaattcacatgactggggtccataaacgaggaggacatttggaggcagagagaccccacgagtgcaggtgcacagaggaaaggccagagaggacagggccggaagggaccccctgccagccaggaggagcgactgcagaagacacaaccccgcccacccctccaccttggacttgcagcctccagatgtgtgagaaaataaatgcctgccctgtgggcacccagcccggccatcttctatggcagccgaagcctgaagctctgtttccatggaggcagctccttctcaggggctcaggttggcctttaaggatgttgctcaaagcttctgactgccgggcttgtgactattcatgcccacttactacgtccagttttacgacaaattcggttatgccagggagatggaaggggccaggttggggctcccaggctgtgggggtggatggaggttgctctggaggcagaaggggcctctcactcacaggaagggcccaggaaagcaggtgggaggcagggaggtggagggagcacgaggagtgtgggtgagggagtgtaaccacgagggcaggcagggggcaggagggaaggcaggagggcctggccaggagaggacctggtctggaacagaggggaggcctcaagaggatgagcaggaggtgagaggagcgaggcgatgagcctggagggagaccctcacctgagaatctcccccagcatgatgtgcagtaatatataatatttaggcagattattccaaggctcaaatagctctctttggctgtacacgaacttgctccaacagtgctgaaattctaagaaaaagaagagagaacgcagtcaagcccagctggcctctcttctgtgacctcgggaccctcccctcccagacatattctagatactagttacagtcagcgccagacccaaccccacaggctcccctgggacacttggcctttgcaggcatcagagcagacccacaggtatgtgtgggaaggacccatcacagacacttaagcagtctctcccacacccctgaacctcccacttctcaccgtcataattcatgatcttcatggtggcacgcggaccgtctcttttctgacacaggctgcgaagcgcctcctggtaatctgggtcccagaagtagtagaggcgggcaacaaagatggtcagggtaaccttcgggtcctcggccaggaacgtggccatatcccttgtacactttgtgcaggggctccaggatatgtaccaggtgacctcatactcctggtcacgatgcagcttcctccacttgctgaaccagtggaagaatctcatctctgggtggtacttaagttcggaatacacctgggagaggagcagggtcagggcaagctctgagagggggagcaggaggagagcaggggtggggcagggggaggaggggccaggacaggagtccaggagatcttgccattgaagctcctttcctccatccccctgttcggtttgagtgtttgtctgctccaaagctcatgttcagtattaattgctatggtaatggccttaagaggtggcacctacaagcagctatgaggctgtgggaactgcacctttgtgggtgccactgctgtggttattcaagggcgacttcagcccctctttctgtctcttgccctctagctgggggggcagtatgtcagactaaactgcttcctcttgcccccatgtcacggagcagcagtgactcgacatcccaggccactctgtctggagcatcccctgagcttctggcaacaaccttcacccccacgtgactgtgcagctcgcaggccctggaaagttgctggtgcattgacaggggacttcccagagtccagaactcgagcccatacatttctgttcattgtaaatgtccccatctcagtcctgctgttgaagcatcacaaggtgcaccaagacacgtgcttccctgagtttggaagttttcccagccctgttcatggcctcgtgtgtgaattctagcatccattctcccaggcatccattcaccagacatcctcagcccctactgtggcctggccctctagggtctgccttgttccctgcctgcagtcagtggggagcccactggacctgcactgtccatgtcggggggggtgacatggccaagggactactgagtacttgaaatggggctctgattagagacctgggcacctgaaaaatacaccactcatttctttttttttttttgagatggagtttcgctcttgttgcccaggctggaatgcaaggatgcaatcttggctcactacaacctctgcctcatgggatcaagcggttctcctgcctcagcctcccgagtagctgggattacaggtgactgccaccatgcctggctaattttttttttttttgtatttttagtagagatgggatttcaccatgttgcccaggccggttttgaatatctaacttcaggtgatctgcccgccttggcctcccaaagtgctgggattagaggtgcgagccacccactgtacgtgacccacgcagctcatttcaaagactcggtgtgacaagaaaaagaaacttcattatcttgtcaagaattttatgttaattaatgttgaagtaatatgttagccacattggattaattaaatattaaaattaggccggcgctgtggctcacacctgtaatcccaacactttgggaggccgaggcaggtggatcacctgaggtcagaagttcgagaccagcctggtgaatatggtgaaaccccatctgtactaaaaatacaaaaaaaaaatcagctgggcgtggtggtgggcacctgtaatcgcagctacttgcgagtctgaggcgacagcatcgcttgaacccaggaggcagaggttgctgtgagccgagatcgcgtcattgcactccagcctgagcaacaagagtgaaactctgtctcaaaaaaaaaaaagaaaaaagaaaagaaaagaaaaacggaaacacaaggccttttgtgcagaggcaaaccccctccacgatccgatcccaggacggtccagcaggaaggtcagggccacggacttggaaagtgtgggagagaaggacacactggatagcccgccgccgggcacttcacttatcagtgcgtggtttgctttcccagctggcttagctcctgcctgcaaagtgattggagtccgggtggtacctggcctcgaaagatctttgcgtccaaagggggccttgagggaccctttgttttcacttcgtagcacagccagacggtattccgacgagaaaggatgggtctattataaaagttgtaggagaatgtgtctcgatacattcgctccactgtgtttctgaagacacaagagagaaaccagccaatgtagagagcactcctgggggccctccgggctgatgtccactaaacacagccccctggacggctctaggcctcccccatccctcccctcccctgagaatttcggcggagactgtagtgagccaagatcgcgccactacactccagcctgggcgacaagagcgaaattccgtctcaaaaaaaaagagagagagagacagaataaaactcttcaccccaaaataacagcttttaacctttcagctcagttccttcctgacatttcacctctgtatattattattgttaaatcatggtagaaccgaattctgaggcccaggccagtcttctaagtgctgcgcgggggtgagctcatgtgaggctgccctaggctggcaggggccattcccgtcttacagaggaggggccagacgcgcagagaggcggggtaacctgcccaggccacagagctggggacaaatggagtgggggcccctttccaggccagccctgtccagtctctgtatcactggccctgcaggaggcagccattggggaccgggctctcttcttactaaattttaaaataacaacattcctcctgatcattgagtttttttcccatatattccatgttttttcttttgtttttgtttttttttctttcaagacgaagttttgctcttgttgcccaggctggagtgcaatggggcgacctcagctcactgcaaactccgcctcctgggttcaatggattctcctgtctcagactcccaagtagctgcgattacaggcgcccgccaccacacccagctaattttgcatttttagtagagacagggtttatccatgctggtcaggctggtcttgaactcctgaccgcaggcgatccgcccacctcagcctcccaaagtgctgggatgacaggtgtgagccaccgcacccggccactatattccatgttactggtgtcatttataaacagtgaatgctgatagtggaggaggagcgtgtgtttggggtcatctgcatcctcctctgcccacagtggagacatccttggaagacatgatttatcctgtgcttcagagaccattccctccccacaccctctcctaagacttggtatttaagcaaagtaaatcttacagaaaatccatcaaagccctgtgaacaaaattccaccttgctctactcatcctttggttcaattctcccagttccagagttcaggaatggcgggaagcacacagagggagcaccctcccagggccgggagcaccaccccagccatgactttcaggggagagtctcagcaggggacctgggctgggacagatgggggaggcggcccattcagaagcagcagtggggcgacaacacagcagggcaaggagcctggctgggagtagggggtgcaggggagtcagaggggagggagcccagggctggggctggggcaggggaaggccagggctgacgcccagcagagccaccaggcaagaaggggcagcagaggggcccagtgggtagagcgggcagcggtacctgaagtgaggcttcatccttggccggctagtcccgactaagatctttgtctggagcaccagggtttcactttctgctccaagcttctggttttaggacagccctccctaaagtgacctcccagggcctcgtagtcatggcccctcccgcttcctgctcaggcgctggtgtaggaggccctgggacgctttatcttcctcagtctctcaccctctttctggttttctctggggccctccccctggcagagggacctctgataaagacaggccgctctgtgcggcaggacccaaggcaattgcaaagggaaagagaaagtcattgcagccagcgcccgggaggtgggtccacaccaggctgagccagcagagcacaagcccctcccctggtggtcccgcccagctggagcctcctctccaccatcaagacagacaggctgatgcctccgcagggactcccggatcctgccctcggggatcatcccagagacggcccccacccagcggccatggggacagggagggagagtaaatggccaggcgtctgcctccccccaggccgtcaccctcggaggccaccgtgggagggagggacagcaggtgggtgtgggcctcagatgtcccaccgggatgccatgcgcgcccccacactgagctctttccttcctgcttctccttcttccccatctcctgcccggagatcctccgtggtgggctgaacttttgccctctcttgtccccatgttatggaagggcagcggctggtgtcccaggccagcctgtctggagcctccctgcgcgtctcacagctcccttcccstggtagcgtgttcccatggcgcggtgacctacaaattacacaagggatgcatttgcaaatgacactttatttcttgttaagggtgacagcctgcaaggtagccatccagcagcctgggaagagcagcctctggttaacaccagagacagacatttagaagcaggaggggttggggcaggagctttatgctgaaggggttagctaaacatacatattgaacaggctacaggaggagctatgaatattcatgtgggtggctgcactccatgcttattgaacaaacatgcgtgtaacatatgatcccaggcgggcacagtggctcacacctgtaatcccagcattttgggaggccgaggcaggtggatcatctgaggtcagtgtcaggccgctgagccagagctaagccattgtgacccctgtgaactgcacatatacatccagatggcctgcagcagccaagaagtctggaacagccaaaaaaacacaaaagaagtgaaacagccagtttctcccttaactgattaaccaaccttaagacattccaccattaggacttgttcctgccctaccctaactgatcaatcgaccttatgacattcttcttctggacaatgggtctcatggtctcccaccatgcaccttgtgaccccytcccctgctgacaacagatgaccgcctttgactgtaactttccaccgcctacccaagtcctataaagctgcccctctcctatctcccttcgctgactctcttttcagactcagcccagttgcacccaagtgaataaatggcattattgcttacacaaagcctgtttaggtggtcttctatatggacatgtatgacagtcaggagttcgagaccaacctggccaacatggtgagacctcgtctctactaaaactaccaaagttggccggacgtggtgccatgtgcctgaaatcccagctacttgggaggctgaggcaggagaatcagttgaacccgggaggcagaggttgcactgggccgagatcgcaccactgccctccagcctgggagacagagtgagactccatctcaaaacaaaaaacaaacaaacaacaatctattaaaaaaaaaaaaaaaaaaaagcagctgtattatccgtcctcacattgcggtggagacaacatttaaatgtaccacaattaagcctgtatgtcaaaaggtcctttcaggacatgaaggcaccaaaatttgccaggtctgtaaaccattcagaactagtccatggtctgtggtcttctgatctggagaaagttacagaaatcagtctcttgctcagggaaagtaggaattagggctgtggagcaggggctctgttactccgtgtccgggcgctgggtgaggtgggattgttttcatctttatctggaggcagtgcttgtttagctgctagagcaaaagaaaaatcttgtggcaggcagaacagagttgactgtttaagtgtggggtgtgtgatctcacccttgcctggcacggcctgaggtcctggttgtgatttggtatctgattgccatgaagagtctgttctggttctgcccgtcttatgattctgttttaacattactgctggtcagttgtgtctaaactgcaaaagggtggggtgataatgaggcgtgcctgacctcccctcccatcatggctgggaactcagttttaaggtttttctgagatacccctggccactgggggccaaagttgggggggatcggtgggggctaaagactttatttttagttcataggcctttggactaagctctgatttgttttatttaatcttgcccaaaatcctatctaaggggtctggggagtcatgccttacaacccatacatcctcatcagaggggttctattttttatttttttatcttattgtattttaatggaggccgagtttcactcttcttgcccggactggactgcaatggtgcggtctcggctcactgcaacctccgcctctcgggttcaagcgattctcctgtctcagcctcccaagtagctgggattataggtccccgccaccatgcctggctaatttttgtatttttagtagagatggggtttcaccatgttggccaggctggtctcgaactcccgactgcagatgatccacccgcctcggcctcccaaagtgctgggattacagacatgagccactgcgcctggcacaaatgggttttatttaaccctatatattgtgagttactttccaatctgactcagacacaacattatgtgacaaagaagaaagataaaatattttaccccaaaacatgtttctttgccatatctgaaatggccctgcaaagttgtcccyggtgggggaaaatttgcatctgtaaagaacctctattaacatagctggatctttttcttctaggccttcccagtcctaaacagattaactaattggaccttttaaagacctgaatagcaaacatttgtcatctattatctctaaaggcagccattatgagacttcaaaataaccttggtctccacagtcttttatcttaacttgaacatttcctttctatggatgccaggtctctagacaaactcaacccatcctcaaccagaaaatgtttaaatttacctgtagcctggaagccccccaaccccgcttccctcactttgagtcgtctgacctttcaggactaaaccaatgtatttcttttctttactttttttgtttctttttttcttttttctttttctttttcttttcttttctttttttttttttttttgagattgtgtcttgctctgtcgcccaggctggagtgcagtggggcaatcttggctcactgcaacctctgcctcccgggttcacgcgattctcctgcctcagccccctgactagctgagtttacaggtgcacaccaccacgcccggctaactttttgtgtatttttagtagagacgcggtttcactatgttggccagactgggctccatctcctgacctcgtgatccgcccgccttggcctcccaaagtgctgggattacaggcatgagacaccacgcctggccttttcttttctttttttttttttttttttggaacagagtcttgctctgtcccacaggctggagtgcagtggtgtggtcttggctcactgcaacctctgcctcctgggttcatgcaattcttctgcctcaatctcccgagtagctgggattacaggtgcacaccaccacacccgggtaattttttgtatttttagtagagacggggtttcactatgttggcaagggtggtcttgaattcctgaacgcgtgatccacctgcctcagcctcccaaagtgctgggattacaggtgtgagccaccgcgcccagctcctgtatttcttaaatgtatttgattgatggcccatgcccctctaaaatgtataaaaccaagctgcacccccaccaccttgggcacatgttctcaggacctcctgagggctgtgtcacaggccgtggtcactcgtatttggctgagaatacatctcttcaaatattttactgagtttgactcttcgttgacaggcccaagatccaggtgcccactccctgtctcctcggagggcccgckcttccggttstctggcccctctggttcctggttgcccttctaytttctgttctgctttctcaaaaagctctgaacatctcaagcctccatgtagtacccaattctacttttcactgaaaatcttacttaaacaccaacttcatcactgagtgttttcttggctctttctcagtcacgttccctagrctgtgtcctagcccagagctgcactgctgggagggatttcagaagggaggggcatgaggaggcaggagggctgggtgctgttgggtgtaggaggaatgaggtgggtggagcacgcaggaaggtctgagtggaggggctgtgagggtcaggtcgggactcccctgggagacagacacataggacaggaacccctgcactccccactcaggcccgcccacagtgactgtggcttgttgccatgttgccctgtttctcccaaaaatcaatatattgaagccctaacccctctacctcaatgtgtggttgtatttggagacaggtccttttcaacagatgattaattaattcattaattaatatttttagagacggagtctcactccgttgcccaagctggagtgcagtggcaccatctcggctcactgcaacctctgcctccctggttcaagcgattcaagcctcagcctcccgagtagctgggattacaggcacctgccaccacgcccggctaatttttgtatttttagtagagatggggttttgccgtgttggccaggctggtcttgaattcctgacctcaggtgatccacccgccttggcctcccaaagtgctgggattgcaggcgtgagccaccgcacccagccaacggataattaatttctttttattttttatttatttactttttgagatgcagcgtcactctgtcttccaggctggagtgcaatggcacgatctcagctcactgcaacctctgcctcccgggttccagcgattcgcctgcctcagcctccggagtagctgagattacaggcgtccactaccacgcccggataatttttttatatttttagtagagacggggtttcaccatgttgaccaggcttgtttccaactcctgacctcaagtgatctgctggcctcagcctctcaaagtgctaggattacaggcgtgaaccaccacgcgcggccgagatgattactttaaacgagacctctagtgtgggcacaaattcgcttggcgggggtccatcaaggagaagggtggccaagtgccctggctcatgcctttaatcccagcactttgggaggccgaggtgggcagtcaggaattcgagaccagcctggccaacacggtgaaaccccatctctactaaaaaacacaaaaattagtagagtggttctgggcacctgtaatcccagctactcaggaggatgaggcaggagaattgcttgaacctaggaggcagaggttgcagtgagcagtgattctaccgctgcacttcagcctgggcaacagagtgaaacctcctctcaaaaaaaaaaaaaaaaaaaaagcctggatacaatggctcatacctgtaatcccagcactttgggaggccgaggagggtggatcacctgagctcacaagttcaagaccagcctgagcaacatggagaaaccccgtctctactaaaactacaaaattagccgggcgtggtggcgcatgcctgtagtcccaactactggggaggctgaggcaggagaatcgcttgaactcggaaggcagaggtagcagtgagctgagattgtgccactgcactccagcctggacagcaagagcaaaactctgtctcaaaaaaaaaaaaaagttgatatttggaggcagagagatcccagaggtgcaggtgcaaagaggaaaggccacagaggacacagccagaagagactctctgccagccaggaggagcggcctcagagcaaacaacccaacccaccccgcgaacgtgtacttgcagcctccagatctgtgagaaaataaatgcctgccatgtgggcacgtgactcggggcatcttctgtggaggccacagcatgaaggggtcatttttatagagagtctcattctctaataacttacatctgccttgaaaatattgagtcaaatttaaagtgtggagaagagcctctaaatttcacatgtcattcgcaaagaaagaattgtaatttgggacatacacgcagtccgggtggtgttcaccatatcaggagacccatctgccccccatgctgtccctcctgcacccagtcacctcagccccccacgtctcacctttgtagcccacgaactccatggaggccccttcctgactcagcctgtggagcccctgctggtaatatggacactggaagtagtagaggcgggcggcaaagatggtgagcttcacgttgctgtgcctggccaggaacttgccacctcccctgcacactctgggcaagggctccaagatgtgtaccaggtgacctggtagtttttgttaggagacagtgtgttgtcgcagaaccaagagaggaagcacctttctgcatgactatgggtctcaggattgacctgggaaggaggaggaggaaggcagggggagctcagactaggagcaggaggagtgcgggagtggggcgatgggagcagagagtgggcctggagccccagggcatttccttatttatttatttttgagacagggtctctctctgttgcccaggctggggtgcagtggtgcgatctgggctcactgcagccttgacytcccaggctcaagggatcttcctacctcagcctcctgattagctgggactgcaggcgcgtgccaccacacctggctaattttttttgtatgttttcgtatctttttgtatagatgggtttcgcatgttgcctaggctgatctcaaactcttgggctcaagcgatcctcctgcctcagccttccagagttccagagttctaggactatgagcataaaccaccatgcaagtccttattttatttatttacttttcatttttctgggtacatagtaggtcccagtgcattttgttcattgagattcgcttccatccttctccttccttctttatttttaatttttatttttttctgagacagagtctcactctgtagccaggctcgagtgcaatggcacaatctcgtctcactgcaacctctgtctcccaggttcaagggattttcctacctcagcttcccaagtaggtgggactacaggctcgtgacaccatgcccatctaaatgttgtatttttagtagcgacagggtttcaccgtattggccaggctggtctcgaactcccgacctcgtgatccgcccgcctcagcctcccaaagtgctggaattacaggcgtgagccaccgcacccgtccccttccttctttattctattgagtctttccctgtttcatcatgtcctcgagcacgaattctggcatcctttctcccaggcatccattcaccaggcatcctcagcccctgctgtggcctggccctctggggtcagccttgttccctgcctgtcttctgctggggaggccattggaacagcattgtcccgtggagttgaaggttgaccacagaagctactgagcacctgaaatagggctctgattagagactttggcacgtgtaaaatacacagctcattccaaaatctcagtgtgagaataagacgaactttaactctctcatgaggaattttttttttttttgagatggggtctcactctgtcaccaggctggagtgcagtggagagatctcggctcactgcaacgtctgtattctgggttcaagtgattctcctgcctcagcctcctgagtagctgcgattacaggtgtgcgccaccacgccctgctaatgtttgcctttttagtagagacggggtttcaccatgttggccaggatggtctcgatctcctgacctcgtgatccacccacctcggcctcctaaaggacaatatttaaatgtactacaattaagcctgtatgtcaaagggtcttttcaggacatgaaggcaccgaaatttgccaggtctgtaaaccatgcagaaccagtctgttgtcagtggtcttctgatctggaggaagttactgaaatcagtctcttgcccagggaaagctggagttagggctgtggagcaggggctctgttgctccgtgtcagcgcgctggatgagctgcgattgttttcatcttctttatctcsaggcagttcttgtttagctgctaaacwagcaaaagaaaaaccttgtggcaggcagaacagagttgactgttgaagtgtagggtgtgtgacctcacccttgcctggcacggcctgaggtcctggttgtgatttggtatctgattgccatgaagagtctgttctggttctgccsgtcttatgattctgttttaacattactgctggtcagttgtgtctaaactgcaaaagggmggggtgataatgaggcgtgcctgacctcccctcccatcatggccaggaactcagttttaaggtttttctgagatacctttggccactaggggccaaagttggtaagtgggggctaasgattctatttttagttataggcgtgaggactaagctctgattttttttttttatctttcccaaattcctacctgtcagtcctctgagcccagcctgcgagtatacatccagatggcctgaggcactgaagaaccacaaaagaagtgaaaatggccggttcctgcctgaactgatgacattactttgtgaaatccgttctcctggacaatgagtctcagaarctcccccaccaagcaccttgtaayccccacccctgcccgcaagagaaaaatcccctttgactgtaattttccactactcacccaaatcctataaaactgtcccacccctatcactcttatcctgctcaatgccaatatcccawcccacagcaggctttaaaaaggttaaagcctcttatcaccagcctgttacaatatggctttttaaagcctacaaactctccttacaactctcctgtcctacctgtccaaaaactggacaartattacaggttagttcaggatctgtgccttatcaaccaaattgttttgcctatccacccggtggtgcccaacccgyacactctttgtcctcaataccttcctccacaactcactattccgttcttgatcttaaagatgcttttttcactgttcccctgcacccctcataccagcctctctttgcttttacctggactgaccttgacaccatcagtcccagcagcttacctgggctgtcctgccacaagacttcagggacagccctcattacttcagccaggttctttctcatgatttactttctttccgtccatctacttctcacattattcaatattttgatgatcttctactttatagcccctcctttgaatcttctcaacaagacaccctcctgctcctttaacatttattctccaaaggatatcgggtatccccctccaaagctcaaattttgtctccatccgttacctacctcactgtaattcttcatgaaaacacgcgtgatctccctgctgattgtgtctggcaaatctcccaaaccctagccccttctacaaagcaacaactcctttccttcctacgcatggttaagtacttttgcctttggatacctggttttgccatcctggctaaaccattacataaactcacaaaaggaaacctaggtgaccccatagatcctaaattcttccccactcctctttccatgccttaaaaacagccctagaagctgctcccacactagcgcttcttaactcaacccaaccctttccattacacacagccgaagtacaagactgtgcggtcggaatttacacaagagccgggacagcaccctgtagcctttctgtccaaacaactcgaccttactgttctgggctagcccacatgtctctgtgcagtggctgccgctgctttatacttttagaggccttcaaaatcaaaagctatgctcatgctccacttactctctacagttcccataaatttcaaaatctatttttctcttcacacttgacacatatactttctgacctccagctccttcagttgttctcactctttgttgagtctcccacaattatcattgttcctggcccagacttaaatccggcctcccacattattcctgataccacatctgacccccatgactgtatctctctgatccacctggcattcactccatttcctcatatttccttctttcctgttcctcaccctgatcacacttggtttatcaccctttaccccaaaatctttcttcagtttaatctctcccatgatgcccctaatcccactcaaaccagccctgagaaacatcacccattatctctccataccacccccaaaaactttcactgccccaacacttcaccgctattttgttttatttttcttattaatataagaagacaggaatgtcaggcctctgagcccaagcctgcacaaatacatccagatggcctgaggcaactgaaaaaccacaaaagaagtaaaaattgccggttcctgccttaactgatgacattaccttgtgaagttatttctcctggacaatgagtctcagaagttcccccaccaagcaccttgtaagccctgcccctgcccacaagagaaaaaccccctttgactgtaattttccactgcccaccaacatcctataaaactgccccacccctatctccctttgctgactctctttccggactcagcccacttgcacccaagtgaaataaataactttgttgctcatacaaagcctactgtggactctcttcacacggacgtgtgtgacactatctaagaggtctggggagtcatgccctaccaagcatatatcctcatcagatggcttctatttttattttattttatttcattttattttaattaagactgagtttcactcttcttgcccagcctagagtacaatggtgcagtcttggctcactgcaacctctgcctcactggttcaagcgattctccttcctcagcctcccaagtagctgagattacaggcacccgccaccacgcccagctaatttttgtatttttagtagagatggggtttcaccatgttggccaggccggtctcgaactcctgacctcaggtgatccacgcacctaggcctcccaaagtgctgggattacagacatgagccactgcacccggcccagatgggttttatttaaccctatatattgtgagatattttccagtctgactcaggcacaaaattacgtgacaaagaagacaaaacattttaccccaaatcatgtttctttgacatatcttgaaatggccctgcaaagttgtcctttgtgggggaaaatttgcatctgtaaagaatctctattaatatagctggatctttttcttccagaccttcccagtcctaaacatattaactaattgcaccttttaaagacctgaatgggaaacatttgtcatctattgtctctaagggcagccactatgagacttcgaaagaaccttggtctccacaatcttttatattaacctgaacgtttcctttctatggatgccaggtctctagacaaactcaaccaatcgtcaaccagaaaatgttttttgtttgtttgtttttgagatggagtcttgctctgtcacccagtctggactgcagtggtgcgatctcggctcgctgcaagctctgccttctgggttcacgccattctcctgcctcagcctcccgagcagctgggcttacaggcgaccgccaccacgcccagctaattttttgtgtttttagtagagatggggtttcaccgtgttagtcaggatggtctctatctcctgacctcgtgatccgcctgcctcagcctccgaaagtgctgcaactacaggtgtgagccactgtgcctggcccacaaaatatttaaatttacctgtaccctggaagccccccaaaccccctccccttactttgagtcatccgacctttctgaaccaaaccaatgtatttcttttcttttcttttgatacagagtcttgctctgtctccaaggctggaatgcagttgcatgctcttggctcactgcaacctctgcctcctgggttcacgcaattgtcctgcctcagtctcccaagtagctggggttataggcgcccaccaccacactcagctaatttttgtattttcagtggagacagggttttgccatgttggccaggctggtctcaaactcttgaccccacgtgatccacctggctcggcctcccaaagtgctatgattacaggcgtgagctgctgtgtccagccaccaatgtatttctttcttttttttttgagatggagtcttacaccgtcgccctggctggagtgcccttgcgtgatctcggctcactgcaacctccgtctcccaggatcacgtgattctcctgcctcagcctcctgagtagctgggattacaggtgcacatcatcacaccggctaattttttgtatttttagtagagacagggtttcactgtgttggccaggctggtctcgaactcctgacctcatgatccacccacctcagcctcccaaagcactgggattacaggcatgagccactgtacccagctcctgtatttctcaaatgtatttgattgatagctcttgcctctctaaaatatataaaaccaagttgcacccccaccaccttgggcacatgttatcaggacctcctgagccctgtgttacgggccatggtcactcgtatttggctcagaatacgtctcttcaaatattttacagagtttgactctgtttgtcgacaggcccaagacccaggtgcccactccctgtctcctcggagggcccgcgcttccggttctctggcacctctggttcctggttgcccttctactttctgttctgctttctcaaaaagctctgaacatctcaggcctccatgtagtacccaattctactttttattgaaaatcttacttaaacaccaacttgatcactgatcaagttttcttggctctttctcagtcacgttccctaggctgtgtcctagcccagagctgcactgctgggagggatttgagaagggaggggcatgagcaggagggagggctgggtgctcttgggtgcaggagggtgggctgggtggaacatgcaggaaggtctgggtggaggggctgtgagggtcaggtcgggactcccctgtgagacagacacacaggacaggaacccctgcactccccactcaggcccgcccacagtgactgtggcttgttgccatgttgccctgtttctcccaaaaatcaatatattgaagccctaacccctctacctcaatgtgtggttgtatttggagacaggtccttttcaacagatgattaattaattcattaattaatttttttagagacggagtctcactccgttgcccaagctggagtgcagtggcaccatctcggctcactgcaacctctacctccctggttcaagcgattcaagcctcagcctcccgagtagctgggattacatgtgcccgccaccatgcccagctactttttgtatttttagtagagacggggttttgccatgttggccaggctggtcttgaattcctgacctcaggtgatccgcctaccttggcctcccaaagtgctgagattacaggtgtgagccaccacacccagccaacagatgattaatttatttttatttttattttgagatgcagtctcactctgtcttccaggttggagtgcaatggcatgatctcggctcactgcaacctctgcttcccaaggtccagcgattctcctgcctcagcctcccaagtagctgagattacaggcatccactaccacgcctggctaatttttttgtatttttagtagagacggggtttcaccatgttgaccaggcttgttttgaactcctgactgtcaggcctctgagctgaagctaagccatcatatcccctgtgacctgcacatatacatccacctggcctgaagcaactgaagatccacaaaataagtgaaaataaccttaactgatgacattccaccattgtgattttttcctgccccaccctaactgatatgatatattctcccccgcccttaagaaggtactttgtaatattctccccagtcttgagaatgtactttgtaatattgtccccactcttgagactgtactttgtacgcctatcccaaacctataagaactaatgatgatcccaccaccatttgctgagtcctttttcggactcagcccgcccacacccagatgaaataaacagccttgttgctcacacaaagcctgttggtggtctcttcacacagacgtgcgtgacgtttggtgccaaaactcgggacgggaggactccttcgggagaccggtcccctgtcctcaccctcactgggtgaggagatccacctacaactcgggtcctcagaccaaccagccaaaggaacatctcaccaatttcaaatcaggtaagtggtcttttcgctcttctccagcctctctcactaccctccagccttcctctctcgctacccttcaatcttcctgtccttccaattccagttctttttcttctctagtagagacaaggagacacattttatccatggacccaaaactccggcgccagtcacggactcgggaagacagcctttccttggtgtttaatcaccgcggggacgcctgcctgattattcacccacactccattggtgtctgatctccatggggacgcctgcctgattattcacccacattcccttggtggtcagtcaattgtggggatgcctgctttggctgctcacccacattgcagcccagggctgctcactaccccctcttctccgtgtctctaccctctctgttctctgggcttgcctccttcactatgggcaaccttccaccctccattcctccttcttctcccttagcctgtgttctcaaagacttaaaacctcttcaactcagacctgaactgaaacctaagcgtcttattttcttctgcaacaccgcttggccccagtacaaactcgacaatgattccaaatagccagaaaatggcactttcaatttctccatcccacaag

SEQ ID NO: 97530 - DNA, 17069 bp, Homo sapiens
acagggtaagcactagagtgaaggtcctacttccatggccaaatatgaacagtaaatcacagacaaagttgggttaacacagttgcgtagatgacagagattcaaagttgtttaaactaacctatttatactaacagtaatggaaacggggaaagggaccctgaattcccagtacctttcagagataaaaccatccgaggacacctgggctccaaatatttcttgagatcatcccaggcctttttaatagcagcataatggtcaatgtatcttcctacatcagagtaagtatctatgaagagagatttccaacactgattcttctgtgttttctcttccctaaatagatgaaaaacatgagattttaaatcttttaaaataatattagcatttattttagatacctacaacatatagaaacttgtacttttcccttccttttcattatattttagccacaaatgaagatcagatagcaaaaagtgatatatacataaaaaaattttaacaaaagttactactggcatggtggaattgctaggcactcattttctccttctctttctacttattttttttcagttttctaatctttaataaaatatgaatagtaataacgtataaatttcaacttattcttaaaaatataccaattataaacttttaaaggcattatgtattgttttagagaatacttagaatcttgtgatataataatattaatctaacacatatctacactgaattagttgagaatcatagaacatgaaagtaattacatgattcaacattcctatttggtaaaattccccaagcatttattgagtgtccacttagccactgaggatataaaaaaataaggcacattttttaccttcaaaaaaggtaagagtctaaccagtgagaaagaatgaagtataaaattaagaatcagaagtgatagagggtaaggcagccacagacggccttaaggtaacatactaacgagcttagtaagaaaggcttggtaagcctttgtgatgaatatagaaggagggagagaagtggggagagagagagagacacgcctaggatgactcctaattctgatctggatgcctgagtggatgatgctgctatgaagactgggaatgctgaaggacaggtttaggaatggggaaaagaacaactcagggtgggttttttttttttttttttttgcgggggtagaagagggaaggggagcatctttttattaatctaaataatatacacatagattattaaaactaaaaagtatcaaagaacttacgatgaaaaactattctcctgttttaagtccaactcctcaaaggaaatcttaggtatttctagaagttacctctatagttctaaatgtttatgcctctaattcttgatttatcaacttcacatgtatctactgataccccaaagggaaacacgggaagatctagcaatacttaaaattccccttaccctgttctttttcctcccaatgtttgatagctctgttattaattttcacttctgtctaaagcttgcagctttaaataatatgcttaaacctctgcttcttacttcaccaactttagtcactacctgactccacttaatctaagaaaagatatcagcattcctactcatttcttccacctttctcaactcccactttctgtcatctgtactttgattctgtcaaatttgttaacatttactgaatccagttaataagtgtgggacagccaatagaaaggtccagcggacagttgtgcaaacaattctagacctcagtggggaagtcagggagggagattcaggtttgggagttaggagcatgcagatagtcactataaacggcaacaatgcatgcagtagagttcagcaagggagagcagcagtgggctaaggacagaaccttggcaaataccaacatttactagcaggcacgagaagagccaccaaaggagataaagagacaagggttagagaggagaatcaggacaaactagtgttatggaagaagccaagggccagttttcagaagtacatattcctcgaatactcactcagatatcagccagtattttttgcaatgtcttctccacagcggatcatgacttgatagctggctaagtcttcgactgacataacaacagctggcagtaaccagattcaccgatagtatttaaaaaagtaagaaaacaatttaaaaataaagattaaaatattcattgttttgttttatgccttttgtttctcttacttttcacttattacccttataattacaaaactattttctaaaacctgtttaacatgttaagtagtataattgccttgttagtagtgaaactgagttcacaaataaaccctgaaacatctacaactgtaatttttcacaaaaatatctacagaccatatatgccattggagttaatctcaagtcaaggagttgtcctatgcttattatcaggacaatactcatttctacatataggaagaaagttatttagtcataaacaaagggacttggggttttttcccaagatctgtaagatgtatgctactaaatacacagactttttatttttgttttttaaaattttttacttaaaggaaaaaagtattgccacaaaaaccacgttttcattaaagcaactactggaaagtccacctatagagggtgcctgaatcgtaacagttctgactcaatagtcatggctacacaagttatcagctgccccaaaacatcgaatgttagaagcaaataactttcttactatataaagatttctaacacaacagtgttgcaatcctgtaaattctaccctacataattaatttgtaaaaagaatgaacctaagattaggactctatcctttccagagagaaattacaagttatattaattgaaagtaggtattcaaagatctcacttgggcaatagctatcaacagaatcttaaatcacatcaggtttgtcaaggccatgactaaggtgtgttaaaaaccatctatagtaaacaaaattgcctttgtttgattttcagattttacagaaacatcatcctcatccttttctgccaagctcaggagatgcccaaattaacttttgtaaacataggaatccctccagttttgtgcattcagtttccataccctcttcttgattcctgtccctccactgccctaggagctaaatgacataaaagaatctggaatatgcatgaaagatgaattcaatgcacatcgagagtgaaaactactgttctagagattctgatccagtcggtttggactgagatctgtacctcaggcatctgtatgtttaaaaagtgccacaggccattctgatgcacaggtcattctgacgcacagtgtggcatttattcactccatttcagaataaatcactctgaaatggagagggtatcagatcatctcaattcaaactaggcaactgatgctacatgattccagtgtactaatccaatccaacccaatccagttcagcaaataataccaaaaacttcagagcttatcactagactagacccttgacaaaattgggctgtatggtgcaggaaaaaagctgcaatacactggatacttttctgtagataaaattcaaatggtattcaactcaatttatttccacagacatttacagagggatcatgtcacttctgtttaaaattgtgattactacctaaagcatttaaagtaaactcttacttcctcaccttggttcccaaggtcctgcatgatctcaccaccctcatctcatcactgtctgtgagtcactccctacctccagcaacgccagccttctgtatcttccaccaggccatgctgttgaacagtaccgttcagcagtcccgtcaatctctgaacatacttttccctctgccagaactgcatatgccctgcttcatatatggcagctccttccgatttgatcacttctcacttcctattccttaacagagcaatctatttccttcacagcacttagtacctcttgcaattatgcgcttgcccactggactgtaagctccataagagttgccttatctgcgttgttcactactgtaccctcaacacttaacagactggcacatagcaagccctcggggaaaaaaaaatctttgaataggaagataagcaaggcagcccttacaatcaagaagcacgccatctacctgacatggcaaatcaattctgcaggaagaaggtagagagggcatcttctccaccttgccaagttgagaagaggtaggcaaggcattccaggcaaggtcgagagcttgagccacaggaaaaaaaaaaaaaaagaaagtgcaagtgtgttgtatgctggcagaggtctgatttggttagaatggatggtgcaaatgtgatagtggtggagaaataagtcctggaggaccttagatatacaagccagatgataagagctttcaatgccccagaagtttaggttatagtctataaacataggggtgtcacaggttttaaggagaatgacaaccagatgtgtcttggaaagattactctggcagcaatcaaaagttggagactgttagttaaattgtaagtattttctagaaaaataaaattgctagcaggtacaggtagcgaccagtacaggtagtgaccaaaaacttgaggtatctctctatcaccacttagctaggccaacaactatctgtagctccaagaaatctgtatttataaaaagacctctaataacacagggcacaatcatcaaatggctagaatctaatggttaatccaaacacaaaacaaatctcgcccacctatcctaagagggcgactttgcatcctctgcaaatatatacggtagcacaggaaactcacagccatgccaccccctgtcaagggtgtaaacaatcctgacagctggggggcgggctggcagcgccatttcttccaccaccccagacagtcccaagttctgaagaaactgggcattgaaccacccttatcagcaaccggtgtttatttctggaacagatgctagtaatgtgggaaacccaaggtgtccaggagaaaagatagtcaccggtatggcatcaccggaagtcagtaccaaaacataaaatccaacatcgaaccgtaaggagcaatgctgacagcaaaacaattctcacgcactgaagtccgaaagtgagcccggacagcgattctggcgctggggaagtcgcgccaggggagtaaggggttgcctatcttctcctctcgctcacccacctgcccaccccggcgccagactccgcaggccccggacccagcagagaagagcgcctggccgggacaggggcttttacacagcagcagggactgaccccaaccgggcgggcacctgcggggccagcgggggtccgcggagcgcggcggtgcggcacgagggccactacctccttctcttgcaagtgggcctcaccgaggcctgggagagagatatctcgtcgcttctcatacctgggcccaggacaggaggaagactcagggcgaggccctttccgcccccgtctcgccccggtccccggtggctccgcaggatgagggcggccctggcgtcaccttctggtgtcgcggaagctcgggtcctgtcagcggccccgaccccctttccccctgcctcaccgcctcctctccccatgcccccacccctgccatgcgtgtcgtcccattacttgattagatcccgatagtccaaaaaggataagatgaggagcaggggatcggtgggcagcgactctagggtcagcggcgccgtctcggtctccatggccgccatcttgcctggcccggtgcaggtctggccccgccctggccccgcccctgccccgcccccaccagcgcccgaaccgcccccagccgctctcacaggtttgttatgtaaccgccgggccagccccgccctcagggtgggctgaggtgcggctccctggagaccccgcccgctagccgggagccagcggcgcagtgcgagttcagcccgctttcttcgcgctccgcgtcaaatctctccagctctgttctcgcatcccggttcgtaaacttgcccagcccgggacccttttgttgccaaatctgcctcggtctgcccaactcctcctgcgaaattttacactcagtatgcaggaagcctcgctcaaaatctgacmctcctccacgcccttggtccccaaatccattccttctctttgttttccaacccgagaacccctcgttttccccgctcagccttccccrccccgcttgtcccccgcacayagcagggccgctccgagacttgtccactcagcaagagcagagctgagaatcagccagggacgccagctgaaggcccttctcccaaattaaggaaataattgttgagggcttaacttcacgccyctccccgccttcctaagtaaaatgtgtacaaggagtgagtctgagtctcagccgctgtcccttaatttggttatcatggctattttcagcctattagggcaatgcaaagggtacagtgtggattttttccagctttaaaatttattttggccagggtttagatcccgcagagttaagtatcccgcgtgtgaagggatgaactgagactcccagagggcataactgatggaggcacgaagatgtctgctcttcagctttgccaaggtgatattaaaatgagagtgggggaagtataatgggtccatacatcacttgcctgatttcttcttttccatkgcttttccaaaggtagtatggtgtaaggggctttgrggaatccagacagacctggacttcacacgcccgtcatttatttcactactagtgaaatgctggcgtagttacrcctaagttctctgagactgtccctcatctctaaaaccacccctcctstggtgaactaaggatggcgataacdctttatgtaaagtgcctggccagatactcaataaatgttaattttccaagcttatacatgcatcagtcactaagttctccaaacatttccatatcctggagaaagtttctctcaattatttggaagagtggaagtgatatgccccgccccaaaaaaatccatttcctccattcttcataccattaatgccttctatttatggttttgcttaatagttataacccctgccacccagccaacaaaacrgaacaacagcaacaaaaaactctgcctacatctctgtgcttccaaattgtttatgcatatgcttagaagaacatttattgaattggatttcaagtacttgttctgtgtctctctcgtcaaactgtaaactctcagtctgactcatctttctaatttcagggcttagcaagttattcaacaactagaaagtttaaattcaggttgaatggatgaatgaagacagaataatcatttctgtttacaagggaaccatacctttttacatagacaaatgcttgtaaargtatttgatcctgatttatgtttgtctccattttctacttcagatgggccacctgttttaaatccaaaagctggtaggagtttcaggtacactgcatttgcttctgctgtcctattgcacttggacttggtgcagctatgacctaatgcagaagacaaagtatgaagctaccaaactgtcagggccagaactaaggtgaggcaagaaagctacttgcttggggcacaaatttaagaagaggtgccaaaaaactgaataatcaaataaataacattttaatgcaatatttttaaaaataaaaattaatgcaaaaaaaattcacagtgaacaaaataccaaactcttaaacaaaaacaggatcccacagtgccatgtaagccatattagagcytgatgcaaaaagaaaaaacaatgcgcagcactaaatacatgctttttatggttttgttagtttgttttttgaaacggggtttctctgctgttgcccaggctggagtgcagtgacatgctttcggctcactacaacttctgcctcctgggctcaagccaatttcctacctcagcctcctgagtagctgagactatagctacaccacaacacccagctaatttttgtatttttagtagagacagggtttcaccatgttggtcaggctggtcttgaactcctgacctcaagtgacccacctgcctcagcctcccaaagtgctgggattataggcatgagccaccgcgtctggccaggtggaagacttgcttctcccatgtggctgggcttayagcttctgccatgcgctctcagcacctcttttccaggctgctaagccctgccacttcctaccttgcaaagtgccatcaggttgccatcccctgctgcactagcccaggcccctctggagaggtggctttggctcaggctccacttttctccccagcatggtatgaggcatgtggtagaggttgggggagcaatgcaggtaggcaggacccaggagagccctttcctgggccggggcttcctattgcccttcccccaccccctgccaccctgcccccaatactggctggaaaaggggtaggtaggaagagagagtccagaatttggctattcacatccccagggctaagcttgggtgraagaaacagtccctccaagtttgctcattgttttggaagctggtttctaaagagtttcactaaaatagtatttgcttatcattttaatttmtatggtagatcrgaaagcagaaggttttaaggccaggcgtgatagctcacgcctgtaatcccaacaccttgggaggccaaggtaggcagattgcttgagtccaggagttccagaccacactggagagacccygtgtctgcaaaaaaaaaaaaaaaaaaaaaaagccaggcatggtggtgcatgcctatagtcccagctactcaggaggctgaggtgggaggatagcttgagcctaggaggtcraggccgcagtgaaccgtgatcgtgccactgaactccagcctgggcgacataatgagaccctgtctctaaataaataaataaatgttttttaaaaagaaatcagaaggttctaacagaagggttcagatgtagaattttttttttaaaaaaaaggtttctccttttctcaggagtagagagggacaatgcttgagaaatacacagtcttacgtgtttcctttagaaccccagtggcatcttatttatgatgagkagctcctagcaacaacaccctacctcttggtaatcaatcgtagtttcatcggctttgargttcccactggctgtttaggtaaatccttcagacattaactcctatcaagtacaagcatccgggctcaggactgtgagagatcaagctgaacacrgtgccatacctgcccttgagaaagtgacagacactccctaacggtttggttggggagaggcaaattcaaatggccctggagactcattttctcacctgttttcatggtttagcaactcgctgcctcagcagatctgagttagcttggaggcaaaacaggatgctctagaagttcctactaaatggcagcctagaggtgccccgaatccccggcttccacctcagcatttgtaaaacagagtttaagatccttctgtattgaactctgcgagatgaacccagcctaggcacatttctcagcgggacagggaagctgggggctgggatggatggtgggatggggaaatggggttgcttacatgctcctccttctctgcttgtatccccctcccccacccaagttgtatttataccacatggcattggtagtgtgtgtctgtggcccctgaaaggcagtcgcacgcatgaaggttaaactccactttgcctcggtgctaagtgtttttggaactgcccattgtccaactgggccttcccagggacaaaagcattctctcccagggggccctgtcacccaagccccagtgtcagcaatcctggttgtgctgaggcagccctcgcatttgggaacscagaagataaaagggtgggaggatcatggtgggactgctgggcactaattcccccaaacaagtgtgacacccaaggaaaaccctgggccgcaagactgccagtgattggtaaaaaggagacccgcccctgtggagcccaggaatattcaggagaattacgctttatggctgaaaacagggagaaggataaaattgcagggatgagtggagattaggggctgctactgctactcactcagaaaagcagccaggctgatggggtgacacaaaaatctggaatggatttagctgctcttatgcagcaaaaccacagacaaactcacggctaacgggawgcctggaccagatataagagatttataggcacagttccagcagctatacacactaagttctaggacttggttccctgctccttccttaagggatactttaaatatttctgaatttgcccaaccaatgtctggtttctttgtttttgtctgtgacatgtctcttgcttttttgcagcctgtataattgataggaaccttctgggtgcatgatgagtggatmttctgataagatacatttaaagtgtcccctgtkggtggcttctaatatggggctaaggatgtgaccaagaatggcctgtaatcctgaagcctgccaagattgcatcattgaaacaatgcttcctaccaggtggagagaaaatgcagtattcttatcygagacgtaatagaggccagagtgctgaacaacactatccaccagttccrtagccccatagggctggggaagccactggtatatggaaccttactgtaccctgttgaggcttaaacatgtcagtggccactattcttatagtgtctgatatcatgagtggctgaactagaattgtgccattagtggtacttggcatgcaggcttggatagattaatgctggggtttgttttttgttttgttttktttttgtttttaaagacaaggtctggctcagttgtctaggctggtctctatctcctggactcaagcgatcctcacaccccagccttctgagtagctagaactacaggcttgtgccaccacatccagctaatgcttaaaaaaaaaaagaaaaaatactctttataccttttctacccttctccatgccctaggaggctgatctttaggtactccttcacctgggcttctttgttatctggcttctggaagagaaagccagataacaaagagagaacaatggcagagaaaagtgacattcaggtatttatacatctccacctcctgggattttggttggggctgtgttcctcggtggagacagctcctgtcagcgccctctttcctacctccagctcactcagctctgatgatactgttccctccctccagctgctagaactgtgcctcttgctttttcagggttggtaacggcttccctcccccaccccattactaatccctgggcacctcactgtcccgcattggttcccttatctggttcataactctcttagtattgtccccactgaattctgtttagttatgttcctttgcatgttttgtctgtttcttgagaggtctctgactgatatcacttgcccttatccaccaaggcaagcagtactgtaacaaactccccaggagtacattgtacattgtcagagagctgaacaaatgctgacaaaatgagaactgctggttggggccaaacattccactctctcgatgacctcaccaccgaatgtactacatgaactccactgcattccagcttagaaaagctgaccaaagatgaatgggcttccaaggaagaagaaacaattcagccacccatcttttttgggggcttcttgtgcgacagcccaaaaagacattctatcctctattaaagtcaaagttctaatcttgtggccactagctgctgttgggatgaatgcctaacctctgattggcctgttttggaaacatcaccctttatacctggaaattccacaacaggctttatatacccaataattaactatatttgagaaggggacacctatggcaagaagccttgaaagtgatccaggcatcagtaaagcaaaccttgtcctggagcctcctatcttattcagatggaattacagatatcaatgatcaatcacacagtgattacaggctttggaaatgagactccaccttcttaccaaggacaagcctgcaaggactttcttctgctgctgtgcctgaaactagccccttctggaaaaagagaatgtcactgaaaggaaaaatgatgactttgccacctgacattgtcactttgcattgggtcctgtccgaactgagatacccagaaagttctgtagcaatatggaaatggcacttacaaccaatggcacctacaacttgaacctacaaggttcaagtctggtccccaataccttagccaacttcaggaacaacaggtggctgcccacccattagacatggagagacccacctactgttaaacctaagctgttggcctattggggcctctttgacaagacttgcatctgacaagaagcatggttcactgttgaaatagcttgtctctgagatgggcaaattccatggaataccaatgccataaattgctgaggctcacaacgcttgcatgctgaataattggccaaacttcaggtgctgttcttggctgtagagcatactgctcccagattgatggaaatgaacctttacacaatatgtcaattaggattctccaaaaaacaaatgtgaagataggattagattcatgagagatatattcgggggctgggcagagggcaggaaagtcttatgaaggataaaagagaggaagcaggagtaggcaaggagtgccttcagaccacgatgcaggtctgacacctgtgaaaagagaagatgaaagaaggcggatttggcagggagagtctcgggttggactgcagctctgagaatgtctcagacaggccagtggagagtccttgagtcaaagctgcctggtagaaagtccagagacacacagaattggcctgcactaatcccctgccatgctcagccattggctaggagcagcccaggggaggtatggttttgatgcaaaagcatggtgagccgcagactggcattgtctgtcaactgtgctacctgcagcaggagatctgagtggcatattcccatggccatcacacacagaaacatcagtaatagcctagctatttagtcaggccatgggccacctaaagactgaattaataaaggcacatattaattatgtgcctttgggacataattatgggatctccccattgaaaagattataagtgacaaaatctagaggaaaacagctgcctgaaaagactgatcaagcatatatgggcatcatgtctacctaccacagcccattgaatctatgctctaactcaccacagtaatggaaccacccaaaagaccagggatacccaaccaggaattctttcatcaacacacatagtagccactgttactgaaaaagctcatactcttggccaactgtgccagtctgtccatcggtgacctgatgatgtctacaagcctagtaggtttagctgttttgggctacaagttacacagcaccatactaccttctgccttggccaaacaactaggcacccaggacttgaggaacaggcagaggagagtataatcagaaagaggacactctctcctcacactcttttttggaatagcacacagttgagagtatccaagtactttaggggaacagaaaccatgctaggtatttcaaaagagatttaatacaaggaattgttaaacatatatgggaaggttgaaagagcaaaggatgaatgctgagctaatccagaaatcaagacagtgctatggtctgactgtttgtgtccttccaaactgcatatgttgaaatcctaacccccaaagtgatggttttgggagatggggccttggacaggtgattaggtcattaacaggattagtgcccttataaaaggaactccagaaagctgccttgcctcttctaccacgtgagggcacagctagaaggtactatctatgaaccaggaagtgggccctcagcagtgaatctgcttggcaccttgatcttggacttcccagcctccagaattgcgagaaacagatttctgttgtttataagctatccagtctacagtattttgttacagcatcctgaacaaagacagactgccagaaatagttctcaccatagggctgtggaagcaaaggggaaaagatctttggttatagaacctcagggctaaaaagaggagccaccactggctggtgctccatgggctccctgagggcctaatgctctgctctctcaagagaggtcccacgaagttggcgttgagatctctgaaagaggacacctcacagctggtgcttgtatctcatggcaggtaacacacagcagatgctcaaaaccttgaaggtagggttgccagatttagtgcacacacacacacacacagacacagacacacacacacacacacacaggcacacacaggctcacacaccaccactgccatcagcattaccaccaccaacaaaaaacaagggaaataactgaactaaaatggaaaaaaaaccccaaaaaaattaaatttgaattatttgtacttgcctatgcatatatactttgaaataaaataagaataccacataaagcatgataaaaatcattctttatctgaaataactgaagaagcacataaattacctacctctttatttaattatacttccctgatgatttggctctccttaagttttcttagttttgcagaatttgtttataaaattccttgcatttactgtctatattgcatttacattgtaacagtttatacagtgttcatagccaacttattcttttgcccactgaacattcattattgagaaaacatgctcaacatagcattatgagctggtatactgaatatctgctggctgtcactggctgaatttcacaagcttggggctatcagtgatttactgacttttagatatgtggttattagagtgagtctgtcactggttgatttttcagaccataagtgatctctaattaatgctggttacttgttcatgacttgagacttggaccaaataatcatctttgcctttctttcctttttgagacgaagtctctctctgttgcctacactggagcgcagtggtttaatctcgaggctcactgcaaactccgcctcccgagttcaagcgattctcctgcttcagcctcctgagtagccaagattacaggcactcgccatgatgcctggctaatttttgtatttttagtagagacggggtttcaccatgctggccaggctggtctcaaactcctggcctcaggtgatccacctgcctcggcctcccaaagtgctgggattacagacatgagccactgcaccctgcctcatcttttccttccttgaatatgaaaaatcagtactttttcctctgaatccccacttttggtctactctcagccaaatctgcagtagagaccatatggactttatttgcagaggtatgggttttagttatgttgcgtttaggttacttaagatttaactactatggcagaaaagtagctctaactggcaatattttgttgtttactgaaagatatgaatagagggcatttagggcatcctgacaaagtcaacacaggatacaggacacaatcagtaaatacaggacatgtcctatgaagagaggacctacttgaagagggtgcctcttttttggtacttggacctttgatatgggacaacctcatacctaatgctttggatactgaaaggggactctggggctggggttcagaatgcctgaggaccttcagaggaaggcctgcagaagctgaaaaacagcgagagaatcctcctcgctccctgctttccattcttctatgagtacctcccagtatctaaaagcaactcagcttgttaaagcatcagggaaatgtagtgttcagccttccaggccccacatcactgagattatgcaagggtaggcccaagctaagacacaagaaataattaattaacacaagcaacaataccctcctcccatttagacttcagggaatggatggagagttctcataactcagatcgaggacaccttgatgaacatggacgctgactttgctttggatagctcccatggtgccttattccttatatcactcagttttttttttttttttgccaaaaagaaaaagacagctttattcaataaatggtatatggaaaactgaattttggcaaacagaaaaataaaattggacccttatttcaacactatataccaaagtcaattcaaaatggattaaaaacataaagattcctgtattagtttgctcaggaaaattgtcaacaagaaaaagaaagagagagagagagaaaagagaagagaagagaagaaaagaaaagaaaagaaaagaaaaaagacttaaacataagaccaagaaccctaaaactacttgaagaaaacataggggggtcagatgacagctgaaagaaggaaggaaggaaggaaagaaagagaaaggaaagaaagaaaacataggggaaacatacaagacattggtatgggtaatgatattttggatttgatcccaaaaggacgacaaaattaaatatagacaaatggtattacatcaaactaaagagcttcttagttcatgatgtgtagctaaaacaaactaaaaagcttctgcacagcaaaggaaacaatcaccagagtaaagagacaacctatggaatgggagaaaatatttgcaagccagacatctgacaaggggttaatatccaatacatataaggaactcaaacaactcaatagcaatgaaacaaacaaacaaaaaagcaattaaggcctgctttctgctgaccaagtcttcttccttacccctccctaataagaaggaagaaaaaaggcaattaaaaaaatgggtaactcctccttaatatagtggtaaaatttaaacattaaaaaagttttggggccagctcggtggctcacacctgtaa

SEQ ID NO: 97531 - DNA, 14023 bp, Homo sapiens
tttttaaaaagtgagatactgtggcatttgagacacactcacacctccagttcagtgcaattgaagctctactgctgataggtgtaggtaagaataaaagactccttctacccccatatctcagtctagggctccactggagggggaggatgccagcatttcttattccccaaaacttcatgttgcagacttcatgttgcagaagctctcttccggaaaagatggtctataagtagctatactgaaaaagaatgaatatctcaaataaacaacctaattttccatcttaatttattgtaaaaggaagagaaaagtaagcccaatgcaaatattttaaaaagttgtttcctcggaaagattaataaaagtagcaaaactttagctagtatgaccacaagaatgagagaaaaaattctaattgctaaaatcagaagtaaaagaggggactgtactaaaatctttacagaaataaaaggaattatgaagaaatacaatactaggaacaatgtatgccaacacataagacaactttgataaaatgaacaaattcctcgaaagacgcaaattgccaaactgactcaggataaaatagaaaatctgaataaacatatagtaagtaaagggattgatttagtaatcaaaatataaccacaaataaaagaccaatccagatatctttgcttctgaattctatgaaaaatttaaagaataattactatcaatttttcactacaccttctaacaagtaaaagataaatgaacatgtatgattcattttaggaggctggtattaccttgatactaaaacagacaaagaatcaaaaaaagaaaagaaaaaaagaaaaagaaaaaaatactacaggccagttggggtccttatgtgctgatgcactgcagatggaaatgtaaaatgttagagccactttagaaaacagtctggctgtttctccaaaaaaaagttaaacatagaattaacattgaccgagcagttccactgctagatacatacacaagagaaaaaaaaagcatgtatcaaacaaaacttttatacgaatattaatagtagcattattcataaaagcaaaaaagttgtaaaccaacttaaatgtacatcacctgataaatggataaacaaaatgttgtatatacaaacaattgagtattatttgtccactagcattactaaatagaactaatcttacaattaagatggaaatatgagttgaaaaactaaaaaaactaaaaagacaactagacctcataggaatatatgaaaatttccgcccaataatagaagattacacatttttctcacagtcacacagaacattctccagtatagacaatacgtcggggcataaaacaagcttcaatattttttaaatgattcaaatcttaacgtatgttctctgacccaaatgcaatgaaatgatgaatcaaaacagaggaaattcacaaatataggaaattaaacaacatactcctaaataaccaatgagtcaaagaaggaatcacaagagaaatgataaaatattttgatatgaatgaaaatatagacgcagtatatcaaaatgtatgctaaagctgtactctgagagaaatttatcattgtaaatgcctatatcaaaaacaaaacacaccttaataatttaaccttccacttcaatcacctgaagatgttaccaaaacaaacaccaggggttcagtctaggttctggggcttgcagcagagaaagccagtcactcagaagaattattgcaaagaatgaaggcctcaattgggtgctgcagccaaggagatgggatatcagtctaaaatccgtctccctgactgaataaaattcgtagtctagatagcagggaataaatgtaactatgtgtgggaaaacaggaaatgaagagaggtaaggaagtaatcatggtaaatgaggggcctggtgtcttattttctggatgcaatgatctagtgagtttcagttctttgatactttctgagaggcctatgggtcctttcctgaggaagaaactcagagaaaacaaatataagctttgttttcaagctttaagctttaagaccagaatagtcaacttctatgcaaaaacaaaatcaagaacaacaaaaaaactgtaaatgggactattaggttggtttcaaagacaatgagaaaaaaaaaagcaaagaaaaagcctacagaaggaaacgagattagcgaaaaaattcatataatagaaaacacagataaaaacaatagagaaaataaacaaaaccaaatttaggcactttggaaagataaataacattgacaaacttttagataggctgaccaagaaaaatagagaaaaaatcaaattactttattcaataatagaataaggtacgttgcttgtaacaagtcccaactaattccttgagatatgcatagctctgataccaaattcataaagatatcacaaaaaagaaaatgacagacccgtatctcctatgaatataaatgcaaaacttcaacaaaattctcaaacataaaatcaaaacttaacagggatttcaatgaatttgttttggacagtattcttttcacagcataaattaataagcatataatgttttcccattcatttaggtattctttaatttcctttagcagtgttttgtagtttttagtgcacaagtatttcacctctttttaaaagttttttttcccttggtattgtattattattaggatgatattttaaattgaatacttttaaaatttttttgtttttctttgctaatgtatagaaagataaataattctttcacacttattttgtgccatccaacattctaaaataatttgttaccactaataggtttttttttttgtaaattccttgggttttctatatataagatcatattatctgcaaacagagaaagtttttacttcttttctatttggatcccttttatttattattggccaatttttctgtctagaatgtccactaaaaagttgaatagcaatggtgaacccccacgtttattgcagtactatatagctaagatatggcttcaagctaaacatccatcaatatacaagtggataaagaaaatgtgttatatatacacaatgcaatactattcggccataaaatgaatgagattctgtcatccctggcaacatggatgagcctggaagacattggattaagcaaaatcagtcaggcacagaaatataaatatgatgtgatcttactcatatgtgggagcaaaaataaattttgaggttatagaagttgggagtaaaattgtgggtattagaggctggaaagtgagtgaagatggggaggtattggctaacagatgcaaaattacagctagataggaagaatgagttctggtgttcttcagaactgtaggatgattatggttaactgtaatttactgtatacgtttaaaaacctaaaagagaggattttgaatattcccaacacacacaaatcacccggattttgtcattatgcaatgtatgcacatgttgaagtgccattctgtattccccaaatatgtacaatttttacatgtcaaataaaaataaaaggaacaaaaaccaatgagctattatctcacctttttggatagctattatcagaaagataatacaacaagtctcgatgaggttttggagaaaagcaaagtgttgtacgctgttggtgggaatgtgaacgcatattacctttatggataacagtgtagagattacaattaaaaaatacatctagcttataattcattaatctcacttcttcatagatatccagtggaaataatattaggatttcaaaaatatatctgtatccctatgtttaatattgcgttattcacaattgcctagatacggaaacaaaccaaatacctaatgatagataaagaaaatgtggtgtaaatacacaatagaatgctgatgagcgttaaaaaataaagaaatcctgttatttgtggcaacatggatgaatctggaggacattatgctaagtgaaagaagccaggcatggaaagaaaaatatgtaagatctcatttatatgcggaatttaaatcatcaaactcatggaagcagagaggagagtggtgttttccaggggctggggagtgaatgcggagaatacgggagatatttgtcaaagggtacaaatttttagttatgcaaaatgaattagccctggagatctaatgtacagcaatgtgagtatagttaacaacattacattgtgtacttgaaatttgctaaaggtgtaaatcaagtgtggtcaccacaaaaaataaaaggaaaaataaaagaataaatatgcggggtgatggatatgttaattagcttgtttgtggcaattatttcacaatctgtacatatatcagaacatcgcgttgtacaccttaaacatatacaatttttatttgccaattatacctcagtaaacgtgaaaaaagagaaataagtttttccaattcatttatacctataaaaaagctcacagataaagaccaataccactaatatatatacatgcaaaattcctaaatgaaatatgagaaagataaatacaataaaaataatttttcatgtccaattggtttattcataacattacagcttaataagacttaatatagtaatcacagtatcaatgggttaaaggattattattccgaataaatcagatgacaaagagacatttaataaaattcaatataactttcaaatgtaagctctcttcaaataaaatcttcctttcttaacaaaatcaaagaaatctgtctttaaattatgatgaatatcatttgttccaaagaaaatatagaaaatgtatgttgcaaatcaaagattacatgcagagtctaataatcacctcattaatttacattatctgggaagttctgattcacataacaaaattataaaaataagtaaactaattgaaagtgggagataatatctttatttgcataggatattttctacctagaaaattcaagaaaatcaactgaattctgtttttttttttttcggagacggagtctcgttctgtcacccaggctggagtgcagtggcacgatctccactcactgcagcctccgcctcccgggttcaagcgattctcctgcctcagcctcttgagtagctgggactacaggcgcatgccaacacactcagctaattttctgtatttttagtagagatggggtttcactatgttagccaggatgatctcgatctcctgacctcgtgatttgcctgcctcagcctcccaaagtgtgggattacaggcgtgagccactgcgcctagctgaattcttagaactcatacaaaatgtgtgtaatctggttggatacagaaaaaatcactgaaaaacataacaaaaacagcaaaaaaaagtaaaattgtttaataacacatttaacaaaatatatgaaaagtctttatgtgtgtataactttatttgaatgtatagtcaaggcatgtgcttggcatggaaagacaatattttaacattctgaaatcctctctagttaatgtataggttagaaattccagtaaaaatctcaatagcatttgagcactaacaaaaagctttacatacatgtaactttattggaacgtagagtggaggtttgtgcctgggatggaaagataatattttaacattccaaattactccctaattaatgtataggtaagaaattccattaacaatttcaatagcgcttgagaactaacaaaaatattctgaagattatctggaaaaacattcctaaacatagccaggaataaataaaaagttaaacagtagaaaatttctctacaaaatattaaaataagagagttctaataagttacagtacagtagtattcatctaattcattgagaaaagaatcagaaaaaaccatacatgaaatacgctatcattcaatagtaataacagaagtacaaattgtaacagtataaattgtactttttcagtgggaaaatgaccacaaaaacacctttgaagactatatttattattggtgaagattggaggaaataaacttttcatatatcgactactgtaggaagstatgttcatgtgtataaaaaatcttatatattgcagagtgacaatactacctttgattctttcacagtttgcactcagtaaggagatgtctatataaaggacctaagagctactgaattccccagaaaaggctatttagagccattctgcctttggatattgcttaccttttttgctaataattcaaggaatatcagtaaaaaatagaattcggcacacaaacttgcaaaatgcctgacaactatttcttccttgagattttctgtctttagtttcatcttgtcataaatgtttaaacttgcaagttccataaaataaaaatcacaattatgtcagtaattactttgttttccagtcctgtttaataataagcaaacactgaaataattgaagggacaaaatgatcaacacgtctctgaatttaatcaggtgtttctaattgccatcaattacaaatgacatttcgttctttttctaactcaagttactccatctttatcctcatcaaaagagtgcattcttccaaactttttaactttcataagaaagaaaatgtgaggcaacaaaaaatctgtaagaccacagtaagttggccctattaaaattcacggcaattatattggcttaacaatatatttatataaagacatagtggctcctttattatcatctcattatctatcaattttggacaaaattttaatttcttaaaagtagagctaaaaacatatttttgttgttaaaaaacacctattttacatggccacaaacttcctaaacaagagtagacaaaagcaatcaacatcttgagagatgatgaagtaaaaatgtgcatctacagttattgtactattaagtctgtacatctttgatagtagtaatccaaaatctttggaatattaaaaacatgttttagttactgaatggagttacrtgtttccagttgaaactacatactttgtttcaattaagttcttctagccaaaacatcctcttactaagtggaccaggtggagtatccacttatctctaagtatggggtttcagttctctcatggcctcagaattatttaaacaagccaatcgtttttttctactggaaatagggagcagtgtaccctcttgatcctaggaagcctgcttcccatagtccctggttgtttactttgttcttgaatgcaaaccccaaccccatgtggcctgtgatgccttcctcttccaggctttgagtatatgtgaccaataaattgctgtggatatcatttatttagtatcagatgttgtgtgttcggctgtctcaataaccctagggagggaattccttcctcacaaatggggtgaataaaaacaaaaaataaataaatatgattcatgagaagtgttacggatagtcaatagtagttagtatatcagaacaactcatatacatatgttaagtattgacattggataagcaagtaatttataagacatagtcaaaattcagaatacaggcatgcctccttttattgtgcttcactttcttgtctttcacagataatgtgttttttacaaattgaacatttgtgtcaatcttgcatccagcaatcaatcagtgcctttttcccaacagaatgtgctgacttcatatttctgtgtaatattttggtaattcttatatttacaattttttattatatattctgatgacctttgatcagtgattcaaagcaattattctagtaattgttttgatgtaccacaaactatgcccatataaaatggtaaacttaatcagtgaatgtggtgtgtgttctgactgctcaacccacaggctgtgcccctatctctcttcatctcctcaggcctgagacaaaacaatgttgaaattaggccaactgagagccctataatggcatctaagtgtttcagtgaaaggaagaatcacatctctcactttaaatcaaaagctaggaatcattaaccttagtgaggaaggcatgttgaaagccacgatagaccccttgcaacatgttattagccaagctgtgaataaaaaggaaaagttcttgaagaaaattataagtgctactcaagtgaatacatgaattataagaaagcaaaacaaccttttttgctgatggggagaaagtttgagtggtctgaatagaagatcaaaaactagcctcaacattcccttaagccaaagcctaattcagagcaaggcccctaactcccttcaattctatgaaagcaaagagagccaagaaagctgcagaagaaaaatttgaagccagtatgacttttaagtaaagatgtctccctgacatcaaagcacaatgtgaagaagcaagtgtagaagcttcagcaaattttccagctctcactaagataacgatgaaggtggctacaataaacaacagatgttccatatagatgaagcagccttctatgaaaagaagatgccatctagaatttttacagctagaaaggagaagttgatgcctggcttcaaagcttaaaaggacaggctcactctcttgttaggggctaatgcagttggtgactttaagttgaaaccaatgctcatttactgttctgaaaattctagggctcttgagaattaatgctaaatctattctgtctgtgctatatacatgggaccacaaagcctggatgacatctccttacagcatggttgactgaatattttaagcccattgttgtgatacgctgctcagaacaaaagattaatttaaaaatattactgcgtattaattattcacttggtaacccaacagctcttgtggaactgtataaggaaattaatgttgttttcatgcctgctaacaaaacatcccttctttagcccatgtatcaaggaataatttctacttgcaagtctcattatttaagaaagacatttgtaaggctataggtgccatatctaaaaattcctctgggaaacgtaaattaaaaacttcctggaaaagattcattattctaaatgccattaaaaatatttgtgatccgttggaggtcagaatatcaacattaacagaagtttaatgaagttaattctaaccctcatggatgacttttatgggctcaatatttcagtggcagaagcaactgcagatgtggtagaaatagcaagagaactagaattacaagtggatcctgaatatatggctgaatggcagaaatcttataataaatcttgaaagcatgaagagtacctcttaagaatgagtgaagaacatggtttcctaaaatggaatctactggtgaagatgctgtgaacattgttaaaaagacaacaaagtattttgaatactacataaacttagttgataaagcagtggcagggtttgagagggttgactccaattttaaagaagttttactgtgggtaaaatgctataaaacagcattgcatgttacagaaaaatctttctgtaaatcattcaaggcaaagtccatcaatgtgacaaacatcgtcatgttattttaagaaattgccacaatcaccccaaccttcagcaaccatcaccctcatcaggcagcatacatcaacatcaaagccagatctcccctcagcagcaagataatggctcactggagtctcagatgattgttagtgttttatcagcaataaagtatttttaattaagatatgtacatggtttagacaatgctattgcccacttaatacagtatagtgtaaacttcatatgcactgaagaaacaaaaaacaatggtgacttgttttattgtgatatttactttatttatgtggtctgatatgaaacctgaagtatgtccaagatacgcctgcatttaatttgttatgtgggcctttgtgttccatgacttctgggataacttacttggcagtaaacctggatgccaccattacatcaatgtaatttccttcatggcactttttctgacacctcttacttctcgattctctatccaattttaaaaaaagaaggtgtcacacctctcaccactttttattactatgatgtattctcccaaagttattaaaaactaccagagtaccaaatgagggaatgatttgaaatactggtgatagtgttgagaaattgaatgagtgaaaagactgactaagcaaggtgattttcgtttcttttttaaagcaaaactgaaagagatgcattggagttttcagctgacaaattgtttttatattactcagagaatgtttttaaataattgtgtcacaacttttctcagaatgtgtctatagaagcaaataaaatggcacaaatgaatagttgcagaaccctgttttattcaaagctcaaaaaatgacattcatttaataagggattttttcacaaataaatgaattacttaaaaaatgctctattcatctcaataacatgcattttctttccatgtttaattgtaatgtatcaaatttgtagtttaattttgttgttttgatcaatgctatactaagaattacaatgacaacttagtacatgtgtgatttttaaaagttaaagtttagagttataggatactaagacatttccaatgagtatgacttttaaacataaaatatatgtaattaggatacaattctgttatgaattaagtggtaacaaacattcaaagagaaaaaagtttaaagatatccatgctttttcttataagcaagaccttgtttatatattcaaatcaacatggtgactagaatttagtgaatatattggaaagagcagagaaactattttgttactaatgaagtaacaatgaatgaagggctgtggatgaaggttggaagtaggtgtgattcctctcaccaagacagctaacaacctaataacataatttttggtttatgttctggcagttttaagctctgctgattcaaatgtttcagtttgcatgaagtgaatatttctaccagtaggcacaacaatggttttattcatttggatagtaagacttccacctggacatttttggtccttatgacactcaattgacagatgaaggaggagttaaactcctgggtgaggtgattaattccagttactcatatttcttagtacttctatatgcaacagtaaaatttaataaaaagggtaggacggctcattatgaatctatgttctctttacttttaaccaaccattctggtgatcagctatggtctcatggctgttatagaaacaagaaacaaagtaggtctgcacatgagttttcatacttatagaaatattttctttctccatctcccctattattttgtttaggatatacttgtagtggttaattttataatttaaaatttagatgaaataatatacctgtgggataaatactgaattagaagaattaacatcttacagtgttggattctgaggttttgagtcttcatttttggtgggagagtgtgagacaatctttgttttcataaagaactgttatagaagcacaatgttcttgttattttttgttacatagaattttaagtgagagaagatggtaagaatggattctaagcagccaggttcgtggactgtgttaggcatttctatttgctttatttccatcctttcatgcctctttttgtattgcagggtgttggacacttgcaaactaatttcctgacattcttgccagttagcttttattcaggatgtgtctattggaggcacagagggagaatgaaaggcagaagaaagaaagacatttttctttcttttcttgggtttcttataatgcctttgagaatgtcagaagcaggatggacaacctagtattccaggttctgcttgacattaaagttccaggggacattatggcagctgatgctccaccagtcttggtagtgtagtgcttgtaaccattggctctggcagcaacagcaataatgggtgactccaggctctctgtatctttcagggtcagcataaaataagtgatttaatgtatttaaattccacttgacataattacgtgactgatgtaaactgttcgttttaaaatttcagtattttaaatatgtctttctcactttatacaagtatgaaaaattttatgtgtcaatgtaaaaatatgcaaacacttttaaaggctaaacaggaaaaactaagacaactcttctgcaagctcaaggctgcctcatagtcacatctctaatttggttcacaggacagacaaaaagaggaagttcagggcgacaaaattccttttaagtaagtgagtcagaaattacacagattgtttccactaatttttcttttgaggtaatctagtgacctggccataaataatcaagactgagagtaggacacttaatattttactcaggtaaaattactgactttatgaaacagagagaaggtttttattgaaaaatagctgtcactccccacaatatgttcaaaagccaatatcagagtctttaatttacatctgaaatacctaatgaagtttctattttctggctttcaaagttctcttagcctgtagagcttgcctatgacctagaatttcctgttctagaaatatacattcacttaacaaatatttatacaacttttactatgttcccagcacacttttgggtggtaaaggtgtagttatgaataaggaaaacatgattcttaccctcatggagcttacaatctcctgaaataatatataactatatattataataatatataatataatatataatataatgtaataaagatgaagaaagatagtaccaaataatgaaaagtgttagaataaaagcagacagcaccctgcctaaaattttcaggcctaagacaaattgcaaacagaggctctgcatgattattacatatttaattatgtattcttcaaaagtgtcctttgaatagtcataaaattagagtgtataatgctacatattgtctcttcaaaaagtagaaataaagatagataaaattatttgattacagaatacacaaagagtcttacatcccaaatttagaaaaacaattaaaaagtaaattcttgggtaaaataggcaataaaaaaatttaaaaattcatacaaattaattataataacagtattagggcctgtagaggacagctaatggagtaatcagagaaaaatcaataaccttaaatgtgtatatcagtaaaaaaacagataattgaaatagacatctggctaagataagaaaaaataaaaaaagcagaaggaaagtattaataaatacaaaagcagaaatgaatagaataaataacagaacatataaataattctaaattgtgattatttgactaaaaacgaaaacaagcaaatcttttttaggtttttatttgttattaattagcacataataattgtacatatatatggagtacagtgtgatggtttgatacatatatacagtgtgtagtaatcaaatcagagtatttagcacatttaccacctcaaatgcatatcatttatttgttactaaaacatttaacgttctttcttctagctattttgaaatatacaatacactattgttaaccatagccaacctactaagcaatagaaaatctaaacttatacaaatgcaaaatgcactggaaactctcagcaatagaatcaaacaagcagaaaaaagaacttcagagcttgaagataaggtttttgaaataacccaatctgacaaagacaaagaaaaaagaatttaaaaaaaatgacaaagcctccaagatgtttgggattatgttaaatgacaaaccctaagaaaaattggcattctgaggaagaagagaaatgtaaaagtttgaaaaacttatttggagaaataatcgaggaagacttctctggccttgctagagatctagacatctaaatacaaggagctcaaaaaacaactgggaaatatatcgcaaaaagatcatcgctttgacacatagtcatc

SEQ ID NO: 97532 - DNA, 14917 bp, Homo sapiens
tctgcaaaacaagaggctgaggattgcgttagagataaaccagttcacgccggagccccgtgagggaagcgtctccgttgggtccggccgctctgcgggactctgaggaaaagctcgcaccaggcaagaataccctccaataccctcgggttcgtggacctgcctttccccattccctcagagcctctactcggtctcggcgcagtggctctcggggtctgacccggcgagcggcatttggggtgcgggccggcgagggctgggtctgtggagggccggcgggcagtcggaggaggcggaaactgcccctgaccgggcccggttctgggagttttcaatgtcggtcacgaggtgcttagcggttaagtgaggctcgcgacgtgggagctgggggacatttctgtcaggaaaggcgttttgagggcgcttgcggagtcaccggactcggtgaagggcgggcggcggcgtctcgggccccgggagccacttgctgggctgagccgcggccgctcgggccgggaggaggaggaggaggagggtgtgcgccggggcgcgggcgggggcgcgggcggccgcccttgggaggacgccctcgggaggaggggggcgcgggcagggcgggagcggatttgggcgggaagcggagccccgccagcgcccgccctggcagctgcgggctccgcgccgaccctccggcttcccctctcccccctcggccccgtcaggtggacgcggatctgtcaacatgggtaaaggagaccccaacaagccgcggggcaaaatgtcctcgtacgccttcttcgtgcagacctgccgggaagagcacaagaagaaacacccggactcttccgtcaatttcgcggaattctccaagaagtgttcggagagatggaaggtgaggcaggagagggacggagctcagggggtgcaggtgtggttttcggctaggagggccttaggcaggtagtaggcaactcatgagcttcaactttgccaccccagtgactcacctgaatatcttaagagttccaggcagacgattttaggtttttacttatataagacttcgaaagcaaaatgctgttaaggaaaatgtggtccttaaagatgatcttgtcgtctttggatgtttataggtaacaattttgctgtatttttggctcttattttatgtccacagaccatgtctgcaaaggagaagtcgaagtttgaagatatggcaaaaagtgacaaagctcgctatgacagggagatgaaaaattacgttcctcccaaaggtgataagaaggggaagaaaaaggaccccaatgctcctaaaaggccaccgtaagtttaaaataacccaaattgctccttggatttttccttcagtttattaaactctgttgcttcctttcagatctgccttcttcctgttttgctctgaacatcgcccaaagatcaaaagtgaacaccctggcctatccattggggatactgcaaagaaattgggtgaaatgtggtctgagcagtcagccaaagataaacaaccatatgaacagaaagcagctaagctaaaggagaaatatgaaaaggtacagtgtcatcttttttaaagccgtggataagactaggtataggtaataactgtagaaaacctgggaaatttagttaatcttgtattaatggttgtcagctatgttttgaaaaggcctaatgaaaattgtacacttcaacacaaggtaattgaaaccttccttttgactgaaaccagtgtttgtagcactagtatattcctgcagacagacttgtagttacttgtagttattgtatagtctgtatagtctgttatttttttttttaagcagagagtcaaagaaattgttttatgtagatatatataaaatgtgaaggtacaggagggactatggcactgtgtgtgatgtaaaagggtattggtagtgaaagtactgatactgctgtatcgcaacccttgtcattttacgtcattaacttgttaaagcctagtgggataagtgctctaaaaacttagactggttacctttttagacagttattagggttattggtcaatcatcttagattgtttacaactaagtggtttttcacagttgagtaatgataccggatgctttatttttttgacaatatttcaggatattgctgcatatcgtgccaagggcaaaagtgaagcaggaaagaagggccctggcaggccaacaggctcaaagaagaagaacgaaccagaagatgaggaggaggaggaggaagaagaagatgaagatgaggaggaagaggatgaagatgaagaataaatggctatcctttaatgatgcgtgtggaatgtgtgtgtgtgctcaggcaattattttgctaagaatgtgaattcaagtgcagctcaatactagcttcagtataaaaactgtacagatttttgtatagctgataagattctctgtagagaaaatacttttaaaaaatgcaggttgtagctttttgatgggctactcatacagttagattttacagcttctgatgttgaatgttcctaaatatttaatggtttttttaatttcttgtgtatggtagcacagcaaacttgtaggaattagtatcaatagtaaattttgggttttttaggatgttgcatttcgtttttttaaaaaaaattttgtaataaaattatgtatattatttctattgtctttgtcttaatatgctaagttaattttcactttaaaaaagccatttgaagaccagagctatgttgatttttttcggtatttctgcctagtagttcttagacacagttgacctagtaaaatgtttgagaattaaaaccaaacatgctcatatttgcaaaatgttctttaaaagttacatgttgaactcagtgaactttataagaatttatgcagttttacagaacgttaagttttgtacttgacgtttctgtttattagctaaattgttcctcaggtgtgtgtatatatatatactatatatatatatatatatatgtatatatatacacatatatacgtatatatacatatatatgtatatggagtctcactctgttgcccaggctggagtgcagtggcacgatcccagctcactgcaacctccgcctcccgggttcaagcgattcttctgcctcagcctccctggtagctggggctacagccatgtgccaccaagcccagctaatttatatttttagtagagacagggtttcaccatgttggtgaggctggtctggaactgacctcaaatgatctgcccacctcagcctcccaaagtgttgggattaacaggtgtgagccaccacgcctgtcccagtatattgtttaacaagtttattttgggtgaaaaattctctttaatgggaagaagaggggctagaatgtgaattcatatctaaaaggacaaactgaaacaaaattcaataacaagattaagttttctgctattaagttgagctgtttcaagatagaataccggattaggttttgagttacagtagtccctccttatctgtggggtgtaagacctacagtggatgcctgaaagagccaagagtattgaagccttgttttttcctatacatacgcaactgtgataaagtttaatttataaattaggcacagtaagattaacagcaataatgagaacatttataactagtaagttttgtgaatgtggtctgaaaatactgtactgtgggaaagtgaagccatggtaagggaggattactgtatatcttcattttggtcttaagctttagaattatgggtaactaagaagccgtttgagatggttatattccatgactaaacttacctgggaattgtattatttacggggaaggcagttattttaaaaatgcttgtttaaggaagcagttgctgtatttgaattaagataactttcattagagattattagtgaaggttggccatctggttggctatgtgcttatagaattatagaagtaagctatttgttgacaattttagagttaaatttgacaatcttggttacctaccaaactttaaaatagaagtcaggatttctgttacccaaccatgggagctttggttgtctcatattcggtaagataattctctgttaaatagtggggtattagaacaaatggacttaagtaaaatcttcaatcatctttatgattgccctctattaattatattctgagtgggagagacctcccaaagccatgaaagaattgataaattggcctacataaaaataagaaatcttacattcagacttggggctttcacttatcataagatgaaaactaattttcagtgtttcctggtggtagatgacttaatatgctaaaacatttggggtaatctattttagatactacctatgtctgagacccagttccctacctctaccaaatgctagcagtatgaactttacctacttcacagtgttttaatggtcgaagtgttattttaaagtagtaactactgcataaaggatatcgaataagagtttctaaaactgaaatagagtaagtaagtttgtttatttaagaatttctaaataaattagatccaagaggcagacctgttgggttccttgtcacctttctttttgggagtctgtgacttctttcattatcttttccataaaatatacttttaagtttctaagctaagaactattcttttaatcaagagttcctccagaatgaactcaggatttgagatggatccttcctggctcatgtttgatattcttgtaagtgtggatcaaaattccccaaattctcaataatcaagaccaggtgacttcaaggagtgaacatattggaaagaactaaaatgagggcaagaattagatctcacaccagccactacttggaagtgtgtttgtgaaacctgttttctttttaaaaatagatcatatcttaatagttcagaatgtaaaaggatatgtaatagtttatactctttcttgattctgctaccctgtcccaggaggcaacaccaacaatgcaataatctatcctttaagaaagacataggtgtaaaaaatatatatgtgtgtatatgttacagtgttacatagaagcttcctatatacaagtgtattcatctcattattttggagattgttttcagtaccccagagcaacagagctgccattttcctttaaatagctatctgtatggtatcccattgaatagatcataatttaaccagttccctaaggataataggataattatgggttttgttttgtttttgttttatatacatattttcttttttttttcagacggagtttcgctctgtcacccaggctggagtgcagtggcacatctcggctcactgcaagctccgcctcccgggttcacgccattctcctgctacagcctcccaagtatctgggactacaggcgcccaccaccaagcctggctaattttttctatttttagttagagaacacttgctgggtatggtggctcacgcctataatcccagcactttgggagtgtgaggtgggaggctcacttgagcccaggagtttgagactagtctagtcaacatagaccttgtttctaccaaaaatacaaaaattagccgggcatggtggtgcatgcctgtggtcctggctatttaggaggctgaggtggatcacttgagcctgggatgtctaggctataatgagctgtgatcatgccatcgcactccagcctgggcaacagaccaagacttggtctgaaaaaaacgaaaccatttgatgtcacatgtgaaaaaagacctacaagtgaagtaggtgggccaaaagacatgcacatttaaaaatgtgctaactatactagctaaaacctgtgcttaatatatgccagaaactgctctggtgctgttaatggagcctgctaaacaaaactgcttctcaacaatagaagttgtactacgctatggagtggacactccatagcaatgaaatgttttggagtgcctgtttcctcatctcagcaacataatagttctcaaacttcttagtctttgttattctgatatagataaaatgttttctattatgagtttcattttttttttatgtttaacagccatttgtggggctgagtgcagtggctcatgcctgtaatcccagcactttaggaggccgaagcaggcggatcacttgaggtcaggagttcaaaaccagcctggccaacatggtgaaaccctgtctctactaaaaatacaaaaacattagccgggtgtggtgatgggcacctgtaatcccagccacttgggaggctgaggcaggagaatcgcttgaacccgggaggcagaggtttgcagtgagtagagatcacgccactacactccagcctgggtgacaagagcaagactctgtctcaaaaaaaaaaaaaaaaaaaaaaaagccatttgtattctttcctgtggtcttttctcactggtctttttattaatagtttttgggaatactatatattaaggaaaatgacccttttgactttatgatgcttttttcatgcagagatttctttatgtaggcaaatttagcaattctttcactaaaacttttctagtgaggtccttcccactcaaagatcataaaagactataaaaataattatcctttkgtttctttttttaaatttttgattacatctttgatccttctggaattaattttggtgcaaggactgaggtaggggctcacgtttccttcccgatgtcagccactacttttggtcttttaatctataaaagcagggcactgggttagaatttcctaaattctcttatatatcaaacaaagcactcactgcaaacttgatcaatagaggaaagtatgctttttttgtattttaccttttaccagtttcacttactgtaaatcataaggttgtcttacatagtagaaaaatagcattatcttaaacctggctttttattactaaatatatcactaaaaatgctttacaaagcagtaatgattttatttcttggggaataaaatcaagaaagctaaaggagctgctatgccactgtgtaagatctagtcctttaaaaatgaaatttcatacctcaccatgtttggattagttcttcatgagattcctgttggagactgacagttttagagaaaggcagagtatttattgacattaggaaatgccaagacctatagagactagccagggaaaaggactggatgtggtgaagtgaagaacattttgaaagtaagctctgtgagggcagtaaaattttcacttttgtatactgctttgtctctaatgcaagaaacagtgttctaagcatgtttgtaaatatacaaatacccaggttaaaggggatagccactgtttagctcagtcctgttgctagatggaaatgtgaatataggattcccagatctctcaaattttcaagtggaactagaactcgtgaattctgaattttaaatacagtattggcaatgaattccaattttggggtcaaaacatgtctataggtaagattctgcccaaaggtcaccagtttgccacttctataaattaaatagtaaatataagtgtaataatttttacttgagtcaggtccaaggttaataaaagtttatatatgccttacagctaaccattgtttttataggtcagaaacccttcttgccctgattggaaactcaacttaccctgcagcaaaggtaaataaaaatgtttcaattgaacttcattgtgctcctgggcctttattcttcaagagttaacagtgcagacttctggtgatcctcatcctaggtgttaccacatctatagaatagtaactcaggagtgcaatagactgtcgcattaaaaggaaagaaaaataacttttcagcattatgtagcmctaaattttggaactggaaatggcctttatatcatctagtctttcattagaaaagcaggacaatcaacttggacattgtcctcgggcagataagagatagtaaaataccataatccattcatatttgtgtaattctttgattctccaaattttttccaaaaaatattaatggcttatacaaagaaaaacaagaacaaaatatacaaagaaaaaaacaaggttatgaaagaaattaaaagcaaggtagtgaatcacggatttgaatagggctctgtttttcttactggttttgtaacatcagacaactcatgtaacatttcggtttcctcatctgtaaaatttgaatgtttttgaggattaagtaaagtaatacatttaagacacttatcctggtggcaagaaatagtaaatgctcgataaatattagctaaaagtatatatgccgatatacatgggttaatacagatrctacgatggagtattagataaagttctagctcactgcagccttcaccttccagactcaagcgattcttctgcctcagcctctcaagcagctgggaccacagatgtgtgccaccacacatggctatgttgcccaggcaggtcttaaactcctggactcaagcagtcctctccccttggcctcccaaagtgctgcgattacaggtgtgagccactgtyccagccctgaggttcttgatagtctaggtagagaggaaaattaaagaagttatgtggaaaacatacattctttaggagagtttttcctggcaccaaataaatattcatcccacagagttagagggatattgagtactggacttgattatgtccttgaccccagtactaaatttgtgaacttggacaagttatttaacctatcatgtataaatgtattaacatactgtatgtttacttttagtcacttttgagattgataaaaagtgctgaataaagtgttttgggaagtgcctttttcattcaatcctgtacacctaaaacttgtttataacaactagtttattcatattcatctctgtaatattccattgtgtgattatatcacaattcatcctttctcctgtcaatgggcatttaggttgcttccagggttttcgctattgcaaatggctgtggtataaaaattcctgtatagctctcctgacactcaagcgtacttcccctccaataacctggattgtagattctagctgtttcagcagccggaaacctccactccgcctcctcagttcagcaataccaccattctgagccgcattccttgcaccatggttgggaatgtcctcccatggagacagacatggtgaacctgggattcaccttgtgtatttcctttcttttagatatcagtctgctttgactagtatccaattcctgaaaacagttgcttcatatattttgtccagcattaactgttgtttggggtagcaagataagtccacttaaaattatagccggaagtggaagtctattcatccctattttctattcaaatatttagttttgtttcggttagttaattcttaatacagctgtggtttatttgctcaaaccaaaagcccaagagaaatttcatttaaaggtaatttgaaggatacaatatcttagatattcttcaagatgcacttatcacatcacagtttcataatgctcaacacttcttaaagtgctttcacatggaataattttcacgtacctaaactattggcctattaggtatctggctttctggtgaggtacttgtcatgttttccattgaattatatatggatttttttcccaattatgtccagaaatgaaatatattccaagatccctatgagaaacttaagaaataaagaaactcccatttattctagtctggtgctgtcactttttcaaatttcttagcctacttctacagcagctaagaattgggagatatgacaatagacaggtcagttgagagaaagtttcccaaatcaatacagccacttacttgaatctgttagcaaccgtatcttctcttgagatgtgttttgtacaaggtgctatggactatttctaatttcattgtggtaggcttcccttctcttcatttttctccacttaacctgatctgtcaggttgtaaacaaatttgatttgaaggcatgtttgcttctaataggcaattctatagtacagccaagaaggcaattctatatacagccaagaaggatatatgttgctggggtaattttttataattaaaaaaagtataaacttaaaaaattggtatacataggcaaacaggtaaaaataaacctttgtttccttccaacagatacataagctctgagtattctaagcatgtgtaacagaatgctaagcaacagtcaagcacatactcaactaataactatggtctataatattttaggtattgtgtgtcttgtaaatagtaaaatcaagtaattctttcaaatgtgcagtgtttagatttgaaatgattacaagcaccaaaaaaacccatgaattaaaatacaatattttatttttgtcacctaaaaaacaagcaacccagaattaagatatacgtaagtttctcaaatttatcctaataaaattttgaatatttatacaatttctacagaaacatacagtgtatcaaaatctgcataaatcaaatttataaaatgtgtagaaatgcatagtgatattaccaacttacaaagcaaggatatgggaattatttccaaagcagcctacagtagaaaatagtcattatggcagcagcttctgatgtttttgtttggtaggttttctgatttcaatatatagaatcatattcatagagtatcttcttttaacgaattgcacaaagtacccatttaaaatttacatgcacagttcattgccacctttcttaggcctatgcatagttaataaggttataatctactcaacatggaaaatggagcctatttgcaaacacacaagtaattaaagtaccaattctctcttagtttctttttttatagttggtttattttgcaattataaatgttaaacatccctagagatgaaagttaaaatggttgatcacagatcagtagcaaaatacaaattgacaattcaaaattataaataaaactctgttgaggatgtttaactttgagtctccaaatttaagagctaagcttggaagaaacaaatttataggttatatttccctcttaaattaaaaaacaaacttcctctggcagtagtttgtgaattcctttcattgtaatgataccatgattacaggatcaaaaatgcttaacttacttgccattctgctcacatcatcacagttgtttttttttttttaagcactcaatgtaggcattttaatcttctggataacagagtatcttttgagaaattaaaatcgaattgaccatttgcaatatttggttttcctaataggtactgtcttagtaaatgtttaaatccaaacaaatcttctgttcaccggaaaaatactaataaaaatacactttctaaaaagaaattaagaaacactagggaacacctaatgtaacagaaagtagttcacgtttgttaataaactgtatttttaaatagtcctttgtttttaaattttaaaaacgtgcagataatgtcatttggatgaaaatataaatgaaacatcagttcactcttggcttcacaggttgcacagcttaggttataatgcacacaagttttataaggcctaatctaacaagggcttggaaagtcttacctcagtcagaatgaacctttgatgtgtttataacggtgttttgttgtttttgtcaccctcgctttcaagggataacaataacaactgataatagttttctgtattggcaggtattggagaaaagtaaatcccaaatgtcagtggacaatttttctctagttggaagactcctttgcaatcctagaagtaggtatggacagagggcactgggaatgccagtaggtaagggagtgaatgctacacaacttccaaccctatgggacagccttgggatgttccatattgtcatttctttttcaagccatacaaagttcaactttatagcaaatggcagcacataaattcatttctgagtagtaaaagtattccccatacaggtgacaagtccatcattaccatcctatagatttcatcacaagctcttgaaatatatactgagaaatgaaagaggcactaaatgtgttgaaattcacctttcaaaaaagcagcatgactgtgaaggaaggccaccttggctaataacctgtggcagtgcttcaaaaagatgtaaaattaaataaagacacaacaggttgataatcaccaagttatatatgaaagtctggctactccaaccttttttcaagtgtgttaaaaataaaaatcaaactgcctttcagacccctgagtgtaatcccaaagaagacaacatgctttaactctgtctaataaaacagagctaaaggcacaaattaccaacatcatcttaaaacacaacaaaaagatgtaaacatctacaaagtttaaggtaaaagcagtcttgtaaacagtaactgcagatgataatgttattgtaaaatcacagtttatcaatgtccttcaaactgatcaggaggttccaggtttggagctatacagagttaataacaatagttgcagcaggtttcaggcggttttcagtcctgtataaatttacttgtcagtaggtaggttattggtttatttttttctctctaaacactatggatgttattcatttcccatttttgagtcgttttactggagtcacaattggagatgaatacttgatgcaggacctctgagcgatctaaacactttcctgaaggaatatgagtaaatctgtgcaggttctggaaaacacagtaagaaaaaagtttcaaatttggacccttgatatcactgacatcagaaatcatcacttgactttcatgaggagacagtttaaggaaatggaaaagcttctcaaccacacctcagactttggatttctcttgattgtcagttttctggatttctcttgattgtcagttttctaagtcctaagatctttcattgttaagtcacaatatactgctggtatctcacactcaatgtatacaaacctaaattcattatctgcccctccaaatctatgtctcttgttcctatcctggctaatgacattcccagctctctagtccttaggaaatactgcacttttcctcattcactcacataccagtcactaaggatggatatgtgcaatgtctctggtttatattccttcccatcgccactgcagatgccctggtttggccctcaccatatgctgtaggtttcttcaatatagctcagagcttctcaaagtctggtcctcagactatccaggattgggtctgtaaggccgaaactattttcatcataatacgaagacaccattgccttttcactttagcaacatttataccgatagtgcaaaagcaatggtgagtaaaactgatggtgccttagcatgaatcaaactatgctagtacctatagttgtattgctcatggccacacacagttgaaaagtaaatgccggtttcacttaaggatgtcactgatgaaggagcaaaacattcgttttattcagtcttgacccctcagtatacttaaaaaaaattctatgagatgaagtgggaagtacgtatcaagtacttccatataatgaggtacaatgctcaaggatatcagtctacactggaaataacttttaagaaactaccacttaattattaagttgtggtgtacaataaaaaaacagccacaattatatgaacggctattaaagtactcgctccctttacaaactgtatgcttgtgtggggctgggtttccctcatatacttgaacgaaaacaacatttcagatcagaccaaatgaagcaggagtatgagaatccagctgtcttcttctattaaaccagacattaaagagatttgcaaaaatacagaattccattcttctcactattttttgtgggtaaacatagttatttttcattaaaaatgtcatttacattaatgtttaataagtatattattattacttttagatgaattaatatataaaaactttacaaatttctcagacactttccagttctggaaatattgctagtgataacctatataaacaaaagcaatttgggggtgggggagctcaaaaatttttaagagtgtaaagggaatccagaggacagaaagtttgagaactgctgctcaagctgatctcgttgcttcatcagtccatacctcacgtttccagaattattttcctaaaagtagccattgttttccatcactaccttcctcaaataaggtctatccctctccaaaacttaaaaaatgaagttcggtgctctttcctccaaagcacaattgagggataccaaatgaaatacaattctttgaattttctacatgttttcatgccacatctttgctcatccaggctttcttatttactttccatggaaagcctttttacacttcaggacttgtgcaatgacacttcctctatgaaactcctcagcagtaattcctcccatgaatcactcttttctgtcctatggcattttgcttatctctatttttgcatttctttcttctctgccattatataatagcgtgctttagctatatttttgaactcccctacagtctaacatattattggtccccaagtgaatgttcagtaatatctaacacacaaatgtatattcagtgctgcgtctttaaaatacctaaaacatgttatgtgtcattttttgttcaattacttcttgatgtagtttctggtgtgttagccctcttttactattttgctaatattgttctcactgacccctactatttattgctattatatatcctttttttttgtgaaaataaatgctccactctttaaggtttatgctattcttctcctt

SEQ ID NO: 97533 - DNA, 16518 bp, Homo sapiens
ttttctagatatacaatcatgtcgtctgcaaacagggagaatttgacttcctcttttccaaattgaatgccctttatttccttctcctgcctgattgccctggccagaacttccaacactatgttgaataggagtggtgagagagggcatccctgtcttgtgccagttttcaaagggaatgcttccagtttttgcccattcagtatgatattggctgtgggtttgtcatagatagctcttattattttgaaatacgtcccgtcaatacctaatttattgagagtttttagcatgaagtgttgttgaattttgtcaaaggccttttctgcatctattgagataatcatgtggtttttgtctttggctctgtttatatgctggattacatttattgatttgcgtatattggaccagccttgcatcccagggctaatatccagaatctacaatgaactcaaacaaatttacaagaaaaaaacaaacaaccccatcaaaaagtgggcaaaggacatgaacagacacttctcaaaagaagacatttatgcagccaaaaaacacatgaaaaaatgctcatcatcactggccatcagagaaatgcaaatcaaaaccacagtgagataccatctcacaccagttagaatggcaatcattaaaaaatcaggaaacaacaggtgctggagaggatgtggagaaataggaacacttttacactgttggtgggactgtaaactagttcaaccattgtggaagtcggtgcggcgattcctcaggatctagaactagaaataccatttgacccagccatcccattactgggtatatacccaaaggactataaatcatgctgctataaagacacatgcacacatatgtttattgcggcactattcacaatagcaaagacttggaaccatcccaaatgtccaacaatgatagactggattaagaaaatgtggcacatatacaccatggaatactatgcagccataaaaaatgatgagttcatgtcctttgtagggacatggatgaaattggaaatcatcattctcagtaaactatcgcaagaacaaaaaaccaaacaccgcatattctcactcataggtgggaattgaacaatgagatcacatggactcaggaaggggaacatcacactctggggactgttgtggggtggggggaggggggagggatagcattgggagatatacctaatgctagatgacgagttagtgggtgcagcgcaccagcgtggcacatgtatacatatgtaactaacctgcacaatgtgcacatgtaccctaaaacttaaagtataataataaaagaaaaaataatacatacttttattgaaaaaagaaaagctaaaagcaggaggagagcaatgcaggagggacattgtgggaagagtggagactgattaagggttacaaccctggccttgctttgccaagtaggtggattgcaaggagaatttgaaagctgagaaattattctgagattgggaagcttttcagcaaaataaaacctataactgaaagcaagtaaaggcatcagaaaagaagaatttcagccctttgcatgacaagtgtacatcttcagttctgataatcctcttacatcatgttcaccttgtgtctcagcatcacctcccactcatcatactccaaacatgctccatcacattctcaaacctgagtatgcattcgaattatctgggggctagttaaaacatgaattgttggtccacacgtcagagtcagagtttctgatttagtaggtctggggtttgtatttgcgtttgtaataaattttcagtaattgttgttgctgttcatgctggaacaactttgagaacctctgtcctaaactactaccttcaatttttgttatatcttgtcctccaaaccacagcttggaatcaactctaattctcatctttctagtcaagcgatgctccagtttacctttgctttccttggaattccatcttttcttttcaaactcacagctactaatcagacatgactgctactagcaacaagaaatcacatgatttcaataccactattttgaacaccctttacatgcaagttactgtggtagccactttaaaatatagtagcttgttaaataatactattagataagttgtattagcttcatttataggtgaagaaattcatttgtagtaagattaattcacttgtaatgggtattacagaaaggatataaatgaaggtcagtctgacatgaaaacccatgttcttattgtgtccaacctatattcagatgccacctgaggccaccacttctttcaggcagcccttcttgtatgattaagcaggtgatatagtaaaccgtctcccttctctcatctactaatgatatcccctttattatacagacttggcatatgatgatatagcattggaactcagtaccaaagggatagattaaccaagaaatatcactggaaaggccaggagtggtgttgattacctgtagtcccagctgcccaggaggttgatgcatgaggatgtcttgaggccaattcaaagctgcagtgctctgtgatcatgcctgtgaataaccacttcactccagcctgggcaacatagggaaatctcatgtctcggggtggggggcgggggcgggaaagaaggaaagaaatgttcctgggacaagtaaatgtctacatgacacaatagtagatggaataaaattctcaatttgaaaaataaaactgaaaattttagaagaaaacataagatactgaaatacaaactttaaaaattgataaacataaaaacctttaaaaatgcaacaaaagaaatggtaaataaaatcaaaggtaaatcataaagaaaaaaagttggcaatattgtcattgttttacatatatgcatattgaatccagtagaggagaaataacttgcccaaagcacacagccagtcaagtgacagggcaagattctaatccactgttgtgatatagatattaggatgaagaatgttttagttaattcaccactctgtgtttttaaattatttctcaataccaaacaaattaacttgtattttgtggactctatttatacaaatacaatttctcagttaaagcagatgaactaattctatatgcattatcatagatataccacataaatgtaaatattgaataagactagtaagactagttaattcacaatgtgtacaaaatgatattttttaagtttaaaacacagaaatcttatgtattatttgtaaatacaaatatatgaatcgaaagtataaaatcatggacaagaagaatacataccaatttcagactactggtaatctctgaagaaggaagaaggaaacagaaggggtcagggtggccttaattgtataagtgatgtttcattattatgtagctttaaaaatctgaaccaaatatggcaaagtgctaatgcctgttagattaatgtggccagtacttgttttagttttttctcttcacttttcaggatttttgaaattttttatggctaaaaatagaaaatttaacaaaggtttttcatgggttgaaataaattttggatattcttggttaaaacacaagaattttctttgctgcaaaacttttccatcattaatatgctaatggaaatatgaattgccaagaggataatgtgctatgaaatatttcccaatcttattttaccatggaatccttttatttttgtcttaatgaaacatctattaacaactcatggatattttgggaaatgctgttatacatcacagcacttaattttccctaattgtttcatgtaatttaacttaattttcctgattatatttttcatctctttgataccgagaccaaagtcttattcccttttaggtagacatataatggatataaaagtaatactttgatgggtttgtttgatttttctgagaaattattgtgtaggtcatcatacttaatgtaggtttggggtcaagggagagaagtaataaaaattgcccttgcacacagttttatatggcactaaaaagcaaatctaaggaacacaaagatcataaggtcaatggtatttattttcaaacaaatggaatatatttatgccaaaactttgccagacctgtttctgtagacatctgtccttcatttattcattcatttatttcaacaaatattttcaaataatctgaggagaaattatactttaataatatatgggtagtagataaaattcagtgcatcagatttctcagaattatatcatcaataatttctcagagtaaaataacttaacccttttaaaactatattaagtgtaagtccaatttaccattgtatttaaataattgattcatttaaatatttttgaatgctatacacatcttaaattcattggttagcaagggtacaattttaatacaataataaataaagtaaatagaattgactaagcaaaaatttattgacttgaaattttatttcttacgtattgccacacatataaggctcccttagccaagttaatgtcagaagcaaacacctctcatccctactccttcaataatttataaatgtattaatatgggtattaaatgaaaatatcaaatttttaaagttatgtgtaaagatctagtacctatgatgaatagctaacccttgtctatcttaatgtttcagaagagcagtttgtgattctcatttcctaatgattaccttttataccattttgtatttggtaaaattatgctgctatttgttgaaggataaaacatttaaatctcattttttataaattttattttgctgtaattcatgccgctctaaaagctgtttcatggacttatacaaaagaaaacatctgtgctttgcagaaatataatttgtatagagttgaaatcttattgtaatataatttaatacctttaatattgtttaggttaatttagaacccagattttcatagaagaaatttacatcaatactaataaaataatctgtgttttcaaaccattattgtattggaaactaatactgaaaacagtttttaatcaattctattacagagattattcaggtatccaaaagttttcaaagatatgatctttcatctgctttgtcgttttagtcttggaaatatagtgatataaagagtaaatgtttatcttctcaaattttatcatattttaacattgatctgaaatgttaatgataaattaattttatgtaagacaaaggacagatggaatgaataatagattatgtgctttgagtgcttctggtaatgttagtactttagcatttttatataatgtgatcatgactcacagtgaagttacagttaataattgtgtaaaaattttctgctgctgaaggaattcatatttgctttaaactgtcctgctacagcttatcagtatttcaggcagatgtccctcttaactgtgtaactcatttatctcactgccagctgaaatagtatgaaacaactcaattctgccagttagcagaagtcaatgacaagacattaactcaatgcttataaccacctgggtaataaaattatatcagcagtagtctgcttatgctactgtaagaaaatggaatgatgtattgtgctacaaattaattagcatatatatattaatgaagattaaacatgtgatatttaattttgtgaataatttcttgtatgaggaaattttacagatgggcctcattatgtatgcaggtatagcaatggacacaaataacttagagttttaattccttaaaagtgtgtgattatcaaagtgtacacgcccacctattgctcctggatattttcctgtgctcctatacggaggacttgcttgaaagatggttgtgtgtatgttagggggtggcagaaaggatatatacacatacgacataaaccttgtatagagtaaaaacttagaatgaagaatgtcttaattatctattgctttgtaccaagtggcctcaaacctttgtggcttataacaatgracatttattatctcacacagactctggggatccagaattcaggagtggcttggctgagtgattctagcttggcagctctcatagggttacagtggagttgtcagctggggttccagtcatctgaaggcttgaccggagcaagaaggtctgctaccaagcttgcttaattatgtgatgggcagttgacgctggctctcagtttctcatcatgtgggccattccactgagctacttgagtgtcttttttacattgcaacaggctctcctagagtgaatgatatgagagagtaaggtagaagcaacagtgagttttataaactaaccttggaagtcatacactctcatttctgcatatcatattgggtatgcaggttagctctgatcagtgttggggagagttatgtgagtgtgtgtgtaacagaatgtgacaatcattagaggaagtcaccttagagattggctaccactggtggggagggaaagacatagcatgtatataattttaaagaactgctgtatcttaattataattcagggtaatgaaaatatcaatcactaaaaataatttgactgatttctgctaggtgaagtgtcacatgcttttttatattaatgtttgtgcttataagtcacttgttcatgccaataactgtcaatcaggttatgtggatagaactgtcattttatactgggaaaactctggtgtcacacatcaagatggtgccagagttataattagaggaatgatatttagggtttctgacttttaatctttggtcattgcatcctactagcccaggagtgcccccaagagattatttaaatgctaattgctgaaatagatcaatatattatggattcatttccagccattgctctatgaaattgtaattcaggaagatgtcaacttattgtatctattctgctggtacatgttatgtgctcctacattttaagacctttgtgacacattgtgataatgaaacaataagatttattagtaaagacagtgagtaatttacctctacatacatttcactataaatatcaagatatggtaaaaggaaatacatccatcaataccagacctgctgaattttagctatgaatctgtactttcaatatagaaaccagaagtggaggtgtgaagagctattagcactattaaggtatattaggggagagggagggattgatggccatgttttttaaaaattgtggctcagggtattgttcttacatctctttcaatggaaatagactccattctcatcactaggtgggctgctaaagtaaatggcaagagcaacttaagacgttttgaagaggagatgttaaggtcagtttagaagctcactttctttgtttaaggctaagacatattcataagatgcactgtttctgatgaatggctaatttgattgaagggagtgcaaggatgcacctggtatctctttgctccataggattacatttcctggatgtattttactacccagttccgggaagccaactgtctagtattgtcagctgcgtaacattagatatttttgtatttaattaggctaagtgtctgatttacaacacctgaaccaaggcttcagcatggtcattcaactcaaagagaccaacacccaacatgaataactctgttactgccctgctgcttgacactcatggtgctttaatagacccaatgactattattagaataaaaatactgttctacttgcaaacctcaattactggaaaaaaatttgaagaataattttcacatatgcttgttgtgggagcaaggaactcctttttgactgctgtagaatttatttcctgggcctggtatgcagagggtggaaggtgggaattgtgaaggttatgctgcatttttttttgtctagtcatatgcaaactagatcaagaaattaatgctttgcccagattcttggaatggtgagtagggaaaagtttaataaaacaagtatttacaaagatgtggttagagtttagggaaaataatagaccgtggtgcaatgcctctgtgagtgtaacagtagcgagctgttgctatctctgggtgattaggggcagaggaagggagaagtactagagtccagggtggactgtgtcatttgacaggagctgtagctttcaacagagggatgcagccaaccagtagtaacctgactgggggaaaaaaaaaaacaaaacaggaaaatgaatgccctgacctcactgtcctttcacctctaactgattctgtccacacaggctccagggcacagagcaatgtgtggatccaaagggacaaaaggaagataccaaggacaaaagcatacttaaaattggcaggattaatatctaaatgtctttgtttgccttatttcactgaaactaaacattgtgtgttgatctctggagctggattgtctgggtttgaattctagctccaacactgactttgggctggtgacttactctctctgtcccacaactgtgaaagaagatgattatggggctaagctgacagggttggagtaatgaataaatgaacctatgtgtataaatacttgaactaatgcctggcccatagtaagcattatacctctttactgttattattaaatcccgtatcctgtagttgtttgctcctrtttaagacaaataatgtacattgaattaagttggatttctgttcatagtgactatttttcagtattcctttggtattgggctatatcctgggattaaatatccagtttgcagtaatagaattgagatcctcagagtcctcactttcagcaaaaaaagagatcttttgctgaaaaccttcccctgaatatcttcatgacaaccaagaaatctggtgaatttcttttctggaaaagttgactgactggattgmccctttgagaattaaatttttggatggaaaaatttagtcaactgctcctgctttctccaataaatgaatcccttcaggagcagcattttaaatgtgtttattgcacataatggtagaaaaaacaaaaatgaatctttgacttagaacaatgccttttcatgggatttattgtctaattaagcaatttccaataaaacaagcatttaaattttttcaagaacaaacatccataataatattaaaaagtagaatgagaaaatcacactatagtttagaaggcctgcattcacatcactggctctgtggttttcagactttggttttagccatggaaccctttgaacatcatatccttacacatatgaattatatgaaagaaggagccttctggctcaagcccacctgatgagccctgtttcccactgctctgagttaactccaatggccgggggctaggttgctgaggaggacagtgtgaaggctaccttatgagtctctgaattcccttacacccttgggtgcaggacttagtcacccccttgtcttttggagtcctttttcaagtgcagagttctggacttcaagacagtcttctctgaaaatatttgtgttagtgtgaaaaaaaaggcatttaatgagggctttaagaacagaaggaaacaccagagagaatttaaataagacgatcagcatttcgttttcatgacccaccatgattgcattggaaacttgacaagaagtctgtgaccaagagttagtgggtttcaggagttcaggctccccacatcccatgttaaacaattcatctgagtgaaagttgacgaatagcccttcttagatgaccacacacagtcttccaggcaagagtttcaggaggccattcaaagagtaatttggcataactaaattaaaccttgtttttgctactactaagatctttatatacatacaatatttaaaacaatctcaaggccaggcatggtggctcatgcctgtaatcccagcactttgggaggctgaggcatgcrgatttcctgaggtcaggagtttaagaccagcctggccaacgtggtgaaatcccatctctactaaaaacacaaaaattagccaggcatggtggtgggtgcctgtagtcccagctactcaggaggctgaggcagaagaatcacttgaacttgggaggcaaaggttgaggtgagccaggatcgcgccactgcattccagcctgggtgacagagtgagacttcgtctcaaaaaaaaaaaaaaaaaaaaaagaaatcatggtgtgtgcaggggatggcagtgtatacctctctttctcactcttactattaatttattggaagcttgtttttgtcaggctctaagctgagttctctacatcatcttttataaaactaataatattattattgtgataagaaaattgaagctgacctaagtagcttcagtaagatcttaccattagcatccattcatagcccatgctcttaactacagcgctaaatgcattatacaaacttgacaaacttcagctctacaaattatcacaaaaaataataacagcaatataaatttgaaatgtcaaggatcatagtaaatttatggtaaacatttatggcagaaaacaaaagacaacacagattttattcaggattatatgtttctacacctttggttggaagtttagggaggaatttggtcatagcagttctcattgtgattggtgaatgatgtaacaaaggcattggcttctaagtggctttcaaagaaaggataaattaaagtcgagatggacctgaggaagaccacatgagggctgatggggaagaggcatttgaaggtttgcttattcttttcctgtaccttcatgaagatgtctgtttcaggcaattaggaattttcaggaaggtagcattattccacttttcccacatttgcatatgcttgagagtttcatatggctgatttctacttaccactccattctcatatcaaacattgcctacttggagatggacatttggcaagcacttccccctttctcctctctagccagcccctctcaagatgttggaatctcatgactatttttctttctccaaaacaggaatcactatctgaaattacctggttgatttttttaaattgtctgtttctacaaaatagaatataaaatccacaaagcaggcatcttgttgctgtggcctaagtgcttgtgctcccctagaattcatatgtttaaatcctaatccccaatgtgatggtattaggcgttgggggcctttggaaggtaatttaatcatgaaggcaaagccctcctggatcggattagtgcccttttataaaagagacccccaggccaggtgcagtggctcatgcctgtaatcccagcacttgggaggccgaggcaagtggatcacctgaggtcaggagttctagactagcctggccaacatggtgaaaccctgtctctaccaaaaatacaaaaactagctgggaatggtggcaggcgcctgtaatcccagctactcaggaggctgagccaggagaatcacttgaacccaggaggtggaggttgcagtgagccgagactgtgccatcacactccagcctgggggacaagagggagagttcgtctcaaaaaaaaaaagagagagaccccagagagcggccttgcccctcctaccatgtgaggacacagccacagtttaccagacaccaaatctcctggcactttgattatgtacttcccagctttccccctaacacaccccagaactgtgagaagtaaatttgttttttcataagccacccagtatatggtattctggtaaagcagcctgaatgggctaagacacttgtctttgtttctttcagtgtccgcagaatctagaatagtgtccagtacatagaaggcagtgcatacatatttgctcattaaattaatattctgaagctcttgaagtgccctgtcatattatgaatttcagccacataccattttaaatgaagtttataaagagttcttaatgacattttaagattcttaatatatgatgtgaaaaaattaaaaagctatatgtcaaatttttaattcagcatgattttgtgtacatatttgatagagaaaagcttagagtaatatcaaaaaatatagttaccgtggtggtgggttttgggtaattttctcttgtgcttttactacagtataatgagcacaaattacttttacaaggaaaatgtaaaataatcaggaactaaaaaaagtttgaaatagatcaacaattttccaatgccacagtttttgctttcagatacctttttgagttgcacattagaggctctgcttaggtagttgtgacaattacaataatggtatgatgatgatgatgacgacgactaaagtgagacataataaaagacagcaaagaaaggaacagaaaattttggggaggtggggatataagaatcgtctgctacatttttttcctcataaacttgcccaagctcaagtagtaatgtttacattatcagtcttttcttggtcttttagaagatgggatatagaaaaaggtatagaaaaatcaaccaagacaatctgaaaatgttatattatttggacaaatggtgattcacttggaacttgatgtattactaatgttttagtaatatcgggtttatagtgagtatgtagatgagatcataatctttgacctgacttacaaaatcagctagctggactgtaagttgatgagggtaggaactgtgattttttcagttacaactgtatcctcagggtctagcatggtgctgtatacctaaaaggtacttagctattttttaatgagtaataaactggtcatgggattttatttcaagatatgaagactgaagttattttcctgctgtattacgatattcttatactaaattttatactactatcctgcttttgagtaactaagattgagcaatgactgatttctttatttcacctagagtcaattgaattgggttagcaaagtttaccttcatattttagtgtcttataaatggctatggcagatcaaattgccccaacttagatatataaatgtatcaaacaaatctcaaagttttgctggagtattgcaagaaaagtacaaaaatttaaaaatcaattttagaagtaactttaaagctcatcttaaatgttatattaagggtgtagaggaaattgttttattgtagccatcagttatgaaaatatatgcaaatattcttttaactctatcctatagtggtaattgttatgaagacttctattttttaaagcattggttctcaaaatggttgcatattggaatcacgtgagagagcaataaacaatactaacgcctgagtcccagcctaagtattctgatttagttgatctggggggcagtctggggattggagtgtttcaaagctccataggtgattctaatgcccgaccaaaggtaagaaccactgatttaaactcttaacacactatctacttatactatagtattgttttccaaaaaaatacttacttttgttagctcacgacctgtaatgtgttctgatttacagggagtgtccttccaaacaatgtctacagaggatttctagatgataaaaaatttctcttttagatagaatgacaagcagattatttgccttcctgttaggattactgtcaagggtaattctgtagcttctgtagctatgctgctctttataataatttttttttagttcttcttagcattatgtcctgatctgtacctcactgaagttacacctaatgtcctccttttcaaaagtacattagggaggactggcacattagagattttattctttgacttgaaattttagaataaaattgaaaaaaatgaatgtatgagaaagttaaaataggaatagtatattgaacaaaccaaaatgtgccctgtggagctcataaagagaaaaagaaatttgaaaattttaatacaactctgctttatagaggaataaaaaatgaggtgaaacatccttcatttcccaggaattcagaaacttaagtcacattcaatttggaactgacaagtctatctgaagaaacaattagtttagaaaatttggaagtaaaaaatccattgtatttgatctttaggtttattttagtttggtgatttaaaaacattctttgcctattgttttaaaaattaattgttgagtgaaaactaatgggatttcataattttacttctcatacactaatgcattttaaagtttcaactatagttcttgaggaaactcaggtaatcttgaacacactgaaaataaggagtaagacaaatacaagtaatagaagctctaaatgtgggacaaataaaaacataaggcatgatatttaaggtctattactcaatacgtaggtgatgaaaatgcaatagaactctacattacataataagccaaattaatttgcatctgagctacctacaaatattttgagccagcttatcctgatacaggttttcaagctatgtgcaaaagaggcgtttaattattttattgtgtatttgccaaataaaatgagatcaatgtgccacaagtgaattaaatttatgtttgttctttattattgctataataacttcttttttagtaaatgaaaatgaaatcaggtaacctgctaaagttttcttgccagctactgaaagagcatctgcaaatttagtaattcctctagggagagtataggctaactgaagagctattcctttgtcagtgatatatgatagctggtggcattctgtgttggattaatcagttattattgtgtaagtaaatgaactgatatgaacctctaaagcagataatggcaaagtggcagttaattattctatatagaaaaattaaacatctaattagattcttactaggaaataccttcatgttgattatgaatccaaagtgactcagcatgtctacaaactggattatctggatctaaagttatcataaaaataatggtgttggaagagatagtttgctctcaaaatattaaatgataggcctagacttaattagatgccatttatttcctcattatttattaagtagtaaattcttaggtttcccattttcgcctcttaatgttgctttgtatgatcatatattgagtgcttactgtaagtcagatactgggttaagcagtgagcatgcatcatattattgaatctttacaaacatgctaagaggcaggggccatgattcctcctttatactcatgagaaaactgagcctgagagttaaataactggtccatggttttaggccttacatttaagtctttaatccatcatatttaagtctttaatccatctttagttaacttttgtataaggtgtaaggaaggggatcagtttcagttttctgcatatggctagccagttttcccaaaatgtggcacatatacaccatggagtactatgcagccctaaaaaaggatgagttcatgtcgtttgcagggacatggatgaagctggaaaccgtcattctcagcaaactaacacaggaacagaaaaccaaacactgcatgttctcactcacatgtgggggttgaacaatgagaacacatggacacagagaggggaacatcacacactggggcctgtcaggggatggggggcaaggggagggatagtattaggagaaatacctatgtagatgacgggttgatgggtgcagcaaaccaccatagcacatgtatacctatgtaacaaacctgcacgtttggcacatttatcccagaacttaaatttaaaaaataaaaattaaaaataactggtccacgttgctaccgtcaggaagtgacagaacccgcacggtgtcagcaagtggaacacattctaaatcattcaagacatggacttgtttggtgttaacatcatttgatactctgtaaattgtattggttccactcatgtttctcaatggtattctcttcaaaagttatttatcagttgctggcttttgttgtgttttggtgtgggctttttggcacaacctcatttccttgaccaggatgaagcctaggaagagtgctcttaggagtctaattatttatagccgagtttcccaaccatggctttaacatttggattaaattattcttcatagtgaggggctgccctgtgcattttaaaatgtttaacagcatccctagactttacccactaggtgccaaacttcctcctttttttgggagaaccaagaatgtcttcagagagtttgccagatgtcctgtaaggggcaaaattggccttggttgagaaccactggtttatataatcaagaaaggctattggataattttgcctaatcacaactatcacaccactatgccatggttgaaacactataaagtgttgtcaaagaaaacttgaactgtgtggagttaaacaggcagcaaaactttttacaagactattgtaagccgggcgcagtggttcatgcccgtaaacccagcactttgggaggccgagggggcagaccactcaaggtcaggggttcgagaccagcctggccaacatggtga

SEQ ID NO: 97534 - DNA, 13661 bp, Homo sapiens
ggagactgaatatacgacttcctgctattctgcaaactccagcatgctatctaagctttgtctaccatcaccaccacactgatccagggcccgtgagggagacaatacttcgaggttaaagaatagtgccaggcaacaacaggtttaagttcctaaaaatgccaatcaggactgagggaaaggggacaactaaaaacaccatggggctggtctggtcagctggcaaaagagaaaagccacagacaggtggcgaaaaagaggccgaccctgctcatcatcccctcacaggccctgtctggctgcaggtagtctatgtgaggcagggccaggcaaagagcctgagggccacagattcaggacccagctctgccacgtcctcagtgggtgacctcagttaagtcaccagacctctacgagtcatggcttcctattcgataaaatgcagcaaatgattccaacctcataggattgctggggggaagagatggatagaagttttttgccagtaccgggccaggccaaatagtggccctgtaaaggccaatgtttactgttcaataaacgtagggtaattctgtgggctcttctgccacaattctccagcctggtagaagccacaatcacacagttccccagaggaggcaggtaattaaacccctgactgttccccacgcatctcagggcctccactgttacattcgtcctgcttggaatgcccttccctcactggccctgcctccatcagctagccaaattatcttcatccttcaaggcctacctccactcaaaagccctccctgatggctttagcccatctcattattgccctcttccaaaagaaatagaatacctggtgattatcaagcacgtatgctgtaccaaaacactgtgctaacctcatctccagcaccaactcactgaatcttcacaatcatcttattaagtactattaattctgctttacaaataaagacacttaagattactaacacagctagaaagcggcagagttcagattcaaacctagagccatctcacactgcaaaacctagagccttaaccactacatcatcctacttcccacagaactctgaactggcctccctatcgtgcttaattctaccctggcttacttgctacgatttctcaggctcccaccctgaacgtgaatgatccaactccacctttttgcattatggcctgaaaaaggacaggacactaagagctggcttcagaccccattccttacttgtgggtaactttgaacatgaaagttcccacctgtaaaatgagtacaataccaccaatctttaagggttgttgtaattagaagacttttataaatcacagggtctttaactttcctgtcttaaacttttggtttttggctgactcttttaccacctccttattcgaggcctctcccacagttcggcccccctccaacaagcttccgtcccccgacagatggacttgtttccttgagtttcctaagtactttatgtaacactcttactccactggaaacacatcgtctaataaactttaagtgtctttatccactctgtcttccccgagcaggctagcttttcctcgagggcagcggctccatcctgctcctctctgggaaagcttccagaacgaggcaagcccaaagttctcagttgggtttgccccaggccagaacccgtgggcggcggcttggcctcccttccccagggccaacgagctcacctggccttagcgcacagggccttgacttcgctctccttgatgagctcgcagcgacgcagctgctcgatctgccggtccaggtcgctgatctccgccatggcccacccccggcgcgggtcagagtcggggccgccgccccctccgcaccgcacaggggtctcctgggaaaggccaagacgagcccgcggatcagtgtccgtccggggctcggagcggacaactcgattctagagccggcccggctcccccacccccgcctcccctcacatcggccccaggaccccccggcgtccaacggcctggccgcacccccgctaactcccgtcgaaccccgcggtcccgcgctaaggacggtgacttagaggagtctcgcactattaccgccgctgcgactccggttccggctctccggctccctgcctccctctttcactccgctttcgaccgccgccgccgccgccgccgccgctcctacttccggccccgccgcggaagcaaaggaggccagttccgccgcgcgccggatgtggcgtcatacacgctcctctcctttcgcagcgacccctgcaccacttctccagcctgagatcgggaaggaggtggaggaacccggtggcggccagtggcagttttgtgggctctgccgctgggcgatgtggaggctattagaaaccctagaccagtcccctcccatatcatttcataaaaatgtttaaacaactgtcttttctttttttgagacggagttttgctgttgcccaggccggggtgcaatggcacgaactcggctcaccgcaacttccgcctcccgggttccagcaattctcctgcctcagcctcctgagtagctgggattacaggcatgcgctaccacgctgggctaattttgtatttttaatagagacggggtttctccatgttggtcaggctggtctctaactccctacctcaggtgatccgcgcccccacccaccaccacccttcggcctcccaaagtgctgggattacaggcgtgagccaccgcgcccggccacaactttcttttttctaaattagagacagggtctcgctctatcgctcaggctggagtcggtggggctatcataggtcactgtgacctcgaactcctgggcacaagctatcttcccgcctcgggcctcccaaagtgctgggattacaggcgtgagccaccgcgcccggccatcccccatttcagctagggaaacaagccgagctggggctaggctttgtaactttattacactttttttttttaacattacactttttttttaatgttacacatttttgttacttgttttgtcagccttccccaccacagtccttggaggatccaactttgtctttttaaatattgcagccccagtggttagaataaggcctggcacggtaggcatatatagatacttgttaatacttgttcaatggatgagggaagccaagttcagatctcttcctgtgccgtcagagaaatatttgccgtggacaacttcagaagttaacagattggagtccacttttcccacgccaagcctgtgcctcagtcagcatgacttctctgattccaaaatggcactcttgacatttcttagttgcttccgtttttctttttgagacagagtctcactctctcgctctgtcgcccaggctgcagtccagtggcgccatctcggctcactgcaagctccgcctcccgggttcacgccattctcttgcctctgcctcctgaatagctgggactacaggcgcccgccaccaggcccggctaatttttttgtattttttagtggagacggggtttcaccgtgttagccaggatggtctcgatctcctgacctcatgatccacctgcctcagcctcccaaagtgctgtaccacaggcgtgtaccaccgtgcccggcctctttttttttttttttttttttttttgagacggagtcttgctttttcaccccgactggagtgcagtggcacaatctcggctcactgcaacctccgcctcccaggttcaagcgattctcctgcctcagcctcccaagtagctgggattacaggcatgtgccacgacgcctggctaatttttgtattttcatttatttatttttttaagacagagccttccttgctcttgtcgcccaggcgggagtgcagtggagcgattttggcaaaccgcaacctccgcctcctgggttcaagcaattctcctgcctcagccacctgagtagctgggattacaagcacccgtcaccacgcccagctaatttttgcatttttaatagagacggggtttcaccattttggtcaggctggtctcgaactcctgacctcaggtgatccactctcctcggcctcggaaagtgctgggattaccagcttgagccaccgtgcctggcttcttagttgctttctattaagttttgtgccttttttaagaggaggaaactggctcagaggggttaaataacttgttcattgcttgtataacagtggattggggatgttacactgaaatttgaatccggggctaggtgtggtggctcaagcatgtaatcccagcactttgggaggccgaggcgaatcacttaagcccaggagttcaagaccaggctgggcaacagagtgagacccagtctataaacaaaaagaataagaaacttgggctgggcgcggtggctgacgcctgtaatcccagcactttgggaggctgaggcgggcggatcacgagatcaggagatcgagaccatcctggctaacatagtgaaaccccgtctctactaaaaatacaaaaaaatagctgggcgtggtggcgggcgcctgtagtcccagctacttgggaggctgaggcaggagaatggcgtgaacccaggaggcagagcgtgcagcgagccaagattgcgtcactggactccagcctgggcaacagagcgagactctgtctcaaaaaaaaaaaagaaagaaatttgaacctggctgtgtgtggtggctcacacctgtaatcccagcactttgggcagccgaggcaggtggatcacctgaggtcaggaattcaagatcagcctgaccaacatggtgaaaccctgtctatcctaaaaaataaaaaataataataattaggtttggtgatgcgcttgtagtcccagctacctgggaggctgaggcaggagaatcgcttgaacccaggaggcgggggttgcagtgagccgaaattgtgacaccgcactccagcttggacaacagagtgaaatgctgtctcaaaaaaaaagaaatttgaactcagaaagttgtgtcctcaggtgtagtttttttttctatcaattactctttcgggaactcagattatcataaaattaagaggtccaggccaggcatggtggctcacgcctgtaatcttagcactttgggaggccaaggcaggcggattacctgagattgggggttcaagaccagcctggccaacatggtgaaaccccgtctctactaaaaatacaaaaaattagccgggtgcagtagcgtgcacctgtaatcccagctactctggagaggctgaggcaggataatcggtttgaacccgggaggcagaggttgcagtgagcccagatcgtgccactgccctccggcctgggctacagagcgagacttcgtctcaaaataaataaataaataaaagtccaaatcccccaaactggtatatgacgttctctgcttctctagtcttttttatttatttttttttgagacggagtctcgctctgttgcccaggatggagtgtggtggcacaatcttggctcagcgcaacctccacctcctagattcaagcgactcttcttgcctcagtctcccgagtagctgggactacaggcgcgcgccaccatgcccagctaatttttgtattattagtggagacgggggtttcaccacattggctaggctggtcttgaactcctgacctcgtgatccgccggacttagcctcccaaagtgctaggattacagttgtgagccaccgtgcccggctgaaactattgatctttaaacaatctctccagtctctgagactctgcacatgttcccttttggaatgccccctttgccatcttctaccgaccttcaatttttatttgctttacttcagtgtttgtttcccagagttgaatgagctaggcagacaaattaatccaaagtttagagggataatagtgattggttttgttttagatgtaagcaataaaagcaaaataagcagaaaagggaaggaccaagttttatttttattttttgggacggagtctggctctgttgcctaggctggagtgcagtggcacaatctcggctcaccattacctctgcctcctgggttcaagcaattctcctgcctccgcctcccaagtagttgaaactacaggtgtgcgccactatgcccggctaatttttgtatttttagtagacacaaggtttcactatgttgtccaggctggtctcaaactcctgacctcatgatccgcccaccttggtctcccaaaatgatgggattataggcgtcagccaccgcacccggcctaggaccaagtttttatactcctagaaggttctaggtaactccgttctacctgaatcactgcagagattctctaggtccagagagctgatgtagttactgtacaccccagcctgggtcattggggaaaggctcaaagtaatggcatggcacgctcattctagcttcatggaaagcagcagctacagagacacagttcttcacctggagcctgagctctacagcttaacttctgtatctgcattaccaagggggtattggaaacaattcaaggtttttatgggattccacagcccaaaggagactaagaagccctctctaattccatctcctgttaaaatgggaaaacaggccaggcgcagtcacgcctatcatcccagcactttgggaggctgaggcaggcggattacctgaggtcaggagttcgagaccagcctggccaacatggcgaaacctcgtctctactaaaaataaaaaattagccgggtgtggtggcttgcgcctgtaatcccagctactgtggaggctgaggcaggagaatcacttgaacccgggagggggaggttgcagtgagcagagaccgtgccattgcactccatcctgggcaacaagagcgaaactgtctcaaaaagaaaaaaaaaaaaagatgggaaaacagaaaactcaatagtgtagattaaggagataagcattggctgggcgcagtggctcamgcctatcatctcagcactatgggaggctgaggtggaggaaccatgtgaggtcaggagttggagactagcctggccaatgtgatgaaactccacctctactaaaaaacacaaagattagccaggcgatagtggcgtgagcctgtaatcccagctacttgggaggctgaggcaggacaatcgcttgagcccaggaggcagaggttgcagtgagccaagatcgtgccactgtactccagtctgggtgacagagtgagattgtctcaaaaaaaaaaaaaaaaagagatatgcattgataatcctttccaccaagaaacagttcaatcttgggcaaaagagccttaggtataaattaaaaataacagcatctactcatataaaacacccattatgttgcctggctcatgtcactcatgagctagttagtgggtttttgtcacaggggtcttctgccccccttgagttctggacctaaaagtgctgaggctgaagcctcctaagacatgagcagttacaaccatactccccaactgttagccctatcttatgctgttaggtgaaggggcagagcctgcagtggctggaagaaaatgtcacaagctctcagcctttcttgaagccctggccaagtataaaacagagcaggaaggtccttccacctttcactccttttctgcccagaaaaaacagagaacaggggctctttcttcttctgggctctgctacctccccaggccctcccctgcattagacaccacaagacacggacggccgactcccccttaaatagctgtttatttggcagtgtgccggaaagggtgatggacttagcattcacagacgacaccacacaccactgtcacgagggaagaaagagcgcgggcaagccagcctggagccccgaggaggcggcctcctcttcaagagtgggagggggcagggcctggagtgttgggggcagcctgggaacacctccgcttaataggcgtggttagagacgaagagggactcgctggcagcagccccagcctgaccgctcggagtgtactttccttgacaggcaaggctgttggcctaagcagggagaggggtggagtgagaagggctcttctccgagtcccatccacccaggcaccctgcccacctcctgcctatccttaccagggctcgcttgacatactcctcctgcgcagccttcaggttctccttcttcccgccccaggccttcagggcagaggcctgcagggctcggccgtaggagaaggtcagggcccagggcttcagcagggggcacttgttaatggcattgaggttgatggacgcctcctcctcactctggcctccagacaggaaggtgatccctgtagagcaggggtgaggcgagaggggctgtggtcagagacccaggaagctggcaggagctggtggaagttgccatggaaatccgtccaaatgggcatagggttgtgggtggagcttatctactgcatagagatcaagatgagtgtgggcctcaccagtgacagcggggggcactgtgcggcgcagcgctgtgacggtcgccatggcaatctcctcatgagaaaacttctgagtgcaagcatggcctggggtgaccatgttgggcttcagcaaggtgccttccaggtagatgtggtggtcactcagagccttgtagacagcagccagcacctggagcagagcaggcgcacggtgggtagtggggtggaggagaggataggggttagccccagggtccccggccagccaccttgcactggtcaggcaggtagccatttaccttctcggtcacatactggcagcgcttcaagtcatggtccccatcagggaggatctcaggctccacgatgggcacaatgccattctgcagggcgagggacagggtcactgtgaggcctcctaacccagagtcccacctacatctctccacagccactggtcaagaccgtatcttgatgatgccagggactcaggcttcaaagccctcagattacaggagacaagagccgcctcagatccacccaccatccctccttggcccctctgccttcaacagcccttgagtgtcctccacgggccaaagctaatgcttgcttttggggaggtaggcatcatggcaggtaataggcaaattaacaacactggaaccaaatgaggtaggaggttgcctattgaggacctgcaggcccacctgctggcagatactggcataacgggccagaacattggcattttccatgatggcgagggctgagggggtgtgttccccaatcttcagcacacaacgccacttggcgaagtcagctccgtccttcttgtactgggcacagcgctcagacagcccatccaaccctaagagaagaggaaggggtcagagcacggtggggaggggcatgtggtttccactcctcccagcacccaaacctgctctggttgggttcgtagggcagagaatcaaacagttctcaccttgggtggtagtctcgccatttgtccctgccagggggaccacgcccttgtctacctgttggggtcagggtaacaacattaagacacaggaaatgacctctagcaccctttccactgtcgccccggctggagtacagtggtggaatctcagctcactgaagcctccacttcctggactcaagtgatcctcccgcctcagcctcctaggtagctgggcgtgcccctctttcctcttctttagccccagtcttcccccacatttacttaatcccttaaactgcatctcagggctggcaaatattttcacttagttacaattaaaatatttagttacttaagccgggcatggtggctcacgcctgtaatcccagcactttgggaggccgaggtgggcagatcacgagatcaggagatcgagaccatcctggctaacatggtgaaacccagtgtctactaaaaatacaaaaaaaattagccgggtggtggcgggcgcctgtagtcccagctactcgggaggctgaggcaggagaatggcgtgaacctgggaggcggaacttgcagtgagccaagagatcgcaccactgcactccagcctgggagacagcgagactccatctcaaaaaaaaaaaaaaaaaaaatttacttaaaatgtttagttactcaaatacttagttacaattaaattaaaatattttcacttagttcacttagtaacaatcctctgagacaggatacactgggatgttatttgacaacagaaatgttgagtgaattgggtgtcagactggggctctgccacttactctgagcaaaacacttcacttccctgagcttctgagattttcatgtgtaaagtgggaatgatactgttctctcagaattgtgaggattaaaaatgtcgagtaaatgccctaagcctgaagcaggctccatgcaagtctctaggccaccaatccagcattcattccctgcctcactaacctggatttccttcctccacttccatctcaaacctcacgtccggaggccctccccttaccttgatgcccacaacaccgcccttggatttgataacttgggggaagggacgcccatcatccgccttctggtagagtgtctcatggaagaggatgacacccccaatgcaggggttcacgcggtcgtcagctgtcagcagcagctggcggtagaagcgccggttctcctcggtgttctcggtgccaatggactgcagccgcttggcaatgctccctgggagtgtcacatgggaattaggggatcagcctgccactcccaaccctgcaccctccacccattctgtctcctgcccgcaccagtggactcatctgcagccaggatgcccttgccaggtgccacgatgcggtgagcgatgtcagacagctccttcttctgctccggggtcagtgctggatattggtagggcatggtgctggtagtagcaagttcctggatacaggaaacagaggggaaggactagttagctagggtttcccatcatctcccgatgaccagggcccctctcctggaggtcagggaaatgttccctacctcccctgccccacacccagcaggccctggggcacttctggtccccagctctctcttacgcccaacttccctttgctaggcctgcccctgtacctttcctaactctgtctggtgctgggtgttgcccagctgagggtggagttgcccactggcaactgggggaaaggaaaaggccatagccatggacaggtgggtcatgttgaagctggacccttctggcttgcgccttgccatggggtcaccttgcctgaaaacaaaaccgaaccggagtattttagaatgtaaagatcgtgaatcaagcagagggcccaacaccctcgtgggaaagggcccagatatgggaaaggtctgtgcttcaagccacacagcaaccccggagccagatctgagattagaacccagctcttctgactgccactggggtgttccttccaatcccctcaagatcccagggctggcccgggctccaaggcttcaaggacatcccaaggtcaggcttttccccacaagggagggggcgggtggtaggaaaggggcattaggaaaaatataagagagcaaggagaagcccaggaaagggcggcggaacaagccctagcccgaggcgaggaaagcggtaagctttgccatcgtcactgttcctacggggcaagaacgtggaggagcaagcgccttcccctgaaaaatgctcccgtcgcttcgcatggctgcagctgttccgggctcagaatcaaggtcgcccgataaggagagacagggaaagtgttaagggggcatcaagcaccgcggaggggtttccctcctcgcgaagggcgccccgtttcccaggacagaaaccaagctcccacttgcgagaaccctggggctgtacatgggccggcccccacccctcactgcctcttaggatccccgccagggctaaggggccctaatcctttgccacaggggtccctgcaagaaaagggggagaatggtccttcatctcgtccggcttcctcccccgccatgactcagcgcgcgcagccgctgcattgcgcagttagaggacctcaggctggaggggccggggagcctgtgtgtgcctggtagtggggagacgctggcatgggatgggggaggcctccacgcggacgcccaacccgccactgcccccaagatccctctccacggtccctggtccccgcacgtgaagaggggcgctcacctggcacaggagaggggcgggtgtgcagggtgcggcggcagagggcggcgggctggcgagtggattcaaggagagaacgcgggactcgtcaccaggaccccttctgcggcgcgttccgagaggaacgcagccgatttagcctcggaaggggcggcgcaggaggcgggcaggcggaaggcggcgcccggccttttaaaggcaccactccgccctccgccgagctttttcctttacgaggagcgggcggcgtccaatggcaggcgacggactgggctacgggccgcccccgagaggcgcagcccagaggccgcgctaggaaggggcgggcgccgagaacacgatccctccccacccccctcggacgtgactcggaccacatcccgcgggtcgctagggccctcccttctgctcctttcccccagcctggcgcgctctggggcgccgtgactcagccagaatgttggcaatgggggagggcggaacggggaagtggaggacgcggatggaaaagtcggaaacgaaggaagctgagtttcgcctcccaggcccagcgcgcgcggcccggggccgccccagcttccggtcttcgcggctgcagcgcgtgtcaccataggggccacatcgcgcagtcgtgcgttagcctgcctcgcccgcgggctgaatcggcgcggagccgacaccctgtcactggcccaggcgtaagggaggcggaggaaagggcatcgagaggacacgcagggagcgcgagaaggcggcggaactagcggcgcgcggaggcgagacctccccatccgagttccaggctggcaggccgggctgggtcgcgcatgcgtgcgcgctctccgccgggccgccgcagccaggctggtagtcctctgcgccacagaaaaccagaatgcgcggctatgcaccggccgctgctcggcctctggcatgcggggtcacagttcctgccaaacgtcttccttgagcctgacttccttctccaaaagaaaatccgtccccgaactgatctgcctcccagatgctgagccccctgctcctatcgtccaaatctcccctcctcacctggaccccatctggaccctgttggcccaaccccaaccccatccccaccccggcccggtcctgcaaggggcccacctgcggcgaggccgaaggagccggcagagcctggtcagcagcgagtgagctaggggttcccgggctggttataaggcagctcctgcccgccccacatgtgtccccgatcttctctaatgacccctgcccttttcccgccacggatcctctggcagggacctatatttagggaaacctgaagcccctgacattcacactatcgtggggcccggcatgggggaagggggaggaagac

SEQ ID NO: 97535 - DNA, 16553 bp, Homo sapiens
tggtccaagttgaattacctgtaattcagttgtactttaaaaagggctaaaggtggcttgtgttttatatataccttccttttttagcagctggaatgttcagggatcataggagagcgagccctgttcacaggcatgctgtaaaatcccttcctgattcccttgactgtgctttctaagcacctgggaaagcattcctgttggactggatctagctcagggtattgcaagctcacttagtgtgggaaaaccaaacacattttaagcaaatgaactagatttagagattagcgaaaagtcctaattttagtaccagcctgggtacaacacataaaaggagaaatacagccaatgctcctggttcactttctgatttttcgagattacctgattccttggaaaactagtaacacaaatgtgggcatagagaaaataattttccttcctttcggatttagataggaaacaggaacagattgtcccaaaaggtatctactgtcctgatgtagcacttgctgtgaatctctaagccttttttcttgtaatttctggaaagttcctggcttccaggaattatagctggaatccctcagtacctgcatgtttcaggcacacagttaaatgggattaaagtgcagttatataattaaacagaacttcctcctgagttgtgttttaacacctggtctcttcctgtcctgatcaacaggtatctcagatgaagacatcatcaacattactcttcctactggagtccccattcttctggaattggatgaaaacctgcgtgctgttgggcctcatcagttcctgggtgaccaagaggcgatccaagcagccattaagaaagtagaagatcaaggaaaagtgaaacaagctaaaaaatagtctttctcaactgttggctaagaagaaatgcaaaagaagtggcataggagtgtgttatgggtgctgaactctctctctttttccccgattttccagagctaggctgtggagtagagtttgtataggtaactaggtaacttattgtggcccagataaggctttaggatgcctcagtgcttatgtcatagccttatgagttagctttcttgctagccccctagtcggtcaccaaactagtaactagtggggcttaatgaaggtcataagtttctgagatgggagagcaacaagtagagatgaagttaaaggtatttatcattcaagaaatcattattgagtcaccattgacaggcactattctaatcagtagttcactttaatatttaataagattttctgggataacagtaagggatattagataatataccgtatgtatttattactagtcttttcctctaggaaaagggatactttgataattaaggccagaggcccattagttgagaaagtcacagatatatttctccaagaaagccaacaaccaccaccacaatgacagaaatgacaacaaggccctttaacttgtcttctagtttagagacatccttcatttgacatttagtagaattcctctttggccacaagaataagcagcaaataaacaactatggctgttgaggttctcattttggtttgttttaattttttgaactttgggtacctgtaattagtttaaaaataaagttcctgataataaagtgactgaaaatggcatccccaaagtgtctccgtgtgtttggtgaattttaggtaggcttctaaactagtctttgactcatactttcctgtaacactcaaagaaagaattgcacttatttcaacacaacagatactcatgattttctatatgttgaagcatgaagcagggaaggtagaatacagtgcatgtaacttcattcacataagcagagggaatggtatattggggcttgtgacataaatttgttcattaactaactgatggcaaaagattatggtatgtagcacggagcagtcagggtaggccatggacacgattgcatatctgtcttaatgatactcttttgcactatgttttagatgctgtgggtacgtaagtcatcatttctttaagccgttgactctgtttcaaagcaggtcacatatatttcgatgataaagtcatgtaaaacatttgtagctataatacctgttatagatattttccatttttttcatggtttttcattggattagtttatttttatccactttatagtacaattggcatttgaagaatactaactttaaagtatttttgctactgctttgtctccatttgattattaacgcaagacttttaacgattagccaaagaagatggttgaaaagaagaacctgctctgcctgcagctggccacatctgtgatgcataaggacatggaatgtggatgctttacatttattaattacctactattggtttctctagtgtagccccttcgttttagtggtgttgattaaccaagtaatactctagaattcaaatatcagggtcaagaatgcaactaccagatgatgttcgtagaattccaaacctatggctaggctgccatagtgatattcacaccatttttgaatatcatcatctctggaactggcctctgagttttccagcccaaggggtgaccatgtcttaatgtacttcaagatcctagagttggattcttccattgtcctgcatcaaggtatcttcttccagggaaccttctggcagcatgatgtgcttctgcacacaaagcaactgtcatatccagtcactttagaatctcacaggcttcccaagaaaaggatgatttttgctaatacagtactctgtgatacaatttggtcttactgtttttgagatcttggctgaaaaaatatgaacagaagagccttttttttttttttttgagacggagtctcacacttttgcttaggctggagtgcagtggcacgacctcggctcactgcaagctccacctcccgggttcatgccattctcctgcctcagcctcccgagtagctgagactacaggtgcccgccaccacacctggctaattttttgtatttttagtagagatggggtttcaccatgttagccaggatggtctcaatctcccaacctcgtgatccacccccctcggcctcccaaagtgctgggattacaggcgtgagccaccgtgcccggccaagacatttttttaaatgtcacttaaaattagttaacaactccagcacttcaaccttaggatcacctagtgaacctgttttctttgcattgttaacagtttatccagaatttctgatgcaggaatcttgaaggctgcttattctctatcccagtcttggcatccttctattctgaggctgggacagaaattagggatttattttctcctataaaaaaaaaagagggaatgacaatgaccagcccagccatggtggcccctgcctgtaatcccagcactctgggaggctgaggcaggaggattgctcgagctgagaaattcgagagcagcctaggcaacatagcaagactttgtctctactgaagaaaaaaaagacagcctatctaggaattaggtccttggaggaggcagcctatcctgctgccagtttacgctttccctggagccagctatgcatgtctcctctgcccaggctgagatgattgtcccatgtgggtcagtgtggcaagataaaggcaatagcaacatcagctgctcccagagttttaacttttaaaaagcctctcaaactagtaccgtatcccagtacactgagaatggtttttctaaaagagcagtactgcatcagaagagaagattttgcattgtgtagtaccaatatgggcatcaaattaacgaaatatccttggttagaatacattatggctaatgtatttttccttgataaggtgtgcaaggaagatgaatgtgatgatctatttccaagctcaaccagactcttttgctcaacatttgtaagttatttctcatcccaggttgtgaccacgtttattaacatgcagttcccaacgtgcacattaataacagttgttatttgtctcctggcctggaatttcgacttgtatgtaatctatattatctctggttactatttagaagcctgttagcttgctgtgtgtgacttctgcaagatgatgtgggataatttggtaactctgatgttcaagtgcataaagatgaaaatgttgctgagactatttttactacgtaattctgaaacaattatgtagcgttaaaaatgagtataaatgtattgatgttattgtaagtgaggttactcaccatgggagaagaaagatacggaatggaggaaggtaaggaaggaccatgtggtatattggttctggatgagaggtgtttgtgtaagagtgtgtgtgtgtgtgtgtgtgtgtgtgtgtgtgtgtgtgtgtgtgtgtgtattttccactctctttcccccaagcccctccctactaactctggctctgtcttctgaaagggcctagaaacaataacccagaaacaacaaacacactgaattccttcaatcttggttcataaacactattccacagaagcaggcatgtttggggaaatgcctgcttccaggtttgaggcagatgaagcataaggtgaactttgagcacttttctgactcatcaagatgttacaagactgatgggacacagacatttgcttgaaggaccaaatttggggcaatttaaagtaagaaaaagaatgatggtaatgaattatagaacattgaattcaaaaaatagtgcctaagaccataaaggtatttttttaaaggtggggagagaaaaaggagacataaatatatactgtttctttacagaagattgccagcttccattggtaataatggatgcaagcaaggactattaatggatgctaaaaccactgggcttttagagaactgaacattcgcatagtcttataataaacttattaattacaaagaaaaaatgtatcttcacaatggagagatcccttagacactactgcaaccgagtgattaaccttaaaatctccaatggatgggtcaaatagatagtatgtgattttatgcatgtccttgttattataaatcagtgggaggtacctatcacttagtcttcttcccaaaaactttttatctaaatctaataatgagaaagcaatatgacacattcaaaatacaggataccctaaaagacaactggtttggacttttaaaaaatatcaaggccaaaaaataaacacaaaaatatgaagggacagttccagattaaatgacactatagggacatgatagtgaaatgtaattcgtgaactttaattggatctttagcttgtaaaaatttacaaagaatattttggggcacttgggaaaattaaaatatgtgtctatgtaggctgggtgcggtggctcacgcctgtaatcccaacactttgggaggccaaggcaggcggatcacttgaggttaggagttcaagaccagcctggccaacatggtgaaaccctgtctctactaagtatatgaaaattaaccaggcaaggtgacagtcacctgtaatcccagctacttgggaggctgaggcaggagaatcgcttgaacccgggaggtggacgttgcagtgagctgagatcatgccactgcactccagcctgggcgacagagggagactccatcaccgccccccccaccgccgccaccctgccaaaaaaaaaaaaaatctgtctctgtattaggtgataataaatattaaatttattgggtatagcaatggtatggtgccttgttcttaggagacagctgctgaagaatttaagggtaaggcatcctgttatcagtaagtcatttgtaaatggctcagccaacacaatgtttctatatttttagagacagaaagcaaacaccggtcattggtcacttaatgatgcgacttgttctgagaaatggattcttagatggttttgtcatcgtgtgaacatcatagagtatactacacaaacataaaaaatatggtttagcctattgcttctacgctaaagacttgtgcagcatgttactgtactgaatacggcaggcaattgtaatacaatggtaagtatttgtgtgtccaaacatatctaaacatagaaaaggtacagtaaaaatacattataaaagattaaaaagtggcacatttgcgtagggcacttaccatgcatagaacttgtgagaatggaagttgctctgggtgagtcagtgagcgagtagtgagtgagtgtgaaggcttaggacattactgtacactacagtagacttcataaacactataccctttgtctacactaaatttatttaaaaaattttcttcaataataaattaaccttagcttactgtaacttttaaaaagtttttaatatttcaaaaccttttgacttttgtaataacacattaaarcagaaaccttatttaaccatatgaaaatattttctttatgtcattataagtttctttctttcttttttttttttttttttttgagacggagtttcgctgtttctcccaggctggaagtgcagtagtgcgatcttggctcactgcagcctctacctcctgggttcaagtgaccctcctgcctcagctcccgagtaactggaattacaggcgcaccacaccatgcctggctaatcttttgtatttttagtagagacggggtttcaccatgttgcccaggctggtctcgaactcatggactcaagtgatccgcccgccttggcctcccaaagtgctgggattacaggtgtgagctaccacgcccagctataagcttcttcctataaaattttttattttttaccttttaaactttcttgttaaaagctaagacacaaataccacattagcccaggcctacacaggatcaggatcatcagtgtcactgtcttccgcctccacatcttgtcccactggagggtcttcaggggcactaacatgcatggagctgtcatctcccatgttaacaatgccttcttctagaatactacctgaaggatttgcctgaggctgtcttacagttaactaatatttttaataaatagaaggagtatattctaaaacgataagaaaaagtatagtatagtaaatacaaaaaacactatcatttattatcattttcaggtattacatactgtacatccttgtatgtgctatacttttgtatgactggcagtgcagtaggtttgtttacaccagcatcaccacaaacacatgagtaatggctcatgctaggaccttaggatggctataagtcactgcacaacaggamtttttcagccccattataatcttacatcgtatatgcagtccgctgttgaccaaaacagcacatgactgaggcacatgactgtacagtaaatgtcatagctgatgaattgaggaaatgatttgtaatgttgtattattctactatcatctcagcatttctgtaggtttgaaatttttttaaaaaactagaaaaaataaagtgacagaggaaaaaattggtaagtttaacaatgttgtgtttagtatagtcattaaaacatgtcttattcagagtgaggtgcctggtttttttgactttttattcttgaaacctcagtctttgttaagtaagagaaagatamgagaaagccttcttcttttcttcttttttttttctgtcttttgagacagggtcttgctttgtcgcccaggctggagtgcaatggtgtgatcttggttcactgcgacctctgcccccccaggttcaagcaattcttgtgcctcagcctcccgagtagctgggattacaggtgcccgccaccatgcttggctaatctttgtatttttattagagatggagtttcaccatgttgaccaggctggtctcaaactcctgacctcaagtgattcgcccgcctcagcctcccaaagtgctgggattacaggcatgagccaccacacctggcccaagagaaagacttcttaagtctgtattatcttgtcaagaaacaaattgtatacttattttatttctattatctttgaggctacagcttgcatcagaccagcaatgagcttgtgtgctgaaacaacaaatctgaaacacgattatgactgccatcaccttgcagttaaccaatagtaatggaattcctttctggatcacgaggtcaagagttcaagactagcctgaccaacatggtgagaccctgtctctactaaaaatacaaaaattagctgggcgtggtggcacrtgcctgtaatcccarctactcaggaggctgaggcaggagaatcacttgaacccgggagatggaggttgcagtgagccaagatcacgccactgaactcctgtctgggcaacagagtgaaactccatcacaaaaaaaaaaaaaaaaaaaaaattctcgtgaacttaaccctaaccacacagtattgaagagggaatgtstgcccaaccacactgctttgtatctgcctgagaggaaaattctctggatgtcgtgttgaactggatggggaatcagacagagctggagtttgtattagtcagattaattgcataaaatctacccttagtgggaagactcttaggagtaattgaacctagaccttgacatatgtaacctctgaagcagaggggcaaaggccaacacatagctctgcaacacaattgaggctatgtaatccatcccgacactcattctgtagaatactcattagaattctccagacctaaggccgctggccataggttagctagtcagtatttttatctctgaggatgcctgctaggatcctgggattggattgcagggaatgttacttgtagctggaattccaggtactctcccaggagtcttggtattttatatcgtttttaaaatctttgtttctgtacgtagacactgggggtcagtatttattcataaatgcctctggatatttatgacaaaagattgtttctaaagaggcttggaattccttcctcggtgcgacttctttccctgattattaactatagagtttaccctatgtaaccataaaatgtaaatataaacatcatagatgtccatggatcagaatatgggaaaggggcaggcagttttccatctaaaatacgaatgaataccaagtactcgtttgtttctagacacttgtttggcaatgttggtcccaccagtgcacccagatgtctagccagcatcttgacaatcacccttgacttttcttcttctgatggttatgaagtcctgctgattccgtcacctcttaccttgcaaattcatcccctctccatccccactgttctgccttgagttaagccctcatcttttctctttcaacatttcagcagccttctagctgatccccttgcttccgcttttactctcctctagtcctctccagacagtcgtcagggtaattcttcagaccttcagaggtccagcacccctcctaggctctgcctttgcacccgctgtccccttggccttgaactaccctccatcacccaccccaccttgccctcttttcattgcctgcctaatatctgctcatctttcagggttcgtaacagtctcctgtggagccctgtgatcgactcttgctggatctggcttgttcacttgtctgttcgcttcactggcaggagaactgaatggatttaagtctgggtgccagccaaagtcatgcaaacttaaactccagaattccctagaattatccacttggggggccaaactgcccactgttttagatttgttctttaaaatatttctcgcagctgggtttttgttttctttttttcttcctatttttttttttcttttggagacagagtttcacacttgtcgcccagactggagtgcaatggcacaatggcacgatctcaggtaacggcaccctccacctcccaggttcaagtgattctcctgcctcagcctcccaagtaactggggttacaggcacgcaccaccatgcccagctaattttttgtatttttagtagagacagggtttcaccatgtcggccaggctggtctcgaactcctgacctcaggtgatccacccgcctcggcctcccaaagtgctgggattacaggtgtaaaccactgtgcctggcctaaaatatttctcctggctggcatttgatctgacctgtctgttctctgcggctgtcttcctaccatgccaatacatggaagcagaggtggaaatcctaccactgccggacaggaaggcaggtgaggctaagtagcctgtcagcaccgagcccttctccataggcagctgctataatggtacagaaacaggtyacttatggagttgcaacctgtttttaacctgtaattatagagttaaatataaccatataaacatcttgaaaataagtgggaaagattccctaatgttcccatcctaagaactattttatttctttctttctatatgcatgtttcacttagacatattcttgatttatattcatattttattcttgtctttatcataaggatttctccatgttgtatagacttcaaacaattttactccatggctgaacactgttgcatcatttggatagaacttaaatgtccaacaggaaaaaaaaattaggtgctttcaatgttttgctgtaagtaatgtctaaatatttaaaaactcaaccaagctaataaactgctatataaaatatgttttgtatattttttatgccttgaaaaatatacctttataacaaaaagtactttaaaatatataaagccattttatatgactaaaagccaccacgcatcatcaaggatggtgatgacagtcttctctgaaaaggtttcatatatattgaactttgaatgattttgtgtgtgtttgcgtaagtgtgtgtgtgtacctgtacatgcgctccaggctgaagaagtaacaagtgcaatagtcctgagacagaagagagtgtttaggcaacagataataggtaaggtcagtgtaacctgaacaacttgaagaaggtgtttaggcaacagacaacagctaaggtcagtagtgaaggctgaagtggtgtaggatgggattggggaggtaggcagaagccaaattgagccatggtagggtgaacggaagacaggaaaggtcttccaagccaaagagtagcccagtagcccatgccctcattgccactgaagagcttctgccatctgagcatgtaatctctccaagacaacatttacgttcttgtgtaaacatagatcattgtgtagcataatctctataagaattgtaattcctatcatatttaaaaagagagtaacaaggagacttcagtgtttctaaatgcaccccttctgaaagcatttaaatcttgattttaaattttatcatttagctacaatgaataagctcccctgggtcattctctaatggcaatttaagccaggtcttggatcttgtttaatcctcacaataatattctgaggtgaacatttttattatattcatcttacagatgagcctcacaaaacctgagtagcaagacacagtcgcaaagctagtatatagctgcagcaagattcaaatccaagttgacctaactccaaagcccacgctcttggccactgtcccatactgtttttagtttaattttttttttttttgagacagagtctcgctctgtcacccaggctggagtatagtggcttgatctcaactcactgcaacctccacctcctgggttcaagctattctcctgcctcagcctcctgagtagctgggattacaggcgtgtgccaccacaccaggctaattttttgtaattttagtagagacggggtttcaccgtgttagccagtatggtctcgatctcctgacctcgtgatccatctgccttggcctcccaaagtgctgggattacaggcgtgagcccaccgcgtgcctggctgaaaaaaatttttaattaaaatacccatccaaaattggtcaaagaataaagtggttcaatgaagctacagtgagcaagtttcattttcattctctgaaagagtaacatggtgccacaccagttcaacaggacaccgagtggagctagagagcttagattttttttccacacaaaatttaagtgtgtgcttttgaaagtgggagaaataggcgtttgctttccttcttttcttaaactgtctgctttggtatttggagaattcagagcttgtatattaaagcctaactgaactatataaatacacacataggaagaggagaacaagacattttatttgcagaaaataaaacaaagcaaaaaattgtgttttctttagcatggagtattaaaagccatagagctccagccttcgaaagctatcagtgccagggccttccattaaaaactgtaaagaccagtctagctagtctaaacagaaaaggaatttgttaaaggatattgggtggctcacagactctttgggaaagccaagagagttaagcttggaaagccagtcagctgagaacaagactcagtgaacagtgtgagatggttccagcaaggacaatggccctgccgctgggcacagacactgccctcctgctggaacatctgctgctgctagcccacttggcaatggtcagagcgattgcagaagtggctacaaatccctgtcctcctctgtccatccacgctcccttacagggaactttgaatgtcctcccagctgattctgggctcagctgctgggccgacttcattccttttttctgcgtgtgagttcaaagtcaataccagatggattgtgagcacggacaggaatgctttcctgcactgagaaatacctacttctccccattgccaggcccttggctcccacagctgtggctgtgtctgcacacacagggcctttgtgtagtctgaatatgccagttcccacaaacctccagctgcgattccctttttaccaaccattcccatctaaggagtcaaaggacgaatcacattgcaagggacaatgggtgtacaggcttgctgagagagcttgcttcaaatccatgagatgaagagactcatgggcagtacgaggccatggaggcactgctgttttggcaaagaatgctggtcgtgaccacttccttctctttattcttcctcagagttcaacactggccttgcccaagtaccatgctgagaactggacctcaggaactccgacacacacgcccttttcagaaatttgtaatttcatcatttcttgaccaaatgactccaaccacagaaaggcacaaattttccattgggatttattctgccctcccctttggtgggtatactttttctctttcttgcttttgaaaccccactcattatgtgaagtataggtttttcaaactgattttaaagtaaacttgttattaaatatacacatcgtgtctttctgtcttcctaactccactttatagatttgagaattgagacacagaacagtctatggctcagaaaagctaaattcaatttttatttggcctacgggccctaatctgggctttgaagtctaaagatctagaattacccaccgtcttcctaccctcagtctggtcagactccgatgcataaagctgggaacctcactccccaagcaccggcaatccaagacttcccgtttctggttgcaattgcaggctagtaaatttggagcacaggatggaactatttctagtacaggcaaataatttgtaataattaagaagtatgaagttaatgaaaagcaattaaccccatggcaagttcggccataaattttactcccaaagtgaacgcatgatgcaggtatgagccttgatttcagataaagaaaagaatgcagagctattattaaatacaaagtaaaacaacatgaaaaatgccagaagatataaagaatgcaagtaggagcctgggggcagagggagggaagagctaagagaaggcgggggcgggaggcggtggggtgggggggtgcggtggtggaggatgaagggaaggggagactgttccagggagctatgccaatctgatgcggtctccaggctggctgatgctgagtggaagggacgacagagcttcctcctcccccaagagacctgaacctggacttctacaggcaccattgagccccctcagcctccccaccccacccctcacccaccacagggaggagtcacatggtgttccccttttaaagcaagatttaaagaattactcctcatttcctggaacacttgagaccacagaggagttggcagaggcagaggaaaatcaagatttttggtagaataggaaaggggccaaagaggagggtgccatcatggcccttgtgtctttccctaccaggcagaatcctggcaaaaggcgtggaggggcttatcaggcaggctgtggttgaaaaaccaacaaaggatgcttcaagttctactcataggtcccgatgactagggagggatttctgcctttaaaagatcaaaacaggatttgctgttaagccacctgaggtgcagcttgaattaacacctaatatgatcaccaggtcttccccaaccactgagaaaaagcatcttcccttgtttctgtcatggatgttcgaaattcctttaataaaaagtctttactggaatcattagagataaaattttaacagcacataccactaaggaacagagaattctgaagacatttactcacaatggaaaagtagtcagtcaatggaggttccagtaaacttattggtggcggattcctccttgatttgacagtgagaaaagggctaaagaggaggaggaactgtcttttttaagaaagacctggaaaactaagttattgactagttgatggtgccaagggctggccttttttatcttcagctggggtagaggagagagaacagtccacctgcaagctgggtgtgaagctatcttgtcgcgttgggctgttggagataaataaccttgtgtatgcttttgtggacgttttggtgctttcttttgtaatgctttttttaaaaaaaaagtgttactggagcatcctctagcatcgttatttgagacgtatgtgtataatgagacacttggcagcacgagcgaatgaagtggaaggggactgggcacgaggcgctcaaggtttggattctaccccaggctctgctaccaactggctgaatgacctgcagcccattacttcatctctgagacttaattccccaaagcagtggctctaaattaaggttttcttctttctaaatcacaaccctgtctttgaaagcagagctgccctgtggaaatgaaggaggggccccaggactctgccattcagctccccacatcctccccctgtgtatgtggtgcgtcatcagaaccctgggctgatttgaactgcactggctcagatgatgactaaacacccctccaggtcatcaaagagtagctgcagttggaggagcatcactgaccactttgggaagctggcagtcctgtttcagtatgtggcacaggtcccgtgagccttattccgcgcttgggttgcacatggcagccagggagctgatgggctttaggttcccccagggcgtggataatttctttcttggctgcgtgagctgctgaaggcatggaagttctaggaatttttattaagaattctttgattaagaatagcttctaatcattacatcctctactaacaatcacataacttcctgacttccagttcaggtcctccttgctagcctaggctgcctcttgttcttttctatctctgccatcccactggagcctgagaataaatattgtttgacactctatgtcacagatgacttaaatggtcagaataaacatgtctcctgtattctctaagtggaggtatcacccttccacctcctattcccatcagatacaagagagaacaaagaggaaactgtgatcttctcctatacctgctattaaattactgagtagccttggagatacttatgtcgagcaacttttcagtgcccctatgtcccttctgttggcaaaaagcctttactgagcacctactcttggggaaagcaaattattaagcactagatggaataagaagtgacataaaaaatgagaagtaatgaaactgcttctttaagcctccataaaaattagagtcaggtccaaagccacaccacacacaggagggaagccctagagactcgtaagcctgggagtggggtgagaaaattgcatttgggcaaaatggtcctgcaaaaaatatgtagggaatcagagaagacgaaactcaaaacaaggccaaccatctgagtgctgtagaatcaacactaggagagctgaggacccggtcctggcattacatctctcccccaggagaggcagcaccgagcaatgggaagaattgggcctaggggctgaggactgagagaccccaggggctggcacaagttctgcactcaacttcctgacaacaggctctacgataaggaggagagcctcgtggtctttgagcactccctggtacttacagtctataattccctccgtcatcagccttttttaaagaaaataaacttaatgtcc

SEQ ID NO: 97536 - DNA, 12309 bp, Homo sapiens
caatctttccttgcttcctctcgatcatgtgaggcagaacacattttgtcaaggacaccgtccctaagtagttaagctctattagctttctgtagacatccaagctggtatccatgcacagagaacgctgggacattccaccattgttgaccagaatgtcgatctagttaaataaaatcagaaaaggggtgtttgggggatgtcttgtggatagattgatggaattcctatggatggttggttattttgttaacttaaagaatcaatggaacaatggtatatttccagaagtcagcaattaaaaagataaaataaagccctgaatttacctgtggaattaaattcccgttttaggtgactttttgtgaaagttaataattgtcattaaaataaataaaagcagccagctgggcacagtagcctgtaatccctgcactttgggaggctgaggagggtggaccatgaggtcaggagttcaagaccagcctgaccaacatggtgaaaccccatctctactaaaaaatataaaaattagctgggcgtgatggtgcatgcctgtaatcccagctactcaggaggctgaggcaggagaatcccttaaacctgggaggcggagattgcagtgaaccgatatcacaccactgcactccagcctgggcgacagagcaagactttgtctcaaaatacataaataaataaataaaagcagccgtgaatttttagcttcttttgttctacatggaggaatttgtacttgttaagacatgaaaagtactaattccataatgacaaaggctcagagattaaggggcccaactcatgggcccgatctcactgcatggaccccacttgcctaaagccctttgtatgacagcaccacggatgggaatctcttctgcagttacttcaaagcaagactatatcaatataagatgctacttactctaccaaactcctggagaacagctttggtagccgcttcatgggaaccagtgtcggtcaggtcaaggggcaaaacaagtatatctttttcttttaaattgccattctctaaataaagacaaaaatttgtgtggaagtcatgccatagttcagtcaagctccttgctactcccactaacacccaccctgcaacaggacttggcaacaaactcatttctgggtggccctgtgaaagttcctctcggtggtcaggaagaggactagtggttatatcagacaaaaagctggctggcctcacaggaagtagaatggcaacttgaatatgcagtctaactttacaatttgatttctgatagaaatcaagattatactacaaactagaaaagagcaaatattttagagcaatttctttagaagtacagaggtacctttgttttgtgataggctcacaaagatgagttgctcttctacacacaaaacaactacttgtgcttaaaatcagtaagaagctcagagtcctacagtcaaatgacatatagaagcttctctccagaggctaaggattcctggaggtaaacagggaaaaggacacatgcctgaaattcccaaccaagaaacatgctgctgctttgtgattggctttctgttcatcaaaagaacaactgaaactaattttcctggactctaaccttgaaatacaagtaacatcagtaagaaaaacaagcaagtatagaaaatagaagaggtaaaaagacttcatgggcaaaagagttaagcgtgaaacatcaactgtattaaatgaaaaagtgggcactacagatctgcaagataaaaggaaacagccttgtgccaggtaagaaatgctgacctggttcatctactccaccagtacaggacttgcaagtcacagcagtagaggaacaactatcaaaagaagtggcccagtgcaaaaacacaagaggcctttgaaagcagtatcatgaaagaggcctgttgccctgctgagcactactgtggcaactaactctcatttctgggtggttagctcgatcagcaaagttaaagatttaaaagaatgacaggtagagagatggcccaaaaaatggtctgttggaaaattcaaaattatctcagtttaggtactattaataaatgttccatgaaaaataataactttatacttgaagttgctttcaatgtgaacataatggctgggtgcggtggctcacacctgtaatcccagcattttgggaggccgaggcaggcagatcacctgaggtcaggaggtcgagaccagcatggccaacatggtgaaaccccgtctccattaaaaatacaaaaattagctgggtgtggtggtgcacgtctgtggccccagctactcaggaggctgaggtacaagaatcgcttgaacctgtgaggcggaagttgcaatgagccaagatcacaccattgtactccagcctgggcaacaaagtgagacttcatctcaaaaagaaaaaagtaaacataactacaccaaaattcaaacaaaaatattaacactgttgccctttatgtgaatatgaaagtattacctcaagttgtattttttaaagctaattccattcctgttcttttatcctatataataagtcttatcccatatgattttaatatctgatactttaataaaatgagtaaggattcttcctaatttctatgatcagatacatgtatgtcatggataagaacccaactgttttttctctaagacaaaaatctaagatacttggtcactaaaaatccaccagcattttatataattgttggtcactccctaatgccaagagtcagtgcaaaaaaagcatagaaaggtggcagaaaagaagaaaaaggcgagggcagccaattaaggcaaaaaggagaggaactgagatgaagcatgtagaacatttggagccggggggaaatctcactcctctctaaaagtcccaaaactgtatttgagtttggactgatttatttctaggaagcaccgctgctatttcagatccgcttacctaggcatcttcttttcaccctttccagctcatgcactcttctggctgacagcacaagagaaactcctagtttagacaactggtaagccagctcctcaccaattccactcgaggctccagtcacccacaccaccatatcagtcagctcccattctatggaaggaatgtaaatggaaggaagaaaataagcaatgaattacgctcataaatccaagattagaaaaaaaaaagaaagccttaaacaataccactaaatatgaaggcatgatgtatagagttaaaatttgaaatattctaagaaagcatctccttcttaactaaaaaaaaaaaaaagcattaatacaaatcatactagtaacagttatcaacacagtatttgtatattacagaaccttcatgacttttccagactttacttcaaggtaagccttataacctcatggtttcactctaaggctctatttaacacaaacaggtaagataaatatgatagataagataaacaggctaagtaaatacaaaaatcactgtctggactcacttttccttagccattaaatgaggcattcagattagatgatggctgaaggtcacatccagtttttaattctattattctaatattttgcaatggaggttgatgaagaatctaaatataccaagttctgtgctgttgatggaaacatcctagatttttaaagtagtattttccccatttgccaataatgcctgatgcctatcagctcaaggtcattttgtaaaaatgttccccagatgcctgagctttcatcttaggagaatatagtaattcacccaagaacaaatgcatattacagagagatgaaatattgtactctgcttctccaattatgttcctcttaaaagactacaaatgttacagtactaaagcaatgacaaatggtttattcttttctccaatgaaaaacttattagcacttcaggagatgatattcactgtctctctgaacccgtaaagtcactgttatgcaaagttcctgggtgacttatttactaaaatatatgttatttatcaaaaatatcaaatatcgtatcacttaacatcacatttccgattttagatcagaaaagttaaaatcaggaaatgattgtactgttttaaacagctctaaatcctaactgtgatgttaacagtaccatccctggagactgccagggttcaaatgccagctccatcacacacagcactgaaatgctcccaggtgagaacttggtgccttaattttccacaactggaaatgtgatgaataagaacacatccttcacaggattgttgagaaatgagttaaaacatggaaagcactcagggcagtatctagtacatactcagtgtttaataaacgtcaattataattattgctcaagttttttaacagatggactttactacagcaaaacatagaacagtcacttaataacgtatgtctcctaacttctccagccaggaaaacagagttaccaattctaatggcttaacatttttacattacttcctatgtacttagcacattgtctactaaaagcctcaccagcactgtatggaaaggtattattatctcagttttacagaaaaggtaactgaggtttacagagattaatttgtcccactagaccatagattccattaagggtaggaccctgtctaccttgttcattgctgtggcctcagtgcttagcaaagactggaatattgaaaaggctccataaataactactgaataaacacccaagaaccctggcagagccgggatataagcccaggtatatctagctccaaagcccacactgtccactatttcatgatatacacatttacatatgatcaatattttaaaacccaactgtttcttagacattcaagaaaataccacttgtccttaagaaaaaggttccatgtaaatatctcaactaaggccaggtacggtggctcacatctgtaatcccagcactttgggaggccaaggcgggcagatcacttgaggccaggagttcgagaccagcctggccaacatgatggaacctgttctctatgaaaaatacaaaaattagccaggtgtggtggcgcatcgttgtaaccccaactactcaggaggctgaggtgcaagaattgcttgaacctgggaggcagaggttgcagtgagccaagattgctccactgcactccagcatgggtgacagagtgagactctgtcggaaaaaaaaaaaaaaaaaaaaaaaatctcaactaaggatggaaacatcccaaatactatgtctgggctacaatgctttcctgtcatataacgtacttttgtgaaaaggcacaattgggccaccttcctataggactttatcaagaacaacataacatctattcagataatcatttattcattcattgactacttgttgttcccaagttctgcaatcatcacactctagagtgaatatcatttgttttagaaacacaggatttactaactagtgtcgagctaacaaagacctcttgatatttacacacataagcaaatatttaaagctgatggtgtaaacttttaatacaatcacaattctggcctcttcctcccaccctgaagaaacttttttatttagcaccgtttgtttcccgattccacagaatctggtatacataatggcctccctttaagagcccctgaaagtagattcttaagagttgaaaggaaagtgatagttcaacccccactccagtttgagaattctcttctcaagcccttgacccatctctaattccctcacaggatgaggaagctaattatctctgaaggcttcagctccttttttgggaaagtctaatcattccagggatcttttttatactgatatgataagcttttaaatgctatcaaccagtagcagtgggcagtaatcctgccttgtggtttgacaaagaagaaatcaaacttctggtgtcggtgggtccaagtgtccagcctgaggcatcctccccatcccttcctctcccagcacctcaaacattcatcaaggattttgtatccaaggcccaaaagtttgttacccaagacgacaaatattgacatggatgcagttgatgctgaaaatcatttggaattggagggaaaaacacagcttattaatcaagtgttggaaccccaacatacacttcaagatctccctgtcagaggagatgcggttacggaagaaaatctcaagctaaaatcagaaaaccaagtttcttagacaatacacagaaaatttcatgtcrgcttctagtgtttttcaaacaactgacacaaaaagcaaaagaaaatacagaattgaagcccttctgttttatggaattgctgctgacctttctttatatgttggacagatttcaaaagtgatagtacctttgtttgtggtttcattgaatatttatgaagctaatgtcagatgtaggcaacattcatagcataacaggaaacttccataagtttgtgtattatgttagtctatgagaatgtgcaaatgtattggaaacttaatttagaatagcacatatttatgaaacttaagatgaatgttttatcaaatttgctctgatttgtgggtttagccctgtcttttattataggcttagtaagatatacaagaaaataaccatcatgctgtgaaaaagtgaccccaatcaggtactgactgcacagattcatgtaccctatccatcttcttgggccccttctccactggcttcttccttcctatctcccctcccccagggaaaaactggtttcatatttgtaaaagcaattttaatacttaatcatctctgagagtaacctgaactttaattgtcaaaacttaaccaaatgaagacattttctcagctagagcttctcatttgtgatatttaatactaagatagaattgctggtttctctttaatcaattgaaaacaaaaagagactataaaaatgaagatttttcattgaaactgaattgtcaatctgggaagataattttttgttgtcaaaaacttctttttggccaggtacagtggctcacgcctgtaatcccagcactttgggaggccgaggcaggaggatcacctgagatcaggagttcaagcccagcctggccaacatggcgaaaccccatctctactaaaaatacaaaaattagctgggcgtggtggtgggtgcctgtaatcccagctacttgggaggctgaggcagggagaattgcttgaacctctaggaggtggggtttgcagtgagcctgcactccagcctgggcaacaaagtgagactctatctcaaaaaacaaaaaacaaaaaaaaaacttcttttttttttttttttttacaaaattacctactttgtatctgaaaagatataaattatggtcgtgtgtgtttaaaatagaaaagcttaagggaaaatagaaataggatggaaaagtacttgggaaaatactagtaaccaactccaaatattttcactccagatttttgttatctctggcacagagtagatcttttgggaaatatatgagagtagattaagctcgactaacctgttttttggcggggggacggggggaggggacaaggcctggctctgtcacccaagctggagtgcagtggcatgatcttggctccctgcaacctccacggctcaggctcaagccaacctcccacctcagcctcccaagtagctgggactacaggcgtgtaccatcatgcccggctaatttttttgtgtgtatttttttgtagatatgaggttttgccatgttgcctaggctggtctcgaacttgtgagctctagcgatttgcccacctcagcctcccaaagtgctgggattacaggcgtgagctaccgcatctggccaactttgactaatcttatgtaccacatctggaagagaacagttacaaagagtttggtctcaaggtatatttctactcagcagattaacttttgcaaaattccttaagaatgtattagtatcagaactgtgaaaaatgggagtttcagatgtacacttattgataatcttgctcagttttatcctgcttgttctcccagaattttttgtaaactcaactcctctgtttacagagttttagtcacttttaacaattttttaaaattcagtttgtagactccatttgttaagggaatcaatatcagaagtaatactaaaatgttataataggaaaagggatccactaatatagcttatggttattagagctgggctacctttaatcatggaataatcttatgtataggtgtaagaatgactcactatatgaatacatactaatcatattacaaacattttgcatcccttttgtgacctagacagacatttaaattgtgttgcaattctgctttcttgttttacaaaaagctgtttcaggaagaaaagaaaagaaatgaaacctgtcttctaaatgacaatccctcacagctgttagggaagacagccattatgtcttccctaagtcctttcatctcttaccttctctaaggctaaataaacctatccaatttctgccaccttccctcacatgacatggtatcaggtttcctcactcttctgctcacacccacctgcaccaattctagttggttaatgttcctctttattaaagggagctggctagggcaggacacaggattcggtagggtctggacagtgcagagcaggatgagatgtcaaaaatcacttcccttgtcccccagaaggtagggtctatgagggcctggactgtggctgattcagtcactgcagtgtccccagtgccccagcacagaggccggcacatacaagcagctagtcaggagacatctgttgtttgcagttgttgcttcagacactgaggtctacaaatgcaacccaaggttgcctgatcttttctggcagccacttcacagttgactcctattgaggttactgttaacaaaaacctgagttttgctcacatgtgctgctgttgaaatttttcctcctctagacttgtgccatggatttttctggaccattttaatgtctaaaattagtcacccttaaatttcaccatatgtggctgggcttggcagttcacatctgttatcctagcactttgagaggccaaggtggaaggatcacttgaggccaggagttcaagaccagcctggaacatagtgagagcctgtttctacaaaaagtttaaaaatatccaggtgtggtggtttgcacctgtagtcctagctactggggaggctgaggtgggaggattgcctgagcccaggagttcgaggctgcagtgagctatgatcatgccactgcactccaggctgggtgacaaagcaagaccttgtctctctattaaaaaaaaaaaaaaatcaccatgtgagatatatgcttggaaatgcacagaatttctctagacggatacagaggaggcaggaaatggtggctgcctcgagagaagcacactaggtagctagggcacaagggtcagagaaagctctttactttttactatatatctttttgtatttttacttttgtattatgtgagtgtgctatttttttaagtgacaaaaaataataaacctacagagaagtcaagaaggatttttttttcttttttcatcttgatagagtctgcccatctctccagtctgagctgttttgggaatctgagtctatttcaattttcctttaatcttttcttctttctcactccctacctccaccaggagtctttttagacttttttttcccctaaaactctcctgtgaaatgttaattccacagatatactgtatatcatttatgtactgtacatatatctgtgctttatacataaaaggagttctataaagtttactcctgccaggcgcagtggctaatgcctgtaatcccaacactttgggaggcagagcggggtggatcacctgaggtcaggggtttgagactagcctggccaacatggcgaaaccccaggtctactaaaaatacaaaacttacccatgcgtggtggcacgcacctgtaatcccagctactagggaggctgaagcaggagaatcacttgaacccaggagatagaggttgcagtgagccaagatcataccactgcactccagcctggccaacagagcgagactctgtctcaaaaaaaaaaagaaaaagaaaaaaagcttactccttagttaataagcatatgactaaataagcatatgactaaattttaaaattaagttaaatgttaaattaaaatttaaaagttattaacttctaactttataactgtatttgctgaaaaacatttttatggtttttgagacagtgtctcactatgctgcccaggctggtcttgaactcctgggctcaaatgaccctcctaccttagcctccagagtagttgggattgcaggtacatgccaccacgccagatttttgctgaataacttttatgtaacttacttagataaatagcaatttatcaaactacatgtgcaaatttgcaaattatataactacataatgataacaatgtaattaaatttaaaatccttcaaactgttcttttccgacaaaacacaactgaaaatattaaatgaatttcttaaaattttcaatgatcttaacttttaacttttccttaatatgagaaaataacttttaacttagtagcttagagatattcattcagatgttgtcaataattttgctttttagcacttgacataatttgatgggttgaatattttttgtaggattaaataataaaatataatctattttcgtttaattctccaagtccaagtgaacacaaaagcactaaagatcaaacacaaacaacgtctgcaaggcagccaatggcagccaataggcacacatattcccccgctgaggtggaacaatcgatcaagagaaagcccttggttaatgaagttgtgcagtatttgggattcctgctttaaaaggagaaagcccaatcacttgccatagttttgtagcactgctgtggcgtccatgttgtgtatttttcgtgaactcaatgtcagtgctgcacatgctatacccaagaaaacccaaccagaaaaatgaaatactaaggaataatattttctcgggtggggttaagctttggaggggcacaaaccactgtattaccagatttttttttttttttttttttgtccacaggaaccaattctcaccttgggatcaatatcacccccctcaacgcccaacccataacgccccccccaaacatagtctatctttcgagctactatctcttccaagcaaactttgtaacatgctttgagtatttttataccagaaacttggtccagggaaaccccatttccccaagtccttaaggatccaaagcctagctttcggtaggtcatttaatttctctgaacatcagtttccctatctggaaaataagattaataatgcctaccttgtaagagttgttgtaaaagttaaatgttatgtgtgtaaagcgctgagccaacatacagcaaatgtacacgatgtcaaatattaagcaagacacagataaagtgagataggcagtatgccaataatgatctcgctccagcaaactgccatttttagttctttctagtgtttgactagaatgagtaagtaggtgaaggacttcggattatctcagattttatttcaaaactgcaggagtgggaagtggaggacagactacttcaggtagtagaacgaccgggcttccggtacttacaaaggagtttcccttacaaacgcagggggacgctcactgtttctcaaagtatcgtcctctgagacaacaccagaatcccttgagtcctgcgtaagatgtcagagtcctcaggagcaccgccgactccagtgctctcttaacagtttggcactccctggagaggtttcctagcctgaatggcaagtccatgccatcttccgaccagtacagaagacaaaggggctttttagccctcgcctcttcctccccaacccgcagcccctgcgtaaggggcagccgggccttcgggaagctccacgcaacccacaaaggacccgggatcactgcagaacccccggagacccggacacgcctcggcagctccgagcccggcctcccactcgggagaggctttggccggtcctcacctgggcgtcgtccctgccactcggcccatagtagcgtcaggtcgccgtcagccctcaggaagcgcagcagctgcaccaagagcaggagcagcgcgcacagcaccagcagccacagcagcagctcccagttcattgcggccgcgcacg

SEQ ID NO: 97537 - DNA, 17419 bp, Homo sapiens
tatttcctgtgtgacttttttgcttttaagaggtcagttttggccaggtacagtggttcacacctgtaatcccagcactttgggaggccaaggcaggcagataacaaggtcaggaaatcgagaccattctggctaacacggtgaaaccccatcactactaaaaatacaaaaaattagccgagcgtggtggcaggcacctgtagtcccagctactcgggaggctgaggcaggagaatggtgtgaacctgggaggcagagtttacagtaagccaagatcgcgcctctgcactccatcctgggctacagagcaagactctgtctcaaaaaaattaataaataaataaataaaaagaggtcagttttgtttatttatttatttatttattttgctttggattagacagcctggtccatctatagtaaaaaggctcaagaccttctcagcccagcagaaccttaaggaggcttcccagacccaaggcctttgtgcattgccattgcagaccaggcactgcctgattccagagggtactgttacagaggctatgatatgatggtgcctcttggagttatgtactgcagtagagctgccaatatcctcagttatcttagctgtgatttaacattattatcatcagcaagccagtccttttacttaacccaaatcctccctaaaacagtcctcttagactccttatcaatcccaccatccatgctgtgagttccaatgggtaacatctgaacatcattcctaatatttgctgttgtgatctattagaaggcagctttagaagaagagtcaaatctttaggataaaggctaattaaaagcctgctaggtaaagctggaaagctctcttggtcactgactagggaactgtggtatcttatactgtcacaattttcttcacttggttttagcctttacacttcactccgatctggtcatgaaattgatccatatgtattcaaggatttccactattagtgatagccagcaaaccaggatagacacattctttatttttccttcattttgaaactactgagcacctccttcaaaatcagaactagtttaaaggtttgggaatgaagagagttattatttgaatcacaagtagttgtgaaggaatttacaaactaccatcctaattttgtgttgtaaactgcagaagaaaggtagtcaggaatttaaaatgtcctcagttcatccaaacatggagaattaatcatatttttttctccctacagatagttttcagttccagacaaaaccatccagaactcaggaggccttctcaagtgaatgctgcaggtagacagagatgctgagggtgaacatggagggaccaaaagtgacagaaagatgaccattaaactgagccacttatgtcacttgcagatgaggagtggtgactcttgtactcagtattaaggttaacagagaagatttggaaaggcaatttttgattctctatagggaaattatttctttttttttctttcttttttttttttttttttgagatggagtctctctctgttgcccaggctggagtgcaatggcatgatcttggctcactgcaacctccgcctcccggattcaagtgattcccctgcctcagcctcctgagtagctgggattacaggcatgtgccaccacactttgctaatttttgtatttttagtagagatggggtttcaccgtgttagctaggatggtctccatctcctgacctcatgatcagcccacctcagcctcccaaagtgctgggattgcaggcatgagccaccacacccggcgggaaattatttctttttattttattttattttattttattttattattattgtactttaagttttagggtacacgtgcacaatgtgcaggttagttacatatgtatacatgtgccatgctggcgtgctgcacccattaactcgtcatttagcattaggtatatctcctaaagctatccctcccccctcccccctccccccaccccacaacagtccccagagtgtgatgttccccttcctgtgtccatgtgttctcattgttcaattcccacctataagtgagaatatgcggtgtttggttttttgttcttgcagtagtctactgagaatgatgatttccaatttcatccatgtccctacaaaggacattaactcatcatttttatggctgcatagtattccatggtgtatatgtgccacattttctttttttttttttatttttttttatttttttattttttttaatttttttttttattatactctaagttttagtgtacatgtgcacattgtgcaggttagttacatatgtatacatgtgccatgctggtgcgctgcacccactaacgtgtcatctagcattaggtatatctcccaatgctatccctcccccctcccccgaccccaccacagtccccagagtgtgatattccccttcctgtgtccaagtgatctcattgttcaattcccacctatgagtgagaatatgcggtgtttggttttttgttcttgcgatagtttactgagaatgatggtttccaatttcatccatgtccctacaaaggacatgaactcatcattttttatggctgcatagtattccatggtgtatatgtgccacattttcttaatccagtctatcattgttggacatttgggttagttccaagtctttgctattgtgaatagtgccacaataaacatacatgtgcatgtgtctttatagcagcatgatttatagtcctttgggtatatacccagtaatgggatggctgggtcaaatggtatttctagttctagatccctgaggaatcgccacactgacttccacaatggttgaactagtttacagtcccaccaacagtgtaaaatgttcctatttctccacatcctctccagcacctgttgtttcctgactttttaatgattgccattctaactggtgtgagatggtatctcattgtggttttgatttgcatttctctgatggccagtgatggtaagcattttttcatgtgttttttggctgcataaatatcttcttttgagaagtgtctgttcatgtccttcgcccactttttgatggggttgtttgctttttttcttgtaaatttgtttgagttcattgtagattctgggtattagccctttgtcagataagtaggttgcgaaaattttctcccattttgtaggttgcctgttcattctgatggtagtttcttttgctgtgcagaagctctttagtttaattagatcccatttgtcagttttggcttttgttgccattgcttttggtgttttagatatgaagtgcttgcccatgcctatgtcctgaatggtaatgcctaggttttcttctagggtttttatggttttaggtctaacatttaagtctttaatccatcttgaattaatttttgtataaggtataaagaagggatccagtttcagctttctacatgtggctagccagttttcccagcaccatttattaaatagggaatcctttccccattgcttgtttttctcaggtttgtcaaagatcagatagttgtagatatgcggcgttatttctgagggctctgttctgttccattgatctgtatctctgttttggtaccagtaccttgctgttttggttactgtagccttgtagtatagtttgaagtcaggtagcgtgatgcctccagctttgttcttttggcttaggtttgacttggcaatgcaggctcttttttggtgccatatgaactttaaagtagttttttccaattctgtgaagaaggtcattggtagcttgatggggatggcattgaatctataaattaccttgggcagtatggccattttcacgacattgattcttcctacccatgagcatggaatgttcttccatttgtttgtatcctcttttatttcattgagtagtggtttgtagttctccttgaagaggtccttcacgtcccttgtaagttggattcctaggtattttattctctttgaagcaattgtgaatgggagttcactcatgatttggctctttgtctgttattggtgtataagaatgcttgtgatttttgtacattgattttgtatcctgagactttgctgaagttgcttatcagcttaaggagattttgggctgagacaatggggttttctagatatacaatcatgtcatctgcaaacagggacaatttgacttcctcttttcctaattgaataccctttatttccttctcctgcctaattgccctggccagaacttccaacactatgttgaataggagtggtgagagagggcatccctgtcttgtgccagttttcaaagggaatgcttccagtttttgcccattcagtatgatattggctgtgggtttgtcatagatagctcttattattttgagatacgtcccatcaatacctaatttactgagagtttttagcatgaagggttgttgaattttgtcaaaggccttttctgcatctattgagataatcatgtggtttttgtctttggttctgtttatatgctggattacatttattgatttgtgtatattgaaccagccttgcatcccagggatgaagcccacttgatcatggtggataagctttttgatgtgctgctggattcggtttgccagtattttattgaggatttttgcatcaatgttcatcaaggataatggttgagaaaaacttttttaaaatacctttttttttgagatggagtctccctctgtcacccgggctggagtgcagtggcaccatctcggctcactacaacctccacctcccaggttcaagcaattctcctgcctcagcctcccaagtagctagaattacaggcatatgccaccacgcctggctaatttttgtatttttcgtatacatgaggtttcaccgtgttggccaggctgacctcaaactcctgacctcaggtgatccgccagcttcagcctcccaaagtgctgggattataggcgtgagccatcacacccagcattttaatagcttttaagtgcattttatatgtagcatatttatttccagctataaatttgtcttgttaattattttagcccagatgatattaaaatgaatatacatttcctaaccatgtacctcctgggtctctaatgcttatcagtgttcaatgtccctacctggagttcaccagccactctatatacagttttccatcccacttatctaacttgatttcttattgttttcaaacaaaaatctattccacatgaaccactcccacactaacctgtgtgtctttgctcacacaattctcccttgttaaatgctgagtgacctccacatctctctacctattaatatgttgaccatccttcaaggccctcctcagtctccacttttttagatcattataactcagagagatctgacttttgagctcagcgtgcctgtgaaaagtacactagatcagtagtcagagtggtaagctctagttttggtttggcttctcaatagctacgaagctatatgtaatctctctgagcctcaatgacctaaaagaggtaatttttgcctgcctgaatgacagggttgttgtaggattagatgatgatatataaaataatattaaaatgtggtattagaaaattcaaaaatgctaacagaaaaaatgtattattattgctttgtatcatttttatgttttatttaatatttagttgttatttaactattcaagtgtggtatttccccatttagattgaggtatttagattggctttcagcttttaaaaattcctaatagagctttgcagttacagctgtagtccctgacttttaaaattttatggagtaatggaggagaaggataggcaaataattaatgaatgatacaggaagacttcctggaaaaagtgactttgagacccggtaatgccccagtaaaggtggccactctcagtttttcattttctttccacaaagaacagaggaagagttcctagatcaagtgaagaggaagctggctcagaccagccctgagaaagacctgttgaccacaaagccttgtcactgtaaggatatcctgaagttagtgctcttacccctcacccagcattgcttggtcrttggagaaaccacctgtgcattttattacctgctggaggctgcggctgcctgcttggacctgtcagataattatatggtgagcaggctctgtaatctgcccttcagctgagccttttactttgagaatgtgattgagatctcttacaatcataaccatgagtgaaaagtggaagaaagtaggagagagagaagagctagaaaggatttaggaaaaaacatgcagtgggaatgtggtaatggaatagcaccaacctgtgccagcactgcccctgactcttgcacaagcagtccagctcccgtttctagcttgaaatccaaatctgtttcaaattctgatcttgaccctcatcataaccttactccagcctttgccctaatctcaccccagcatcatcctaatcctaatctggtttctttatcccttgccctgtttggaggccttcttttatttgaggaaggcaagcagtcttctgggccaaccctcagcattttcatttttgaaaaaacagaaggtgaagatctgtcagtttgaggaggccactttctgccgtcttctgtcagaggtgagggcagggagtgaccttgaagtgccggctatttctccttgagggttaccctattatttcttttaaaatcttttcattgttttttgtgtatgattataaatgtgataatgtgataaaacgtttatatacatttaaaatatagaaatatgtaataggtagaaagtgaaagagctcccactaatcctacacccaccaccataattagtaattgtgtgcatgttccaccaactgtatacaaacagccatatcattgttttccatttttttataggctcatattctacattttcttgctcctgcagcttgcttttattcttaatagtacagacggaacatatttacattttggtatgcatactgatccaccacatagttacaactgccaagtattccattggctagatcatagcttagctcttcccttcttcaggtgcatttaggttatctctaatttggggattattataaacattgctacagtgaatattcttcttaagtatctctttctccccttgtgagagtgtttctgtaagagaaatttccaaaggtggcaatgctaagacacaattttaaaattcacaaatacactaccaaattgccagccaaaaatattatatcaattcaagttttttccatttcctcatatccttactaagatcagatactaccagtcttttctaaccttgctaattcctagataaagttatattgttttaatgtgtttctcttaattaataagatacatcattcttctaagtttattggtcatttgtattttttgtaaattatccattcttattcattgaagtagatataaactaatttgctcattggagtatatgtaaactaattttaatgtaaaccttaagataattgggttaggagagtaaacttaatgtacataatgtcttgaaggccaaagggaatattagagttgtcacattgttgcattatttatgcttcaaccaagaggtcttcagagcaaagttaaataattattctttccctttataagagaaagttattgtacagtcctcccaagattgttctttgttctagaatcacgtagactttatcactttcttgagggattcagccttagaatgtgaagatacaggataacttcaaggtagttccccagctcccaccccacatctactatgattcaacctgtttaggaagagagataaaggatttggtgatattatagatgctttctatgtcatgtgagagcatctgagtctccactcaaatgacgatcccttctcagtctagcagcatcacattttaaatcacagccttcctctactgcccactgacaaatgtgtgggagatgagaagggaggatactttctccataatcctattttctaaaccctttactcacttatggccatactggtgcttgttagggtgactgctaaccaggctatgctctagctcagctcactctagcacctcagtaaccccaactacacatctcaaaatgaaagagccagtgtgttatatccaaaaccttatatttacattaattcttcttttcccatctccaggtctgtttcaacatgggacgtatcactttagccaaaaaattggctaggaaagcccttygactgctgaaaaggaatttcccttggacctggtttggtgtccttttccagacattcctggaaaagtattggcattcctgtaccctgagccaacctccaaacgaccctagtgagaagtgagaagtcttcctaaaactgtagttaactagcctgagctttgcctttttgacctaaaactactctttttctatcaagtaatcttcaagcatctaacwgacaagcagataacaagacatgtaacagtcagyatacatatatatatgcatgtaacagataagtgtataacatacagttctaactcttccaccttactcccccagccagttacatgtagcaaatagggattcaaagaatgaatctttttttgaaacctctctctgaacttttcccgatcaagtgggattaatcaaaatggcatatgaggttaggagtagtgggatccaaggactatttctgaatttgaacatctgtagatggccccatgatgagtagattggagctcttatagggagggaacgttgggcattagtaaagaataagggtgtgctaaccaccctgtgcctcacaacagtaagaagaatttggcagtcctgcagcagcaggtgcattgcctctccctactctggcagctctataacctggaggccacagccagtagctacaggtttgcctgcctggctactcttatgcagaagaattcagctgatgagtttgcaaatgaagcccaggtaagcaagtccttgctttacctttggacctcactcagaaaccaagttcctggttttagcatgattctccaataacccagacaacactgttcaagcgaggtttctcaatttgcagtttatagatgggtttccaggtatgagattatctgcgaactccctgaactgaatgcagaattttatgtgtatattcaaaagaacctttgggggttggcaggaggaagaaaaggggtcatagctctcatcagattctcaaagaagcctgttatctaaaaaagatttaaaactgctgacctaggaaaaaacaaaaggaaatgtgtcttcctcattttagtgtcttatctttctctctgtcttatccacatattcaacaatgaactatttggtgaacacctattataagccaggcactgatcttgactccagggaaatataataagtaaaatatagagtatgttaggtgataatcaatgcagtggagaaaaataaagtggaggcaaggggatatggggttctgtgaggtgaggggtggggtatagttttgaacaaggtggtcagagaaagctttgctgagcaggtgacattggagtaaatatctgaaagaggcaagaaagccaggctgtctgggagtagagtatccaggcagagggcacagtgaatgcccaaggcatacactctgtgtttgaaggacagtgtgactggaggggaggaagaggaggagagtgaaccaagagatgaggtcagaaggaccaggaaggggtgggatggcaaacggtgcagaccttaggccactgtaggagttttggcttttactctgaaagagatgggaagccattaatgggttctgagaagaggggtgacagtatctacttacattttaataagatcattctgtctactgtgttgaaagtaacctgaaggggacaagggaggaagcagggagaccagttaggaggctaatgcagtaatctaagcaagagatggtgatggcttggattattgtggtagggaaaaaaaagttgggggtggtcttttgtcaaaatagagccaacaggattcacttatggatcagttctgggatgtgagggaaagaaaagagtcaaggataatctgaaaagttgtgacccgaacttctagagggacagagatgctcttaattgggatagggaagtctgcaggaggaacagatttgggggaagatttgggagctaggctttagacatgttttatttgagatgcccattagacatcaaggtggagacaagtctggtgaatatgagtccaggtgaatactcaagtctggggttcatgggagaggtctgagctggaaatagacatatgggaaccatcagtgtgcaaatactgtttaaagccacaggactgggtgagaacaccaagggaatgagtatagaaaggagaaaaagtccaggaactttgttaacagctccagtgttaaaaggtcagagtggtaaggagaaaccagcaaaagaaacagaataagttgccagggagataggaggaaaaccaagagagcatggcatcctggaaagttagggaagacagtgttccaagaagagagcactatttcaagtgtgcacatagttatatagagcactaactatttcaaatgtgcacatagttatatagagagatctaggcagcagccctgaagagctctatggagcaaatatcagaggtcttaaattagaaaacaaagaagagggagtttaatcagtgttttgaaagggaaagtcatggattggagaggaaaagcaggagcatgtagagaaagtggtttgtttaaagaacatgcagtgagaatgatccaattagaagtgtaggggtgagaaggagcatgtttttctagctgggttggaggcaagtggtgggataccaggagtttagactgggtgagcagcagggcaccataataggctcttacataggaaaggawcaaaatggaaatgtcacatgaatatacaatgggaatattttgccctgtgtttgtttccctgcakgttgtctctacctatgtggagctctctcagttctcccagagtgtgggcatcaaggacaagtggctgcactgtgagcagatggccattcagaaaagcagtttatgttggttctccagggaggggttgttggccacagctcagctcatgcaggccctggcctacaccaagctctgccttggtcatcttgacttctccatcaagctgggtaatgggacttagggatggtgggtctagggcttttagagagtacatgttcacagctagacctcacatggtgctcttaaacctcctcaggttttcaagctcgtgagatatgcagacacctccagaaaccagctctggagaatctgattctctcagttctcttcagatctgcatttctgaagaagtattaagatcattttctgtcatttgtatttgtttcctaagaggggtgtgtatattttcccagagaagtttggagtggagagggagatgctgttccatttccacaccctgggatatccttcccttggccactccagacacattatcttaagtgtggaagagtcaggagtggaaatgcagagtcagagctactatatattcctcagtacttgggtctcatggacaaagtttcttcaaaaaaaaatctgcagggagatagagaattgcagcagctgaagactctggaaactgcctcagaggcaatctcccacctcctttgcctagagatgggtctgatcccaggcttagatattctctttataaatagagctatgaagagatttaaaggatgttaggctgctttgaaggtgtaagaccccttcctttcctacccatcctcctcactccctagctggtcccagtggctctctctctcggcagatttggtctgtgtgtccatgtactggagagtcagtgggcgctcatttctcagagttatgatgtccttggcctggcctgcttttactctgcttgcttagatctgctgctctatggaaaaggtaaatcttgcgcaggtctctgctgtactcctgagggattcagacctcagatggggctctaggtttggaatacaggcagtcatgaacctgtccctcaggcatggcctctgcccctgacctctggctccttaaagtctgggaaccatgttgtgattcaggggtgtctgcctttggggtcttttttccttccctgtatcacataccttctataccctggttcctacactgatattatatactagcgtggttaccttctctgtccacaggattgctgtgtcggccctttagtgagtgtctgcgtttcgttcaagtctacgagcacagccgtgttctaacctctcagagcaatgtcatgctgggggtccactcctccctggccatgtggtaatgtcttactcaagggctgtggaaaaggatagacatttatgtcatttaagctgtctctccccaccagacaggacttttgaacctctctaaccaacttttaaagaccattcacctcccataccctcccatcttattagaagggctcttgtcctttaacaggttttggcctataggtcaagggttacgtttagggttacatttaactgctagagtaacccatagcaaggctgaatataattggtctccttttaagtttccttgtatgtgagttagtagccttggtcactttctagcatcacaattctgattgtccatgaggtcttagagccttaaagaagtgatgattttaagcaaaagtcatggtgggtaagcagcggatattgctgcaagctgttactcttttcctccaggtttgcccaggaatcacagtgggacctgtttaagcactatttctccaacgcttgcagttggtgaaaagaaccaatgcctcgctatttggtgcacatggctttgtccgattcctagaatgccatgtgttaatgttacagaaaatgccagagggtatcttcatgcatattcctctagagcttcacagccaaacccttgaggtacctgtttctcagctgtcctttgactaacacctgattcacttagttctaccctatggtgctctttctaccacctgcatctcttccttttttcccttttactggctctgtttccctttactctttgaatcctttgtttctccacctagaaagtttctacctaccttatgtatccttcccgatattattgcatctagttctggactgggtttcttaactttccacctttgccagctgctacccagtatcattaaaatattaacatttagccttgctcaatggacctgtagtctatggttcagtctataatttgatacagctccctccagcccttctgagtctaaaacacattccaattcctctgttttccaggcttattttgccatcagtaactccttcctgttcccccagccatgagtgaatatgctgaatgaggacctttgtaagttctgatgaagtagcatgttaggagaatgaagcactaatcccagagctaatggaccttcctttcctttcagtactgtaaggagttcttctctcaatgtgtgacctgccctgtctatcaccagtgggtatctgagcttaaggcctctgtaatgagatgtgaaaagagagaattgatgtccctgactaacagcatcagaccttttgacacctgcttgaccaggatttggataaaaggagaatttctgcaggaaaataactcttagaaaagaaacttaggaatacagagtaagcatttcttcctggaagccttgtgtgagagacataaagacagtctcagattcttactcacaagcagtcaaaggctgcacctctgaaataaaaagggacacacagatgtaaggagttagtccttgctccagaggtaagtataatcctcttcctagtgctaggccctgcctggacagataggaatcccttctattgttaaacagcaatttcttcagcttctctcagctctttgtttcagtattggtaactctttggcatagaaagttcttccttgcttttagccaaagcagttgggttgtttccttgaagtaactggatggtcactaaggagagaaaaaggtcttagaagtcacaatgtaatgtctatgaaggtgaatgataagattaggcaagaaaaggagaggaaagaatatagttcctttcctcagaggcctgcaaatcttctttcccatggctgctatttaactttgtaattgctgaggacattctttgtatttgtgacattctttgtgttccttctttcaggatttgacagagtggctgatgtcaaggagaacaaggatgcagaagaaactcaagatgtatgtattaaaacaaaagaacaataacctgaagggaccatgattctgttattgtatataacacaaggaaatgccccagattctcctttaaaagatataatgtacatattaagtatactagcctttatagttactgctatctacatgtttatcaaaataaaagactatttttttctaaaacatgccacttagattttttttcactcttaaaagtcattagcacaactttaccagaagttacaaccaggagtagacgggaggcctggaaggctttaagatgaactgattccatcttttataaggtgagatccattagcagatgaaaaactatgaccctaataaagaaattgccattacttaaggaaggctggtagtgcagtgccttggtgttgccctcttttggcacagatatggtaatgggctcctaagaagtcaaggagtcttttgagaggtacaaagggctgtgggaatccatttctcctttgtgctatgtgatttgggcattcccaggtaaaattgtgaagttgccagagtatgtattaactttagctttcttcctttttcttctctttggagttgccatctttggcctttatctgtttgatggtgtttcttctgctgagtatgatcttcccattgatttcttacactttataactcaatcatctagtgtccatagagtgaatttgctaatgttatgatagctgcaatttgttatttacttacttgtgcttgaaatacattgtttaaatcctttatcaactctgtgaggtaagtactattattatcccatattacagatgaagaaatggaaggctagaaagagtttaccccaacaaacacagccacaaaatggtagatctgagcttctaagtcagatttgattccagagattatgttaggctatgcaggctttcatgggaactaggctttcctgtacccagtcttcactattctcttcaaatggccaagatcagaactttaaggacaggaagggagaagtttatgaaagggaggcctgtacttaccctttaaatcatgcaatctaatctatacatttcctccttccacttttctccctcttgctacctttctttttcctgtccctctattcccttcatcttcccccttgcattcctcccatcttaccccttccttcctttctttcttcttctaacccactttctgtcctccttcctcattcctttaaatttctgggaggtaatatagagtagcagtccagacaaggactctggaaccagatagactgggttgaaattctaactctgctgcttattagctgcattcatttgggcatataatttatcttctatatgcctcagtttccttttctgaaaggaagttttccttttcctttctagaaagtttccttttcctttctagatggagttaaaatatcctcttgtcctaaaaataggacaaaagactgtcaatgtgaagattaaatgactataaagcacctggcatatagtaagcactcagtgactagtagctattattattggttcagcttttatatttaaaagtagatgttacatttatgtggtacaaaattcaagagaaacaagtgtgtaacagtgaaaaactctttcccatctctgtcttccagacaccagttgccctccccagagataatcagtgttaccacttccttgtgtaccctagcaaaattatactatgcacatgtaagcaatagtatatagttactgcatccttctttcccacaaatggtggtgataggtaataacaccctgcactacttcatcctttttttttttttttttttggcattcccttttggcactttttttattaagataaaattcacccttttaaggtatacaattcggtgctttatagtatatttgtaagattgtacaatcatcaccattatctaattccagaacatttttatcaccccaaaaaggaactctggtcccattagcagtcactccccatttccccttcccctaatctttgttaaccactaatatattttctgtctttaaagattggcctattctggacatttcatataaatggaattattacacatggccttttctttcagttagcataatgttttcaaggttcatttatggtgtagggttactttttatggccaggtaacattccattgtaccacattgtggcacatgatgccacattttgtttatctgttcatcagttggtggacatttaggttgtttccagtttttaactattgttataaataatgctatggtaaacattcatgtacaagttttcgtgtgaacataggctttcaattctcttgcatatatacctatcttggcgtttccaggaattgtcaggtcatacagaaagtccgtgtttaactttttgaggaactgtcaaactgttctccaaagcctctgtaccattttacgttttcaccagcaatgattgaggcttccagttttccacagcctagccaacacttgtttttgtttgtcttttttattatagctatcctagtgggtatgaagtggtatcttatgattttgatttatatttccttagtaactaatgatgttgagcatcttttcgtgagcttactggacactagtatatcttcttggagaatgtctattcaaattatatgcccattttttaattggagtttttgccttttattgctgcgttttatgagttttaaaaatatattctgcatactggacccttattggatttgatttgcaaatattttctccaattctgtgagttgtctttccactttcatgacagaatcattttgcaaaatgaaagtttttagttttgatgaagtcagtgtatctattttttagtttggatccttgtgctttaagtgtcatatctaagaaactatcaactaatctgaggtcacaaagatttactcatgttttcttctttgacttttttgttttagcttttatatgtaggtctttgatttattttgagataatttttgtatatcatgtgaggtcatgttacaaaatcatgcttttgcatgtggctatccagttgtcctagcaccatttg

SEQ ID NO: 97538 - DNA, 12470 bp, Homo sapiens
acccagcagtgagttaaatttaaggtgcttctcctaaggtgcaagtttaggagaatcacactaagatgttttccttcctgaagaaagctctggtgatgatttcaaaagacaatgatcattaaggtctccctccccagtcctggctgaggtctaaggtgttgttttccagatgctggggttgttgttctcaaactgtgcttaagatgagtattcattatttctgttggtaattttttttttttcaagataggctctcactttgtcacccaggctggagtgcactgccaggaacacggctcactgcagcctcaacctcctgggctccagtgatgctcccacctcagtccccaagttgctgggactataggtgcctaccaccacacaaggtttattttattttatttagtttagtttagtttggttttttgagatggagtctcactcagtcacccaggctggagtgcagtggcgcaatctcggctcactgcaagctccacctcccaggttcacatcattctcctgcctcagcctctcgagtagctgggactacaggcacccgccaccgtgcccggctaattttttgtatttttttttttttagtagagacggggtttcaccatgttagccaggatggtctccatcttctgacctcgtgatccgcccacctcagcctcccaaagtgctgggattacaggcgtgagccaccgcgccagctaaaggttaatttttatatttttttgtagacacattgtttcaccatgttgcccaggctgatcttgaactcctgagctcaagtgatcagcctgcctcagcctcccaaagtgctgggattacaggcatgagccatcaagcctggcctcctgttgataattttttaaccacaccctcccctttagtaaatcagttgccctatgtatcgttaactattttgaaagacatatgtttgtacattcaggaattaggtgtaacaacacatgggggactaaagggatgctgcttataatcattaaatacagtgcatcagtgttttgtgtttttttttctagagacaagttctcactctgtcacccagggtggagtgcagtgatacagtcatagctcactgccacccccacctcctgggctcaagtgatcctcctgcctcagcctctgtaatagctgaaactataggtgtgcaccactatgtctggctaattttttaatttttagtagagacaaggtcttgctatgtttcccagactggtctcaaactcctgggctcaatcttcccattttgttctcccaaagtgctgggattacaggcgtgaaccatcttgccctgtcagtttttttcttttcatttcttttttctaatcagattggtacattataactactaaatactaacttccagttctgtcacttttagactatttggtgtaaataagatgaaaattagatttagtccagaggcgactacttcttagtatagcacagtactaagaattgttcaaaatctttctcactgtgtcatttaagcaaagtaaaaagtagtaataaagggaacaaaatcctgaaatgaaggcgggagagcagaactaattttttaagaaaataacttcctatttctatgaacatttgctgctcctaagatttcataccatttctaaggatgcaatgacaaaaatgatgatttctattagttcaaggaccgacactatgaggaccagaggaaaggaactgacaggtttaaccactcagacaacacagtacctcttcccttcctcatcctctgtcataaaatgtttgaaatctggtctttcatttggttgtgaaatctattcagctacccttactgaatgcttaccaggtacaatgcatattcaggactctctggtacagggtggtcttgatgaggctgataaaatataatgcaagtggaattagctaaatgccaaaacatgccatgaaaattcagagtataaaaggagtatgtctgagagacaataaaataaataaatgaataaataagaaaaagaaaaagaaaaaaaaggaggccgggcacggtggctcatgcctgtaatcccagcacttttggaggccaaggtgggtgaatcacttgaggccaggagcttgagaccagcctggccaacatggtgaaaccccgtatctactaaaaatccaaaaaaaaaaaaaaaaaaaaaaagaaagaagtgagaagaggctttacatcacagaggacatggggtcatgctaaagcatggcccaagggacccagacagccttggtttagaattcatacctgccacttactaacttactgagcccatagcacaggttgcataagtgcatgaacatgaatagaaatattctagaagaggccgggcgcggtggctcacacctgtaatcccagcaccttgggaggccgaggtgggtggatcacctgaggtcaggagtttgagaccagcctgaccaatatggtgaaaccctgtctctactaaaaatgcaaaaattaagaccgggtgtggtggcgtgtgcctataatctgagctactcgggaggttgagacaggagaactgcttgaacccgggaggtggaggttgtagtgagctgagatcgtgccactgcactccactctgggccaaagaacgagactccgtcccaaaaaaaaaaaaaaaattctagaaggatgtgcccaagtgatttttcctgagtggtagaataatgagtgatgtttatatcttctttttgcttgtctatactttccaattattaaacagttaataagtattaattgttaaaacaagaataaagaaaaacattgtttaaaaagctggtattcactgcttgaaccaggcaggtggaggttgtagtgagctgagatcgtgccactgcactccagtctgggccacagaacgagactctgtcccaaaaaaaaaaaaaaaaaaaattctagaaggatgtgcccaagtgatttttcctgagtggtggaataatgagtgatgtttatatcttctttttgcttgtctatactttccaattattaaccagttaataagtattaattgttaaaacaagaataaagaaaaacattgcttaaaaagctggtattcactgcttgaaccaggcaggcggaagtcgcagtgagccaagatctcgccaccacactccagcctgggagacagagcgagactccatttccaaaacaaaacaacacaaaacaagacaaaacaaaaaaagctggtattcactaaatacttgacatttattgatataacaatttctgtttctagtcttctcggcaagggactcaatctgtagaaacgtgtgaccatgtcaagtcagaaattcactatgaggctggcatataggagcggatctcctagctagtgagtgaacctgaggtgggaggcgggactcgactccagaggcagggctccgaatcggatggaggactacctaaaccagggcaggggcaaaagcagctttcagtcagacacacctaccagtgtgccatgtcaatttaccactgccatgggaacagccgggagttaccacctctttccacggcaatgacctaatgacctaacagttactaccctttccctagaaatttcctcaaaaactgttccttaatctgaatgccattaaaagtgggtataaatatgacccaaactgccctactctgtctactgggtagcctcactctgcaggagtagtcaccaaactgtaacaatgcctcttcaataaagctgttttcttctacctctggcttgcccttgaattctttcctgggaaaagccaagaatcctcatgggctaagctccactttggagcttgcctgccctgcatcaaacctagctgacatctcaaagtggcgatgtgactacaatttattatatgattcaattttattctcataacaatagaggtagatattattgtctcaccttacagattaaaaaactgagggtattatacattatgcagtaagtcatgaatttgggaatctgagagtgttataagtcaagtaccaggtttctcagcatgagcacggttgacattttggatcagataattctgtttggggtctgtcctgtgcattttaagacgtttagcatcattcctggcctttacccaccaggtactagtggcatccctacccttaggctgtgacaaccaaaaatgtctcagacattgccaaatgtcctcaggttgagaatcatgggtctagtatattctattcattacccttgagcaatgaactccgaaaattcaagatataaacctcaataccattttcaacacttcaccttcacaggggcttagttcttaatgaaatctttaataaatggtgttgatgatgaaaacaaacataaataatgatgtaataaacatattttgcataaatacttttctatcttttgcatgattaacattctaatgacagtcaaatggaacaaacattttaaaggcctctcattcatactgttaattgctgaccaaagagttgtaccaatttacatttctactagtagtgtaagagtctatcttaccacaccctcaccagcattggctattatgtgtatatttctatctttgctaatatgagttatttctatttattttaatatttgtgtttataaaattttgtattgttcttatttatatttttgagcactagtaagagtgaatattccccgtatgttatagccaatagcacttctttttttcttaactgttttgtgctttttgctcatttgtcttttggatggtcttagtattgttcctttttttttgagacagagtcttgctctgtcacccaggctggagtgcagtgtcgctatcttggctcattgcaacctctgcctcccaggttcaagcaattctcatccctcagcctcctgagtagctgggatgacaggcatacaccaccacaccttaataatttttgtattttttagtagagacaaggttttgcaatgttggcctggctggtcttaaactcccggcctcaagtgatccgtcttccttggcctcccaaagtgctgggattacaggcatgagccaccgtgctcagcccttagtattgcttttatcaatttgttcaagctctctgtatattataacctggatagcatatatgtctacaaaagaattttgcataaaggcatttgagcgtagactttattaaagctctgggaagatggcaaaggatttaaatcacagcaactgaagtaagctcaaattgagttctaaatattcctctttttataagtcccttgtcatttgtctttctcttttctctttctttccttctcttccctatgcctctctcccatctcttcattctccaatttctgttgcttttcagtggaaactagctcaagttatttctttggtctttgcctccatttaaccatactctcagtttttcttccaccctagtggaagatattagtttatcaaggtattttcttaaacaaggacacttagtttcctaagggaaatgccagtaacaactttcaagatatcttgactattataccagagtgaaaaagagttctgaatcctgttgccctatttgcttcaaatactttctccactttgtttaactaatggatactaggcttaatacctgggtgatgaaataatctgtacaacaaacctccttgacacaagtttacctatgtaacaaacctgcgcacgtacccctgaacttaaaataaaagttaaaaaatatttaaaaaattaaaaaaagaaaacagtaatcaaaaaacaaaataattggttgctggtatgattccatcctgcacagctgttctctggagcgtggttgtttacctctgcctggcttctctcctacctaagtgcttgccgccacccatggaagatttgacggacatggacatcagcctcctgaggccccagaactatctttttggttgtgactagaggccaacaaagattatcactttaaggtggataatgatgaaaatgagcacaagttatctttaagaatggtcagtttaggggctggtagaaaggatggattttatattgttgaagcagaagtaatgaactatgaaggcagtccaattaaagtaatactagcaactttaaaaaggtatgtacagtcaatggtttatcttgggggctttgaaataacattgcctgtggccttacactyagtgtgtttcagggcctgggcatatgagtacacagcacttaacaggtatgaaggaagatacaaagcaggacatgaagaggagggagatgtgagacttttcagtrtatctggaaagtgatctgcccctggaagtgggtacatttctacaagaaaaaaataaaacttcttgctgatgaaaatcatgatgatgatgaagaggaagaasattttgatgaagggaaaactgaagaaaaagctctagtgatgaaatttrtacaggatactccatccaaaaaatgcacaaagatcaaaccaaaataaaaaagactcagaactatcaagattaagaccaaaaggtcaagaatccttcaaaaacagggggaaaaaacctcttaaaacaccaaaaggacctagttttgtagaagatattaaaagcaaaaatgcaagcaagtatagaaaaagttggttctcttcccaaagctaagtgcatcaattatgtgaagaattacttctggatgaccaactaggaggctattcaccatctctggcagtggaagaagtctctttaagaacacagtttaggccaagcgtggtggctcatgcctgtaaccctagcactttgggaggccaaggtgggcagatcacttgaggtcaggagttcaaaaccagcctggccaacatggtgaaaccttgtctctccaaaaataaataaataaataaataaaaatacaaaaaatttgccaggcgtggtggtggatgcctgtattcccagctacttgggaggctgagacaggagaatcgcttgaacctgggaggcagaggttgcagtgagcagagatcacgccattgcattccagcatgggcaacagagtgagactctgtctcaaaaaaaaaaaaaaatagtttaaacagcttgttaaaattttctttcttctttttttttttaaatcttttaacccaatagttcttttagagaaaaaaattacctgtcatttcgttaatagttcttttagagaaaaaaattatctgtcatttcatttctgtaacagttgatatctaactgtcctttttacaattcagagtgagaagttccctagcacgttggataaatattgtccaggttccattgccaaaaatgtgttgtccaaaatgcccctgtagtttttaaagatgaaactccatcgtttgcttgtttttttttttgagacagagtcttgctctgtcactcaggctggagggcagtggcactatcttggctcactgcagcctctggctcccaggctcaagcaattctcctgcctcagcctcccaagcagctgggattacaggcatgcaccaccacacccagctaatttttgtatttttagtagagatggcattttgccatgttggtcaggaaggtgtcaaactcctggcctcaagtgatctgcccacctcagcctcccaaagtgctgggattacaggtgtgagccaccacgcctggctctttgcttggttttcagtatatatgtatgtatggaatattatgataggacatagtagtagctgtggtcagacaaatggaaatggtgggaagacaaaaatatgtaactgaaataagctcaatattttaataaaggaaaaaataaattttttccccggaaaaagttgtaagaaaaaaataaatcttctcccatgcatcttaggagtgctttaaacttagatgtttggagatgagtagtctttagataggtggaaatggaggaaaaggtgtgacatgcccatggctacctagtatgcttctatgcatagtacagtttttaaaaagtgagttgcttctctgtaaaaacatattactttactattagaaaccactggagagcaatcatgccctgcttatattaaacatctttgctagatttttatttgattttttgagatggggtcttgctctgttgcccaggctggagtgtatggtgcaattttagctcactgcagcctcgaactcctgggctcaaggggtcctcccacctcagcctcccgagtagctgggactataggcatgcaccaccatgcccagctatgtttcctaaatttttaagtgagatacattaaacctcataaaaattagagctaacatttattgaacactctgttgtactgcctcccaagtataacatggtaattaaaacactggaggccaggcacgatggctcacccctgtaatcccagcactttgggagggccaagtgggcagatcacttgacctcaggacttggagaccagcttggccaacatgaggaaaacccgtctctactaaaaatacaaaaattagttgggtgtgatggtgcacgcctgtagtcccagctacttaggagggcaaggcacaagaatcgcttgaacccgggaggtggagtttgcagtgagctgagatcgcaccactgctctccaacctgggcgacagggcgagactccatctcaaaaaaaaccccaaaactaaaaaaaaaaccccaaatgttggaaagttgcgcgaggtataattcagtttagaaattaagaatccaagacaaaaagtctgcctcaggaccacacacaagcacgaagaaaccaagatagttcaagcatggaccttaaaactgcactgtctaaggctgttgtcactggtctcatgtggctatttaaattttaattaaagtgaaataaattttaaaattcagttactaagtcacactaaccatatttcaagtgctcaatggctccatgtagctagtgggtactgtacagacagcacaggataacatttgcatcatggcagaaagttttagtggacctaaccaaaaaaaaaatgcctttaggctcatttcgtgatggcagataaaagcctctggaattctgataagtttctgaagccatgttatagaactggttattgtaattgcgtgaacttcatccaaaactggtgaaagcgtcaggttggggatagtctggtggttgttactttctgtccaacctaatactgaggctctgagaaattctgtggtgaatttctgtagggggacacagcagaaaaggcatagtataggtcagaaaacctgggtcctataatacatagtaataatgacgaccatttactggttgtttcctatgtaccaggcactgtgctaaccacaggcttcatttaatcctcacaatacctgtgtaaggtattattaccaccactttgcatgtgaacaggctgaaattcagaggagtaaggtcacacaactagtaagtaggagagcctggattcaacacctggtatctattcccttgcgctgaacaactccgtgccctcactttcttcatctgtagatctaaaaggattaaattagaacatctcaaaatttctactacttctaaaactctgtgttctaaattaggacattactatctatctccccaagctaatgaaataagcagggttcctgggaggagcttgttacctatttttctccaaaggagatgctttcccctgtctatgcctctgtcctaaaacctttggtttcccactatctaatgtggtttcaactatctatgaggcgctttcgtggcaaggagtgattctctccagtaggcaatcctaagaacgagcgcagtgcttggcgcacagtaaatgctccatggaccatttatgaaattaagtctaagtggacttcaggaaaatgtgaatctgctaaaatgaactactagccagtatactaggtagaaaacccagctgacgaagaaaaccccaagtggagaagcccttgtagggggttggagacaatttctgacccgcagaaacctgcagtggcgctgacgtttacaagtggtggacaaaacgccacttgcaacactggaagaagcggaaaaccccacccactctggaacaacagcgatcagccccgaatatagggtccccttgccgccccgtagcctcctagtcccgcccctctcccaaggcccggcagtggcagcggctgcggctgcgcagtggcgcgggcgtaggcggagcagcgcgcgccgcggtcagctgactgctgggctggcacgtgacttgttctgtgttcgcttgggtagaggaagccgtgaggccggagcttaggtcgggaagggatggatcgctgagccgatagcgtccgctaggctgtctgcctcggtacctgttactgctgctacttcctcgtttgacaccttcctgggtcagtgagcgatggctctccccggatggggagtcctggtcaggccgaagcatgagctccggtcgctgcctgggagggacgcgggtgggtgcgggggcagagaccgtggcgttggagctggagctggctgggtggctgtgtctggtttctcggcgccaattcaccgtcttgggcctaggttccgtctctaaggaagagaaggagggaaaaagagaaagagctctcgtgggtagttaatgacaggcagaaaggagagatacagcggtctgggatctttcttcttgggtaggaatgcacgccgcctgattgattgaggggaatgaagtgataggtccaggtgaggctatggagtggtgtgtgtgaggtcacagctagcgcaagtgccttcactgggtgtgtgttggggggggcgcgggtgtcgggggtcgggggtggtgggatgacagtttaaaggcctaggagcccctaactgcaggcaaggaaccctcacagagtacacaaggtccctctaggaatgagaaagaacaggaatccagagaactcaactattttttagtagaatgggggagggtaggcaaacaaaacagaacaaaacaaaacaaacccctagaaaagaacttggtgagagtcacataaggcatattgaatcacttgagaaacaggagtaagggggaagctagtattcttttcagaggaaaattctggtatgttagggaaaaatcacatgcttcagtgcgagcccagtacttagcgccgctctgggaatggaacgggtgggatgtgaacagtctatccttaggagttagcactaacgttggagagaaaagtctacacacaggacacgttaaaatacgatgcagtttatgtatacttaccaaaaagagaatgcgaagtgctttgaaagtgtggagcaacgacacatgtgtaaactggcactatgggaagatattctggaggaaagaaaacttgagtcttggcaagccctcaggatttgaacaggttgagagaaatggggataattttacaggcagggaaagccacaggatttgaaagcctgaagatgggggtagggaatgcttctggtggagtcagaagtagcttttacagtggattgcactgcggagaagtgggaaagaaagttgggagtcaggtaacgaggacttttgaatggtagtcgtttacttattcatgcaaataatgtgtactgaatacatgctgtatgcaggtacagtgctgatggtagggtttagaaaattgtctttatagagcttacaggcaagcagaggggatggattttaaaaatcaagcaagcgtgaaatgtgctttgaaggaataacagtggtatgaaagagtgtagtaggggcatgtgtattatggaagattttaaaaaggcattgctaagaatatgactttttaaagattaaaacaattttatttatattcttcataccctctcgctctgagagggtatgacttttgacctgagatctgaaaagagactgaaaagggaatgtgaaggtgtgagtgaaaagaacattccaggcctggcagggtggctcgtgactataatcccaacattttgggaggctgaggtgggaggattgcctgaggccaggagttcaggaccagcctgggcaacatagtgagaccaccgtctctaccaaaaataaaaaaataactagctgggagtggtggtgtgtgcttgtagtcctagctgctcgggaggctgaggcgagaggatcatttgagcccagtagttcgaggctgcagtgagctgtgatcatgccactgcactccctcctgggaaacagagctagaccctgtctctgaaaaacgaaaaaggaacatttcaggctgaagcaacagcgtatgtcaaggccctgaaatgtgaagaggaagaaagcttttcagcctttttgaaaggctagcatggctgaaacggggagggagagaggcaggtggagaaagctggggtcacgccaagcagagcttttattctaaaaacagagggaagccagtgaagattacaggcagtggattgagacaggttgtggctttttttttttttttttggtgggggggagataatgtggagggtggcaaaagtgaatgaggggagaccc

SEQ ID NO: 97539 - DNA, 24543 bp, Homo sapiens; identical to SEQ ID NO: 97412

SEQ ID NO: 97540 - DNA, 62529 bp, Homo sapiens
tctttgttgccagggacactatttgtgtccttcctgttctatgatgcctaacaaagagctctaactcagggtgctgcactgatgcagactggatgctcacagaattgccagacttcataaaagggggctcagtacattggtcctcaattttacatgcttagcttagtgaacaagaaagtaagggacatcttcagggatcagaatatgcggaaaaaattaaaggctacagggaaacttgcaaaggttggcaagaaagacttgttccctcatatggatggaagaaaaacagaggtatgtgtaaaccaaaaatctggaattcaggtcttccacataacagcggaaaaacagatcttcagttgaatgctgcactgggaaaaacaatttgcccattagcaaagggagaaaacaaggaagctggattgtccctgagaatctgaaactttacaccaggcttcatttggatttgagatgaatatttacaccacctgccttggataggaaccatcacagactttcaaggcatagaaacaaacattaaaaatagtaccaggttgttaattacttctgaggtgcctggcacaggcagaaacaaagcaactatggaaggatggaatctctatcaaaaatcctcagagaaagctctattagcaatttaaaatgacaaatatgggaggagacagctcactgttagtaaatgtgggcatcacaaggcacagaaggattcaatgcccccacagtcccacccctgaacttcagagaggaaggtgaatagaaagacatgaaggtagaataatctcggggcttaaaggaaggaaagcatgctgcaattgctctctgtactgaagcagagataaatattatgtaagctcctgtatttgtggatcatgcagaaatattctatcttcaaacaaatttggaaaattctggtttccacagagccgaacaggtggttctactccagaacttctcaaaatcttcagggtgttaatgttcagcttgctgtcagaatgttgtacaaatgtttctcaaatgtgcttgaccatggaaccctgagacagcacaagtaacattggtcaggacagtgtttgggaaccccctgtttaactatttgtgtctattttgtataatccttccaagaaccgaaaagcattggaaggaaagataaaacttttctgtcccttacatgtccctccctcatttgacctgaagatttttttttcctttttcttagaaattactgaggaaactatttaattgaggtttttgccatggaaggtacttttacaccaacctaatacttttcttcatatagacatcatctctgaagtgttttggaattgttattcttcatttcattattagttgttttcagaattttcctttttatttaaaaataattgatccatgtttttactgtaaaccattttaatctttaaaaaaaataggcagtgtatgaattttaaattatccatgttgtattatttcattttccaatttaggaagtagacattccgcacaatttatgacagaattgttaaacattaggctatttgccagcggtttaatccagtgtaaaaatacattattggtgagattctttcattagcttcaaatgtcgtcgtttcaataagaaaatatttcttcttattacaaaaaaccaaaactttcactggatttaaatttctgcttgtggaggttgaaaaaagggaaacggagctatagactgtttgccagcagtttaatccagtgaaaaatacattattggtgagattattagcttcaaatattgttggttcgataagaaaatgtttgttcttattacaaaacacaaaactttcactggatctaaattccgtagtggaggttgaaagaagggaaacgaagcaagtaacaaaaagaagttgtggagtttattttcttggaactttccacgattgtctatctaaaataatgatctacttaatttgttgtaaattacctggagaaaggtcctaattttttaaaaatgttaataacgctccctgctggtttgcttcagaagggagcaaactacatcttcactgaaatttgtttaaggaagacaacaaaggaaaatagaaggaatttgttaaaatcactttttaaaatacttggtgcattttgatatagtatagcggaggcatcagcagaaggctgtttcattaggagagctctccagaaatttcataggaactcactcaggttagcgcaacagcggagcccaaaggtagttttctagtgccctctggtggttaaagcttattattactctgactgagattctgcgttgctggaatgggaaatattagaatagtggaaattcctttctttttttttttttctgctcagcggttgaaattaaaaattgtaaatttattttacagttatatttgacatgttgttatttgaacagtgtatataaatccaaaatgtctgataagttaccaggttgagccacttaaagtagctgccattctatttggacccataaaaatggcaattttataatacagtgcgttatctaaaaacaggtcacatatacttatttatcagttgaattttgtaaaaaacagaaccatttttttaagactagtttcttgtctttcatagctttcctggatttcccgaatactttcaagggggaatattatagtaagtttttgctatcaggagattttccagacagaaagcatggtataatccactctcaagaagaactgaaaaaatttggcctaaaagggcgggataactaatggtcacatttttaaagaatttcttggatgaagaaaaaggaagctgaaataaaacaaaaacactggggttagttataagtcaaattaaattagaaataaaagattagaaataagcatgactgtctaagaaccccagctgaaggcttgactaatcatatctaaacccacgtgtcttaccatcctcttcaaatgcagcttcactcctagaaggggtttgaaatggcttttccccagcttctcctctttcttgatgttttctcagccttgtactctggctaccttatctggcttagcttcttccctttggataccatccttcatgccctggaatgttatctgctattctctgatattttctgttattttaagttcctctttgaaatctttacaaaccccaattaaatcttatcacccccttgcttaactctgctcaataacttcccactgctttcagaagaaagaaggaagcaaggcaggaaagaaggaaggaaagaaataaaatccttactttgcttacaaggacctgtgtgatctggctccttccttcctcttcaccttcatctggtgccattcttccctccttcacaccctgacaacattcgtcttctttccagtgcttggatggagaacactcacctgtcttagggctttacgtgacctttaccctctgcctagcactcttctttagagcttggctgactgacacttagtgttttaggcctgagttacaaagtctccttctcagagaggatttctcagccactctaactgaggagtcatcaactgtggcctgttccctaaatgagagctattatattttgtatttacacttgacttgcttatttgtttataatctttcttctctacccaaattaagctccacaaggaaggaaccaagtctacttcattcatcaccctgtaatccaagtctgaaatactcccagatctacggatactcaatagatatctgttgagttaatcaatgaacatgaccacttggtagccttcctcaagtttacctatatttaattctcagccatgctttgtcccatctttgctcatacttggtgtttatttataatgtaattactcattctttccacacatttttgaaagagattttgtgttttgtttttatggagtaagattttaaattgccacttgaacttaccacaccactagctctcacaatgggagcccttaagtcaggaaagacattctccaagtaccatttgaaacttttgcacttcagtttctttcgcagctccctttgctgggtgaggttgccaacatctagcccttggtcgatgaggtggtctccgtggccatagaacagctccttatactcatccagccagacctcggcaacccgcaccaagttccgctccactgtcttcatccggtctttggggaaggaatatggattgtcatttctgaatatatggcccactcgggagcagggaatgatctcaatttcaccaccacacatccacacctggaagaatttgatgataagcatcaattatcaaatgattatccacaaatcatcggcacttaacaatgacaagaaaccaccttgtttccccctacctgaagtaatactcaacttcaaaaacacttttgcaatagaaaatcaaactcaacaggcttatttaattttgtgtattgctgtggatcattttaggattagtaaaatgtaattttttctttcctaactttcaatgtaagttttttttaatttgtaaataaatcttcacagaatcccattttgtaaaacatgagttcttgttttgattgaatcagggaaagaagtatagatgtccatttgttcacgttcctctactctcatttttgggaagaaccaaaaggcttgtggaacacaactcaaaaccatccttcatgatcagcagctccaaaattacacccttttacatacatacagaacacccacccaataggaaagcaattactttttggacactctctactactgctgttgccaaggctttctcagaagttaatcaatgattgtataatagattgtataaagtgcccaaaggagctgtactataaggcacacctgacctgttggtgacctgctttagaggtattttaatgtacttctgtcatttgtgttctctaagatgatccattacagattgagtctattccttccaacattctagacagatgttccaggagagttattttgtagcacgtatgactcccacagcatttactctgagtggcagaaagtcatttcccccatatttataagcagaaatggtgttgtgaaatattagggaatgctaataaattttatgacagcaattgattcttccaaattcaatctgagatatgaaaaaattaatccagagaccctaaaatttctgtgaaatttcctctcagtggcagtcacatacctgattatggtagtaaaatcaaaccatttaaaattgattaactcattatcgtaaagaaaagttgggaaacacctggtaataccttgaatgagagctccatattttccccaccccaaacatcaaggccagggtcgtatgttccaagttcaaaaaagtaacttttgtcaatagaaaacaatccaccagccatgacagggcacctacaaaaagaaaagtttgttttttaaacttgcatctcatgaaagctcgacttttagagttgttcctctgtacatctgtacgggaggtaggaggcttttcagaatagctacctgatgcagggaagccctgggatggagtcacaaatagggcttaagtgatgcgatccctggatcatggtggcagagctagattaggttcagcaaagatgcatcctggaactagtattatttgtcctttatactgtgacacaaactgtccaggaatgttatttttaacacttattcagggctaagggagtatcaggcactattgtaagtattatatatatattccagcccagacttcacaaaaaatcttgtgtgtgcaattattaagaatctgcaacactggatgtgagggcgatctggctgcaacatctgtcagcccattgattgccagggttgattcggctgatctagctggctaggcggctgtctccttcctccctcaccgctccatgtgcgtccctcccgaaagctgcgcgctctgtggaagaggacgaccatccctgatagaggagggccggtcttccggtcttctggtcttccggtcttccggtcttccgtcaagggtatatgagtagctgcgctctctactagaacctccaagcaagcgctcaggaattggcaacacggagaaggtaagaaactttcccaaggacagtagacaccttgggtttgctctgggcagtctgaggggacgctgtgccactcactccactgtactgcctctcagccgttactggaaggaaggccgtgagtgtgagttgtccaggttctgggtattttgaacaaagagttgaacaaaacacactaacaaaggaacgaaacacatgaacgaagcggcacaagcagggattcgttaaagcgggaaagcgctccacagggtgggagtgggccggagcaaacggttcaagggccgggttaccaagttttctgggtttcaagtactcctttcgaggtccctaccagctgccccttatctgaatggaggatttggttggctaatgaaaggctgcggtgaattggcgccctgtgcagatgaagggaaggtccctgcttggccagtccaaggcagagactctccctttccttctgagatgtggtggaaggggagggctgtagggagagtagccgttgatcctttgttactcgggtgtggggaaatggggttttccttctggtttagctttaggaagtgggtgttaatcggccttagatcccctgcccctagacccaggtgttttccttttgatccaggtttgggaagtcagcaggaattggccttagattccctgcccccagaccttggtgtttttccttgattcagctttaggaagtcggcatgaattggccttaagcttcttgcctccagaccctattctcctgcctcacaaccacacacaaactttactgacagcgtgttatatggcaagcacctttcaaagcactttatatgttatctgattcagttcttaaaacaatcgaagtagcagctacttttatgagtctttatgtaaaaataaaaaaacagaggctcaagatgataagtaaccttttcaagctcataccacttctcagtggtacagttgagattcaaactgtctccagaaccttcactaataatattgatcatggaggatagaaactacattttagtcagcagttagccaagactggaatcacttcctatggtggtcaccactcagccagctaaagtagtttctgtggagagcctgctttgtgcttagggtatacagtgatctcaagggggagataattcctgtcccacacctctctcccctccgccaccatttatgttcattttctttctgctctccaattttcctactagactatccagaacgcattctcgtcctaacattatgttgaatatagtctgaactcaaccactacattggccctcaacatgagagtatggaaagagcagaggttctttaggtgtaggttcagaataagagtgttaaatccaggtaattctgggtttgagtctcaaattcttctttgattagctgcgtattcctgggaaaattacttaatgcttttaagtctaaatttccccatctctttaaggtgaattcttccacctccctcctagagttaggaagagagttaggtgcctggcacagagtgctcaataaatggtagaaccttcacttctttgcttggtggaataattctgaaggcatcacacctggcaaggaaggcgggtatgactgattgaggggtaagtttggggaaaacacgcttcggtgcacggtctgggcttggctttctgttggggctggcttacttgtgtctgtttaagtggtcactwcaacagggaaagtttaagccccctgcagctcttcctgtggctggcttaatgcttgtgctgcaggcttatattctgaagaagtaataggaagcctccacttcagcttcaagtctaagctgtgttcttcaatgcagtttcttggaaataaaagcccaaacttgaattcatatccagcttctgaatcaatttttaaatttattcatagaatttggcacttttctcatggagggggtaggattaggctgtaaaagaaaatcctaaccattgctatcattagaatgatatttctattaccattatttacttttaatttgcacttatgtttactttaatattacatgtgtttgtatagtatgtatgcagcacattttgctagtttgtgtttcttaggttgcaaatcctaggggacaggatagcattagtgaatttttctgtgttcaggcctgagtagggtacaaatgaccagtgaagaatgagttttgggaacgaatttctcaagaacactgtgtttgctttggtaatctattggctagaactgtgattcttaatgttctatagaataacaagatacagctgttttgtagaattttttaatgcttttacaaaaagatacatgactgctttctagtcttaaatttcccacacttaccttattgtatcagtttctttaattctgttttttgcaatgacatctggaggaattgttctccaaccaaagttcatgggccacacaaagatgcctctttgaaagttatccactgtcatgtaactaatccaggaaatgaaaaacaaagtgttatctgggattatatacatctttatatactttatcgatttggcttcacgatgtaatcaaatgaatgaaacaagtgcttttgatgagtttagatcaccaccttttaataatagttcaagaatgtttacaagtacaatttgcattagtaactgattggcttatttgtgcttaacttatacttttataataacaatatgctagccagttttgaagaaaaaaaatacaagagcaacttaaaagcacatatacgcttcccacagaaataagaactaaatttgaggtaaataaatatttggggttcagctaaatataaaggggaaaaactaggtcatgagtattaggatttattggtatttagagttaagaatttgtagtgaccagatagattattgcatcagcagactctgatcccaagatatcgaccatgtttttccatttatttaagtagataaactgtatatgtcttggattttgaaaaaacacacatattaggcatatactcagcactttctgctgcttgtgattaaagatgtgcttgaaagtatcttgtggaatgtgtaaatattacctcatatccttatcattgatgacttcgattactggacaggccactttctttctacttaaataaactctttccagaagaggttccaaccaaccaacgttacattccacatgagaatctaaaaatgtcaacacatcacctagagggccaaacacacacaaaaaacttagaaaatacgatatattgaatgtgtgtacttcatgttcaaaggtattgatgattgctccagaaatgtggctataaatgcagtgaccttttttttttttctgaattcgtggtcactataatttcatttcatactgaaatgagagaaactttgctcctaggagtcctgtggtgcaaacataatttatgtttggaaaaaattgataagccatttagaatgggcaaaagaatctgaaaagaatacttggtattaaatgtagttgctgaagtcccctctgagagagtgtgcccattaactctgggggtgcaggatttgggactttgtttttaagaagcagacagactgagatgacaagtttggccttaggaatgatgaagaggaaaaattacttcacacaatagggatgaaagaaattaaagtggacaaaccagcgaggctaggaggtaatgaaaagagttataggagacaggagtggggaatgggaggttactgattaatgggtatggagttttatttttgcaaggtaaaaagagttgtggagattgcacaccaatgtgaacgtatgtaacactatgggcctgcacacttaaaaatggttaagatggtacatttttatattctatgtattttatacaatttttaaaaagacttagaggaggaaaaaaaaaaaggaaaagaaacttggaggccagaaatagtattaagaactcttttatttccctgttagttgtgtgaagtaacactctctctctctctctccattgaaacctcagtagcatctacattgctccagaggatcttatacaagtgaagtgtgtgtgtgtgtgtgtgtgtgtgtgtgtgtgtgggtgatgtgatgtgtgtgtgagagagtgtaacaacccaggaaataagctcctggtccacatcctatgtgtgatctttcaggcccaaccacaggtaatacaaaggctctacctactggggctcatgggggaaacctgctttctcactcagacttggtgcccagccagtgtgttgaagtctctaaagggagttgcggtccaggtctcagaccctccactcggctgcagcacttgctcttctgcctgtctgcattcctaactcaggtgcctccattcaggccaaaacctctgccaggaccactttattggagatggaatgggtcttgaagacactttgctcgactctgactcactattcagtgctttcccactcctagcctttcgctttcttactctggatcccagggccacataacagaaggagccttttgtgctgggttccttgggcaggcagtgagatgcccctcttgtctgctctgttctgctctgatccatcactcagcaacattccagggggaaaaatggaacataggaggagccagtgccttctcctgttcagcctcctgttgatactgttgcagtaagggattaaggcttgactactgctttcattttggtttatcattttaattgactactttgatacctgggtgctcagctcagctcttgacatacctgtaagagcaaccatcatctaagtgcttgttctatgccagtctctgttctaaacattcttcatgcatgttttatgtagtctttacaacaaccctgcagtatagaactaatttttattcccacttaagagacaaggaaactaaagaacaaagaccctaggtaacttttctatggttgcrcagctaacaaacagcaatgtgatattagaaaataagtagctcattccatagattacattctttaaaaaatgctagaaggaggcagagctttgrgtatgagaaggcttagagaacaagatgaggatagttatctagatgacagatcattatcactgaaatctgcaaactacctctcaattaatagaatttagcatcgtattaattacttggttaacaatggcatttttgcatgagggcaaggtattggtgtggagtgttcttgaggattctgtttagtgaaaccatctgtgagaagcaaacccgctccatgtagtcttctgttcttggagatagcagtttcatctcctgaccaggctggaagggtcctattttcagggcattaatgcttgtttgacaaygacagggtattgtcccctgcatggtctgaaygtacgtgtcaatccaaaattcatattttgaaacctaacyctaagatgacagtattaggaggtggggcctttgtgataagatcatgagggtggagtcttcttaagtaggattagtgctcatatgaaagaggctggagagtgtttgtgagctccttttgcccttccaccatgtaaggtcacagtaacaaggtgccgcctttgaagcagacagtgagctgtcactagacaccgaatctgctagtgccttgatcttggacttcccagcctccaaaactgtgatcaataaatatatgctatttataaatgatctagtctaaggcattttgttatagcagcccaaaaggactaagccatctcctaagggtgtcctttggggatggcacctttgggacagctgtctcccctgtcatgggaagactcacagagtcatgtaggtgtatgaagcgtggcctgctaaagtccacttggctagtggtatacaatgtagtagaaaaagattcctggccgggtgtggtggctcacgcctataatctcagcactttgggaggctgaggtggtaggatcatgaggctgagagatcaaggccatcctggccaacatggtgaaaccccatctctactaaaaatacaaaactcaaccgggcgtgtgtgtgtgcctgtagccccagctattcaggaggcctaggcaggagaatcacttgaacccaggaggcggaggttgcagtgagcagagatcacggcactgcactccagcctggtgacacagcaagactgtgtctcaaaaaaaaaaaataataatacgatttctacttgtggtccattcagacctagagtttaaagagcattctttactacgccacctgtccctatccccatagcagccttatgaagtcaaaggggcctggattatctttctcagtccccagtggcagcaggatgggtccccaaacctgcattcacttcccacctggcccagatccctatgaaaattctcattcatttgctgccaggacctaagggaagcagcatctgctcaaaacatagtctggaattttatattgttttattttggggaagaggagaatcctcctgtgcatgcatgctattgctctactttcagacactttgttttaaaataagatcctaggactatgttaggtgagaaaacagggagctctctgcgtagctgactcttggtgggatttctgattggcgtggttattgtctatggacattgtacgcactgttcctgattcagagaggggagaggcacagtgaaataagcatagcattaaagttacatacaacagccttcaatccgagctctgcttttcctagccaggttagataagttacttaacttttttgagctttgccctatgaagatatttctaagagctacctgatatctaaattctttaaaaattgctagtataatttactgtcagaataatcaacccaatcacttaaaatttttaaatgacacataataattgtatatatttatggggtacatagtgatatttgatacataaagtgtgtagtgatcaaatcagggtaattagcatatcaatcacctcaaacatttatcatttatctgtattgggaacattcaaaatcctctctgatagctacttgaaaatatataataaactattgttaactatagtgaccctatagtgctacagagcactagatttggaaagggtaggagagaggggatatagggagaggcgggttaaagaatataaaattttagtccaaccttgattgctacctgttaggattttctgttttctaaggataggtcccaataatactggattgtttacagatgggtttcatttgtaacttaaaaatctggggggggggtgggtggtaacataaaactgttcaatgtgccaaaaattttgggtccttgttgagcatggacccccacttatatccagtgtaccagcctggaatattgctgctgtaccagttaatgctagatggttatgtctaggattccttgagggatgttggcttggcgtgccgtttaattttacataatgcctcctaagtaatgctaaggaaaaaatttttacctgcagcagatacaagttataaaagtttgcagacagatgtctactgttgctttttaggagaccttggagtttgctaggagttagatgtcacttgtccagttacttaaagttagccaagtgattatttagaatgctcatagaaatgtcaggaattttgccaaatgccatgtcatgaaggaaatgaaaacctaatatttactttgactctctactgcctgactgtaactcctcttggcagggcagtaaatcacttggtctgttccatactaggaagggatatgggtgatctacttcttccctgatatctcatttactctatctttttaattctgttggcttcatatagtgrgcaattcttagagatccattgccccggcctacctgtcaattttaaaatcctacttgggcctctcaacctcctcattcacagcaagcaactgattggacctaatctttttgcctgaattagattcagatgaagaactaacatgccctggaaactgaatgcatagtagacattgctaatggtaaggccgatcactgcttggccccttattattttgtagatgattgcagactttcagagagcctcttgcagaacttcagagagcctcmtaataccctgggaccaaaataggccatctgacttctatttctgcatgtctttggatctctggatctcacccttgcctgttacttcccttttctttgagtcctaaagggcaaattttagggaacagtagcatcaagscctgtcagattctggactcagattcttatctttaaactccttgtttggcgaggcatcctagagaaaatttttgtctgctgtctttgctgatctctaatttacaggaactcttcaggaggcccttagtctcttacttatctctactcttgagagctgtggcacacccaggggagtttgagaggacccaccacgcctgccatctctgctcaatgccagtctctgaattacattctctgctaaaactgatcctgcattgccttgaattccccacaggggacaggtgtacttcccagcattggatgtatccttgggcaaggatacatcgagacaaacctttcttctttccaaactctcaggcacccaagctccactaatgctgctccaagtgtaggccacagaccctgctgtctacagggtgatagcaatagaaattgagaacaaatattttgaaactttatagcaatttgtcaaatttataaatttattatttatgtactgtttttatatacatgtagatacatatgcatatatatgtatatatgtgtttgtgtatgtgtatatatatatatatatacattttttttttttgagacagaattttgctcttgttgcccaggctggagtgcagtggtgtgatcttggctcactgcaacctccgcctcccgggttcaagagattctctgcctcagcctcctgagtagctgggattacaggcacctgccaccactcccagctaatttttttgtatttttagtagagacagggttttgccatgttgggcaggctggtctcgaactcctgacttcaggtgatctgcctgccttggcctcccaaagtgttgggattacaggagtgagccaccacccagccatatatattttgtatgtaataaaaatgggtttgtgttttatatatctactttcctttttgggtaattaatattgattataatttacaaaggggtaggtcaataaaaaattggaaattaggggaaaaaaattccttttcagatagtttgggaagcatcactctactaggcagtggcaagcaattaagatacacctagctggggtttttcaaactgagagctgtagattcccttagtgaatcaatcactaaatcaatttattgagattggctaggatctaaaacataaataacatagaaaagaaggtattagaatctattccacatgttatttgataaaatgtctactgtagttatatgtgtgattacacatgtactgagttgtgatgaaacatttatttctacacaagccattgtcaaaatggtttgacagttactgagctaatattctcaaggctgttaatgaatctgaatttacattcagatttgctaaattcaaataaattacattatggatgttaactgcaagcacttgagcaagcagttgcaactgctttaatcaagctcataacaccccttctaagacactccacccatgttgtctaatagtttggactgtgttggaggccgttactagcatactctgtgctccgtgcaggcagagagaaaatttttaaataagtaacccatatttggttctgtattctactttctgtgcatgaatatctcattttcatctcaaatttatatggacaaaatcaaaactcaactgcaattccaaacctgctcctccagttttgagcctaccacccaccaagttgttcagataccagtcctagggtttgtttctgattggtgtcattcttaytctcttcacatcttatctgacggcaagtcctatacgttccatgtgcacaatctatgatgaagctgaccatttctcccatttaccctggcacctccctggtacttggacaactatagtagcctcctaactggcctccctacttcctttttcatcttcctaatatccattctctacacagtggccagaatgagctttsaaaatgtacatcagacagtttcgttcctatttaatattcttcattggcttcaccttatactgagaataatgcctacaatctttaagtgatgcacaaaactttagaaaaatttgcttttttctttctccccaaatgaatcttttatgactctccccatggtcagcacccatgagtcaaaatgaacttatttctttaccttgaatatgccaagctcatttcttcattaggacatttgtacttcttgttccatttgcttgggaatattcttcacccagacctcagctcaaaaattacctatttaaactagttcttgagtatcctatttttacatcatttatagataattactttccaaaggaaattaagcatggaatgccattaaatttttctgaatgcagtctctcatcaagaatcttaactgtcactgcaatgccaattttggtgtgatgtatttgttgctyacttaaaatttcctctacaaagagaagacatttgttagcaaaccaatgaaatgagaagagcttcaaatatggggtccagttatgagaaaattaaactcaggtaagcagaaaacttcccatcagaacatgcttgaatttaagctggtggagacctgtaaaagcagggcttacagggccagagtggtggctaaatgtctagaggcctcaaggtgtagttgataagaggacggactctggggtcagggcattcaggtgccagctttggatttaccactggctagatgggggagcttgcataaggcacagcctcactgtgcctctatattctcatatgtagaatgaggatgtgattgtactcatctcatagagttattgtgaggattcaatcagttaatacacaaagtattcagaatggcacctagcatataaatcagctagtattacagggcacagatccttccatagaaatgtatgaacatgaacccaaatgtttgatgttgtttttagaatactcataaaatagattcacttctcattcactcaccaacacctgcacactaaaaaggggagaggaaaagaaggcatatggcctttggggaaggcagaaagaaccataggaagaatagacatgggtcagagaagagaggggtgaggattatagaattaaaacattacgaaatcttgaaatattgatgggtcaggtcaaaagggcacaggcttgaagaagctcctagtggtcaaatttgggacaatttgaacaccaacaagaataatggtgatataatacacatttaatttctgagccataaatccatatcgatgaggggatgagagggaggggagagggagattgaggggaaagggaggaagagttagaaagcaggagagggagagatagagattttctccttacacatgaatgccagctaaataaaaaagaatgaattatagaaaagcaaattktcagtcctcagtgtaataattgatttaagcaaggatgatcaatggatactaaaaaccattgggtaaaacattgtaagaaaaacagaatattttcatggatcaatgtgtcattccacaaattacttyttaatcccaaagtaaaggtttagctgtcaacatcttaactaacaaagttagtatcaacaatactggtgatattatgttatattatatgcctcttgatgagatgtataccatttctatcacctatgtagtagcattctatataatattttcactccaaaaacatttatcctgcaggtaacaagaggaaatcaaaaatttcagaacatggtcactggtaccaaacaaatggcatgaacttaaaatacacacacacacacacacacacacacacacacacacacacacactggtatttaaacaaagtgtgtgaggagttgacttttcagactaagaagaccaaagtatcaaatgcagagtatgaaacttaattagttcccgaatttaaaaaaacattttgaggcctgtaatcccagcactttgggaggccgaggcgggcggatcacgagttcaggagtcgagaccatcctggctaacacagtgaaaccccgtctctattaaaaatacaaaaaattagccgggcatggtggtgggtgcctgtaatcccagctacttgggaggctgaggcaggagaacggtgtgaacgagggaggcggaggttgtggtgagctgagatggcaccagtgcactccagcctgggtgacagagcgagactctgtctcaaaaaaacaaaaacaaaaacaaaaacattttgggaacaatgagaaaacttgaaaagagcatatagtaggtattatatttagttatgaaagctgtgcttatttaagagaatgcttctgttcttcagagctgcccactgaagtacttaggggtgcagtatgatgatgtctgtaacttctttttcaaaggttcaggaaaaaagtatatacaataggtgtctatgtgtgtttatgataaagcacatattataaaaactgtttaaaattgatggaactaagtgatgcatatataggcatcattgtgctggtctttcacatttgctgtatgtttgagaaacattttaaattaaaataaaaatgtaacaaacaaaaaaatgagtaacttcttacctgttgcattctgtgctcctgccagcctggcccttattaagccatgtctctctttgaggcgaagaatccgaacttttggaaactgggacatgtatttatccaaattatcttttagatagtctacatcagagtaaagataaaccaggaaatacttgaattaagtaagtccggatagtatcagaagtgctccccaaagtcaaatgccaaaaactatgacattaccatcatcactgaattttattccttgggtcataattttattttctgatgtcattttcttggaaggattctatctggtttcagtattcaaagctgtctgatttttcaaaccccaaatgtttgttttcagtgttgtaaggtgatgtagtggagggcacacctttctgagtatttgtcaaggtgggggcagatttgccttaaaatatatgtagctcaggcttctgcacaattctgcctctactctcagccccacctcttgcaaaagccccttccatgacccaaggaagaggctaaacaatgtgtgcaaataagaccctttcattctctactctgacatccccttccattacaccttttctctcttattagatggccatggagggatccagctaaaggaacagttttccgggggctttatgagctatgtttatgtgacttacagtcatttctgtgtgtaatcaagctattgacagctatcctaggttggaatggcttccagaaaactttctaagaaagtttttcttagacaggaccctgaaaactgaataagcttcaggtcccacagaatctggacctgcccctcataaagggactcctatctacttactaattgggtactattcctgtttatgcttccaaggccacattttatgtttttcagccagtttttctctrtcatcccacagcttcttgagctcagtgtgattatggcagaaactctgaagctaaagaaacttcccatgttgctgtggtcacagctcaagggtaagctgttccattagcattgccaagtctttgctattttctaaacttttctgaaaaatgggttccatttgggaatttgtaatgtggctgtcagaccacctacatacacaggttatttgacaacccaaagagtgagattcttcactgtaataagcaaaaatgaacataaaggctatggtggattctggttttgaactttgttggaatcacctcatctctcttgtcctattggcaatttgtcttcttaacacttaactgaacacatcatatgccttgctctcaaggaagaagccataagatcttaatttctttgccttccatagagtctaactgtaactctagttattaccagtaggcaaggcctcccgttaattgtgattcmattaaaagggatttgtgcaattgtagaggacatctaaactccactacttctaagtgcccatctccaaggagccatagttagatcattccaacatsgtagcagagttacaactgagacaactaactgaacagagctccagatgacttttaacgtccatagatgcttagacttatgtctctgaggctccamgtaaaacaaagcrtttgtacratgtttatgcttcatcaaattatcctataattttgccatccaaactgctactaaactttgcttctgccaaactttgaaatttcaagagatagcctgagtggttttcttacctttggtgctgaagtcatctaccagcagaatctccttgatgaggtgtggaggagagcgattgatgacactgtgaacagatctcaggagagtggaccacacttcatccacaaagcacatgatgacactggtggttgggaggttattgtgaactagstgctctgcacatctgggccagaatataagcagagcacaagagatgtgctaaggagatccacaagatagttttaaaagtcacagagtgcratggtgtgcatatacacacacacttaatctgtcatcgatctgtctggtctatctatcatctatttatatataccaatgatgattttattatttatcatgtgcctttttttggggaggggtacatgcaaaataaaaaagcagaagaattacccgtaaccgtggttgttataaaaggactagaaatgcaagacatgagaatgtcccatgcagacatcacactgcagtggaaaggacagggtttacaggtagttagactctatttcaaatctcatggccaatatttctcaggtctttaaccattaatgccttctttaacttctctgtgcctcagtttcctcatctgcagaatgagrtaataaatggttcttattcaatagagttttgtagcctagtgataatgtacatacaaagcctagcagggttcctggcacaggaatttatgaaatggtagttattgctatcattactagattatatgctagaagatagcattctgacttatttaatgttcccaagtggtttatgattgcctttccaactggctgtctgccaactgccatgggatttattcttttctcccattctgcttgtgtatgtacttatggcataatatatatgtgccaaataattaaactctttttagcttccgtatccggggcttccttgctgatactctgctacagaatagccacagttgaaaaaccattttgctggcataggaatgcaatccaggctacagtgggagttagtattcaggtgggttgcaactggcctgggttttttcccatgccctgcagaatacactgcctcactgctggcattctttcaccccctgcctgtgccactcttcataagcagtgcccagtggaacctcacaaaatgtatttgccatcttactaacacagctactgtcagtaatgtgataattaatgatgatcataaatattataagcattctatattatttcaatgtcgacctcaaattaccagcatctctttccctttttattggtgaataatcaaaatcatggaaagactagtccatgattctgcagttagtaaatggcagagctgggactcgaacactgatccagtctggctccaaaagtaaccattgaggaagccttagatccacaagaatagaagcagctggcagtagatgcgacattttgtgagagctggcacttctgccaaataacatggttatactttacttattccataaataagaaataggtaagagcaaaaacgatagtaaagcaaatcacatttgcatgacactctagtgttgccaaagtgctattctgtacataattgaattcagtcttcataacaactgcttgagatacatattattatacacttcttcaaatcttgggaagttaaatgacttacccacatcatccacctagataggatatataaggaaatatgaacaaataatgtttttactttactgctggttttttttgtagaatgggctttggaaatagatatgtgctcaaatatcagtttttctaattactgatttggaacagctttactacttctttgaacctcaatttgccaactacaaagctgaaattaaacatgtacctataagattacatataaacattatgtaaaactcatctaatatatatctgacacatagggggtacttaagaaatggtagacaaatccagctgtgcttcataatttcaatggtttcctagatggttgtttatcataataattgacaaagccttagaaaaacataaatatccaatcctcagccccagaaaatcaatttacaaggtttgctgagggcccaagaatccatgtcttaaaatacaaacaaataaaagaaaacacaaagaaaccaacccaccaacaaacaaaagaatgactcacaaatcattgattggtgagtttaagaacttgagctcaagataaagttaatttattcttattatttgaggctaatattaaaaaaaataaattgacagctgataggagcatgtcctaaatgttcaagtgacagagaattaaaataacacattttgattcactatcttcatgtagtgatcaggtatctaatgctaacttaaaatatcagactgtctaaactaatattagtctacactaaggatccatgcattagcacttctgaataatatgagaagatattcctctcttcacttaagagctttatcagtttactttggccaccataacaaattactgaaaattctgcttaacagttccttcctgaatgtatctattttctctcacatttgtactctgaacagaaagaagatatcagtatgcaccttcaacattttgcttggtactctcctcagctaaatatccgatttcatcattggcaagttctgctaattttcacatgactataggacacagttaagccaagctcactgccactatgtaacacggatcattttcttccatttctcaatcatgtgctctatatttccttctaagcctgcaccagaagtacttacaatgctcatatttttgccaacattctgctcaagatagcatacatattttcaaagatgattgatagaagctttctttctttctttctttttttctgaaatagagtcttgctctgtcacccaggcgggaatgccatggcgcaatttgataggagctttctctactgtgccgctcacttccttctgagccctcaccaacagcatccttgatattcatattgctaccaacagtgacttcagggcattctaggctttttctatgatgcttcacagaattcttccggcctctacctattagcgaattccttggtgtattaggccatttttgtgttgctacaaagaaatccacctggctgggcacctgtaatcccagcactctgggaggccggggtgggtggatcacttgaggtcaggagttcaagaccagcctggccaacatggtgaaatccagtctgtactgaaaatacaaaaattagctgggcatcgttgcgggtgcctgtaatcccagctacttgggaggctgaggcagggagaatcgcttgaaccctggaggtggaggttgtagtgtgcagtgagctgagatcgcactgctgtactccagcctgggtgacagagtgagacttcatctaaaagaaagaaagaaagaaagaaatacctgagactagctaatttgtaaagaaaagaggtttaattggctcacggttctgcaggctgtacaggaagcatggctctgccatctgctcagctcttggtgaggcctcagggagcttttacccatggcagaagacraagtgggagcaggcatgttacatgacagagcaagcaagagacagtaaggtgaggtctctgacacttttaaccaaccaaatcttatatgaactgagggagaacacacatatcaccaaggggatggcactaagtcatccattatagatctgcctccgtgatccagtacctcccaccaagtctcacctccaacattggaggtcacatttcaacatgagatttgaaggggacaaacatccaaaccatatcacttggctattccttggatgatacttctgtatttttgggtacttgttatagcagcacctcactccttgataccaaaatttatattagtttcttctgactgccatgacaaattaccacaaacttggtaacatattctgtcacatttctggggtccagaattctaaaaccaagatgtcartaggacctcagtccctccatatgttgtaggggacattctgttccttgcctctttcagcttctgctggcagtctttgacttgttgaatcactcaaatctctctctctgtcttcacatcactttctcctctgtgtctctctgggtgaaacctctgcctggctctcttttataaggatacatgtgatttagggcatttggggcttatctgggtaattcagggtaaatgtctcctctcaagatccttcatcacatctcttgcttcagaaggtaatattcactgtttttccaggtgaggtaataatcacaggttctgagaattaggaagtaaatatatttttggagaaccatgtcttttagcctgacacaagggcttaatgagttaaggcaagaaataggctgggtgaggtagctcatgcctgtaatgccagtgctttgggaggccaaggtgggtggatcatctgaggtcaggagttcgagaccagcctgacgaacatggagaaaccccatctctactaaaaaatacaaaaaattgaggtctgttccaagatggccaaataggaacagctccgatctgcagctcccagcgtgattgacacagaagacgggttatttctgcatttccaactgaggtacctggttcatctcattgagagtggttggacagtgggtgcagcccacagagggtgagccaaagcaggttggggcatcacctcacccaggaagcgcaaaaggtctggggatttccctttcttagccaagggaagctgtgacagattgcacctgaaaaaatgggacacttctgcccaaatactgtgcttttcccacagtctcagcaactggcagacccagagattctttcctgtgcctggcttggcaggtcccacacccatggaaccttgctcactgctagcacagcagtctgagatcaaactgggaggcggcagcctggctcggggagggacgtccaccattgctgaggcttgagtaggtaaacaaagcagctcaaactgggtggagcccaccgcagctcagcaaggcctactgcctctgtagactccacctctgtgagtagggcatagctgaacaaaaggcagcagacaacttctgcagatttaaatgtccctgtctgaccgctctgaaaagagcagtggttctcccagcacggcgtttgagctctgagaatggacagactgcctcctcaagtgggtccctgacccctgtgtagcctaactgggagacacctcccagtaggggctgacagacacctcatataggcgggtgcccctctgggacgaagcttcaggcagaggaaggatcaggcagcaatatttgctgttctgcagcctccactggtgatacccaggtaaacagggtctggagtggacctccagcaaactccaacagatctgcagctgagggtcctgactgttagaaggaaaactaacaaacagaaaggaatagcatcaacatcaacaaaaaggacatctacatcaaaaccccatctgtaggtcaccagcatcaaagaccaaaggtagataaaaccacaaagatggggagaaaccagggcagaaaagctgaaaatcctaaaaaccagagcacctcttctcctccaaaggattgcagctcctagccagcgatggaacaaagctggatggagaatgactttgacaaattgatagaagtaggcttcagaaggtcggtaataacaaacttctctgagctaaaggagcatgtttaaacccatcaaaaggaagctaaaaaccttgaaaaaacactagacgaatggctaactagaataaacagtgtagagaagacctgaaatgrcctgatggagctgaaaaccatggcaagagaacttcgtgatgcatgcacaagcttcaatagccgatttaatcaagtggaagaaagggtatcagtgattgaagatcaaattaatgaaatggggtgagaagacaagtttagaggaaaaagaggaaaaagaaatgaacaaagcctccaagaaatatgggactatgtgaaaagaccaaatctatgtttgattagtgtacctgaaagtgatggggagaatggaaccaagttggaaaacacacttcaggatattatccaggagaatgtccccaacctagccaacattcaaattcaggaaatacagagaacaccacaragatactccakgagaagagcaactccaagacacataattttcagattcaccaaagttgaaatgaagggaaaaatgttaaggacagccagatagaaaggttggcttacccacaaagggaagccgatcagactaatggtggatctctcggcagaaactctacaagccagacgagagtgagggccaaaattcaacattcttaaagaaaagaactttcaacccagaatttcatatccagccaaactaagcttcatgagtgaaggaaaaataaaatcctttatagacaagcaaatgctgagagattttgtcaccaccaggcctgccttacaagagctcctgaaggaagcactaaacatggaaagaaacaactggtaccagccactgcaaaaacagaccaaattgtaaagaccatcgatgctatgaagaaactgcatcaattaatgggcaaactaaccagctaacatcataatgaaaggatcaaattcaaacataacaatatcaatcttaaatgtaaatgggctaaatgccctaattaaaagacacagtctggcaaattggataaacagtcaagacgcatcagtgtgctgtattcaggagacccatctcatgtgcagagacacacataggctcaaaataaagggatggaggaggatctaccaggcaaatggaaagcaaaaaaagaacaggggttgcaatcttagtctctgataaaacagacttcaaaccaacaaagatcaaaagagacaaagaaggccattacataatggtaaagggatcagttgaacaagaagagctaactatcctaaatatatatgcacccaatacaggagcacccagattcataaagcaaatccttagagatctacaaagagacttagactcccacacaataataatgggagactttaatgccccactgtcaatattagacagatcaatgagacagaaggttaacagggatatccaggacttgaactcagctctgcaccaagcagacctaatagacatctacagaactctccaccccaaatcaacaatatatattcttcttagcaccacatcgcacttattctaaaattgatcacataattggaagtaaagcattcctcagcaaatgtaaaataacagaaatcacaacaaactgtctctcagaacacagtgcaatcaaattagaactcaggattaagaaatttactcaaaactgcacaactacatggagactgaacaacctgctcctgaatgaccactgagtaaataacgaaatgaaggcagaaataaagatgttctttgaaaccaacgagaacaaagacacaacataccagaatctctgggacacatttaaagcagtgtgtagagggaaatttatagcactaaatgcccacaaaagaaagcaggaaagatctaaaattgacaccctaacatcacaaattaaaagaactagasaagcaagagcttacacattcaaaagctagcagaaggcaagaaataactaagatcagagcagaactgaaggagatagagacacaaaaaacccttcaaaaaatcartgaatccaggagctagttttttgaaaagatcaacaaaattgatagaccgctaacaagactaataagaaaagagagaagaatcaaatagatgcaataaaaaatgataaaggggatatcatcactgatcccacagaaatacaaactaccatcagagaatactataaacacctctatgcaaataaactagaaaatctagaagaaatggataaattcctggacacatataccctcccaagactaaaccaggaagaagttaaatccctgaatagaccaataacaggctctgaaattgaggcaataattaataacctaccagtcaaaaaaagtccaggaccagatggattcacagccgaattctaccagaggtacaaagagaagctggtaccattccttctgaaactattccaatcaatacaaaaagcaggaatcctccctaactcattttatgaggccagcatcatcctgataccaaaacctggcagaaacacaacaacaaaaaaagagaattttagaccaatatccctgatgaacatcaatgtgaaaatcctcaataaaatactggcaaattgaatccagaggcacatcaaaaagcttatccaccatgatcaagttggtttcatccctgggatgaaaggctagttcaacatacacaaatcaataaatgtaatccgtcacataaacagaaccaatgacaaaaaccacatgattatctgaatagatgcagaaaaggcctttgacaaaattcaacagcccttcatgctaaaaactctcaataaactaggctttgatggaacatatctcaaaataataagagctatttatgacaaacccacagcttaatatcatactgaatgggcaaaaactggaatcattccctttgaaaactggcacaagacaagttgcccctctcaccactcctattcaacatagtgttgaaatggccagggcaatctggcaagagaaagaaataaagggtattcaattaggaaaagaagaagtcaaattgtccctgtttgcagatgacatgattgtatatttaaaaaactccattgtttcagcccaaaatctccttaagctgaccagcaaattcagcaaagtctcaggatacaaaatcaatgtgcagaaatcacaagcattcctatacacgaatagcagacaaacagaaagccaaatcattagtgaactccgattcacaattgccacaatgagaataaaatacctaggaatccaacttacaagggatgtggaggacctcttcaaggagaaatacaaaccactgctcaatgaaataggacacaaacaaatcgaagaatattccatgctcatggataggaagaatcaatatagtgaaaatggccatactgcccatagtaatttatagattcagtgccatccctatcaagctaccaatgactttcttcacagaattggaaaaaactcctttaaagttcatatggaaccaaaaaaagagcctgcattgccaagacaatcccaagcgaaaagaacaaagctggcggcatcacgctacctgacttcaaactatactacaaggccgcagtaaccaaaacagcatggtactggtaccaaaacagatatatggacgaatggaacagaacagaggcctcagaaataacaccacacatctacaaccatctgatcttcgacaaacctgacaaaaacaagaaatggagaaaggaccctatttaataaatggtgctgggaaaactggctagccatatgtagaaagctgaaactggatcccttccttacactttatacaaaaattaattcaagatggattaaagacttaaacgttagacctaaaaccgtaaaaaccctagaagtaaatctaggcaataccattcaggacataggcatgggcaaggacttaatgactaaaacaccaaaagcaatggcaacaaaagccaaaacagacaaatgggatctaattaaactaaagagcttctgcatggcaaaagaaactaccatcagagtgaacaggcagcctacagaatgggagaaaatttttgcaatctacccatctgacaaagggctaatatccagaatctacaaagaactcaaacaaatgtacaagaaaaaaaacaaacaaccccatcaaaaagtgggcaaagaatatcaacagacgcttctcaaaagaagacatttatgcagccaacagacacatgaagaaatactcatcatcactggtcatcagagaaatgcaaatcaaaaccacaagagataccatctcacaccagttagaatggtgatcattaaaaagtcaggaaacaacagatgctggagaggatgtggagaaataggaaggcttttacactgttggtgggactgtaaactagttcaaccattgtggaagacagtctggcgattcctcagggatctagaactagaaataccattcccatagaaataccagtgatcccattactgggtatatacccaaaggattataaatcctgctactataaagacacatgtacacgtttgtttattgcggcactattaatgattgtaaagacttggaaccaacctaaatgtccatcaatgatagaatggattaagaaaacatggcacatatacaccatggaatactatgcagccctaaatgatgagttcatgtcctttgtaggtacatggatgaagctgaaaaccatcattctcagcaaactatcacaaggacagaaaaccaaacaccacatgttttcactcataggtgggaattgaacaatgagaacacttggacacaaggtggggaacatcacacactggggccttttagggggtggggggctggaggagggatagcattaggagaaatacctaatgtaaatgacgagttgatgggtgcagcaaaccaacatggcacatgtatacctatgtatcaaacctgcacattgggcaggtttaaagtatattattaacatttattaaagtataataaaaaaaatacaaaaaattaccctggcatggtggcgggtacttgtaatcccagctacctggaaggctgaggtaggagaattgcttgaaccccagaggcggaggttgcggtgagctgagattgtgccattgcactccagcctgggcaacaagagcaaaaatctgtctcaaaaaaaaaaaaaaaaaaaaaaaaaaaagcaagaaatatgctgttttcaaataaaaaatttaaaatggcttccctatccctcaacaaaatgtaggtttattttgaatttacagaattgttagtcatgctgtttttttttccctaaatttgaagcttcttttaagtttgaggaatttgcacattgaagtccacgaaagtgttaattggtgataccaaattatgaactatcatattgaaactctattttagaaaataaagataattagaaaaaaagaagaaagaatataaattgagggatttccaagaagtactaaaaaattggtctatttggttgcataattaccaacaattccaacaattagaggacaattttggaactggacaaactttagactctgaaatgtttttcataaggcaaaaaagggaacatctccaaaataagattctaattctcagaatctcttgtgatgaccattaaagaccagagtgatgagactaaagtttcccaacgagagaattggtggggctagagcacaatgaactgcaaagtaaaaggtaaatgaacaatgagacaccatctcataccagttagaatggcagttattaaaaagtaaaaaaacaacagatgctgtcaaggctgtggagaaaagagaatgcttatacacttccatactgtcggtaggaatgtagttcctaccaattagtttagccactgtagaaggcagtttggaggtatctcaaagaacttaacacagaactaccatttgagcaagcaatccaattactaggtatatatccaaatgaaaataagtcattctaccaaaacaattcagcactattcacaatagcaaagacatgtaatcaacctaggtgcccctcaatggtggattggataaagaaaatgtgatacatatatatcatggaatcctatgaagccataaaaaataacaaaatcatttccttagcagcaacatgaatgcagctggaggacattatccttagcaaattaacacaggaccagaaaaccaaatatcacgtgttctcacttataggtgggagctaagcattgggtactcatagacataaagatggcaatgatagacactggggactactagagagggtaaggaaggaggggtaacagttgaaaaactaactgttgagtactatgctcagtacctgggtgacagaatcatttgtgtcctaaacctcagcagcatgcaatataccctgtaacaaacctgtacatgtacttcctgaatctaaaatgttgaaattatttaaaaaaggagtaaaaggtaaatgagggaaaggatagtattttgtggacaattttgggagaaaacctagaaaagaaagaaataggagggtagataggtgggataccaggaaaatttgtcatccctgttctcccttcctctgttgagtagacatggacagaatcatatttatgagcatcagagtaggtacagatagagctgagagttgaaaaaaaaatcagtaattgataggattatcaatgaagcaaggtctctttatattaacccaccttacaatggcagttgatgcaattaacaagtctagtttcctttggccactctctattttttaattttttgtcccatgagacactacaccctcctagttttcacccatcattcactggcttttcaccttcagtttccttcttagctttcctttcctcttaagaaacacaagattctcagagctgggtctggggctttgttttcttctatgtgtgatatgattgtatgagcccatcatgctcacagttttaagtgtgataatatcttcatagtttatatacaggtcagatttcccatctgaattgcagacttaacttatatccaaacaatttctgaacatcttctctgcatgtctcacaggcatctcactcataatgtgtctgaaacagaaaccttgacttcaccccactcaacccaaccagctcctctgcatttccctcataatggcatcgccacccaccttgctgcagaaatatggattctcatctagacttcaccctcttcctgaccataaatacaatcaatccatcaacttctattctgtgtgttgccaacagatatctcagctataacatctttatacctccacagttgcctcccctagctcttgagcatccactctctttctccaggattattgctggagtctcctaaagggacactacttccacagtttgtcagatcaacaccactcttctgtttaaaatcctcagtcaatttctatgggacaaagtgaaaaggaaaaaaatccaaattctttagtgtataggacccctgctcaactttccaactgcctgtcattccactctcccctcacacactccaccttggccttctttcagttccctgaagaacactccagcttttgttatttgcttaacttctagcatttttgctacccttcccatgtcttcgcagctggctgcttctattcctttagttcctatcttaaatattcccttcatagagatgccgtctctgacaacgctttcacattttttttttttttgagacagagtctgggctggagtggagtggcgtgatcactgctcactgcaggctccgcctcccgggttcacgccattctcctacttcagcctcctgagtagctgggactacaggcacctgccaccacgcctggctaatttttgtgtatttttagtagagacggggtttcaccatattagccaggatggtctcgatctcctgaccttgtgatccacccgcctcagcctcccaaagtgctgggtttacaggcgtgagccactgcacctggcctaccctctcaaaattaactattcttttattattctctattattgtgtttctgtcacagcattcatctatcaatcttatttccttatcttctgcatccaaaattttctgagggtaggacaaatctgccttgcttactacagtaccacaagcttccagcacagttacacaataaatatttgataaatatgtattgaatgcatgaatgaatggatggagatgagatggaacttaaagcttaaatagtggaagaaatatttccctttgagatagaaagtacaaaaaggtggtaacgtatacaaatatatttatgcacatgggatgagaagttgaaaatattcatagctcatactggaggaagggttatctgttaatgtaataggctaggggcttgaggagaatggagaatattttggacagatactatgggcaatgggagagaatgctggccagctagctaggatttcagaggggcagtgagcactttcctgaaactggagatgccaaaattttatgaaatttcaatatatgatttgctccaccagtgcctgccagcctgcgtgtaagaagagataaagcaaattgctggattaatatgagtctaagggatatcagagcacatgaggtagaaagagaatgggtagtgaggtttgaggggactggtgtaaggtggttgaatgttccggcatgggctctgggtcagggaaagaggaagtaaagctaaggggagtttaatagcctgagtgaaagggagggtacagaagaaaacagctacagcctatgacttcctcatctctaactttataatataaattaatgagaaattcacatttcacagttacattttttttaatggtatttggtgctgaaaaaaaaatcaaatcagttctgaaaagaaaggatcaattacacaaattcggcataaaccaacaagcccggctgtgaagtcctgagagttgctttatggttaaaatttggttggtctgagaaacatccagtgacaaaaggaattgtatcaggaggagttaactaagcaggctcatgcaaatgactcttcctatattttaaattagtagagtttttgtcctttttagaaggaagttctaaaaagtgctagacagtctaaaattggaggtaagaaaaattctcagaaatttgagagatttggggaagacacctctaatcaccaaatatctaatcctctattcccccgattatgtcatggtgccttaatttcactattagtaccctacatgggcagatcatgagagattccactagatgctaatatcccagcaaataagtagtacctctgccaattgttgacaaatatatatcttagatgtgtttaaagaattacaatgaagaaattctgtggaagattatatggtacagatcatattagtgcctggtaaaagcaatattacaggatgggaaagagggacccaaaagagatgcctgagatttccaatacaaagtttcagggtgtgccttgatttggggtgactgacatgtcaaggcactctgacatttacagagacctgttctcctgcattactaaacagattaaacatgtttccgggtatctagcaaaactagtgtgcttgttttgttcaaaggaacagtgggaaacccccgcaaagctttcagcattttaaactcttactctagtctttcatactggaagaaaggttacttgctaatgtaatagggtaggggcttgaggagaatggagaatattctgggcagacactatgtcatctagttggcataggttgtaaaaaccatttcaagttatcctacaccaacctaattcaagcaagtttcctttatttcagtttttccttaatttctgcctatatcatgggaggagaaattgctgctaaagtctaatttgaatgccagatatttctaggtttgtaacttttttgaggctaagaaatcacatttatattctatatgcctatttattatacaaattaggtatttagagtctactggtcccatgctatacttaaaaaattaatccaatctctttgtcttgggggggaatctaggcttagattactgcagccaatccaagttctaaaaacaaatggggcctctaatgtggggagtttcactatcctgcacttagctgacatactactgtggtggacagaaagactctggacttgagaaagatgacaagagactaagtttttagttcattctagcatttattggccctatggccatgggcaagtcagttaggcccctagaaccttagtttcctcacttttaggatgaagattacaatgccttcatcacagaacagtggtgaagatttgatgagataatggatgtaaaaatattttgtgagcttcatgctgaaaaactcatgtgagaacctacgattacccataatgcaaatacacacattttgagggagcacactgcctttttctgaagcagtcctttaatctgaatctatcaagtgctcaaccatttatcgagagacccagaaagtgatgcgtcccaccctcctggcttctgtgtgctgaatgctgagccactaacctgatttgaatgtagcctatcaaatagagaaggttttaaatcataagattgagggaatgataacattctctcatttctatgaatttttcattttattccgagacagtcaagatgtactatgtgggtcaagtctcagccttcacaggtttgaacagaaggtcaaggagaatattttcttaacttctatttgcaattcaactactgccttcatgtgagccttcaggggccttcactccccaagcactgatgtctcaggaacatcaggaggagaattgagcacacagctgaagagctctgcctgggattttattcttttctcccagaccttagaattgttggggctgctttccctctcactgataagaaggtacagtgatataaaaactgtattttcatgttttgttctttctagggtagactatccatgacattcagtcaaaatcacctggctactgattcagaaaatttaagtcacactcatcacttctactccaaagttcttagccagctgcrgctgtggttgccatggtaaatgtaaagtcatcaaagtgacaggactcaggcttagaaatataagccaccagcataaacattcaccacttcaacaatagtctgttttgagcaggaagctgtcacagtgaaattgggacggcagggagaagaggaggaggtggtgtgatgtggcagaaatagtactaggtggggatgttctgtctttcctgctgtgtatgaccttgggcaagtcatttttctcctggaacattgtctgtaacataaaggactagattagaaaactttcaaatcttcacctagtattaacattctgtggttttctatgcaactttagcatttacctgtaagtgctttcctttgggtcataagtcccctgagaaaaggcaaattaaattgttatttctatggtcttaaatcatttaacggtttcccactggcccttggaagaacctgaaggtcctgagtgatctggactctacttacttctgtggcctcatttacgtcctcattgctctcctgcaacccatgtcagatttccctcgatttctcaatggatcatcctttttactgctttctccatttctctgactctctactctttcaggttgcagctcaaacatttttgttctctcccaggacaggtttagctttttatctcctttttcccaacagtcccctgtgtttcggcatcacattttgctgtatacgccttgaagtcaatgaccatgctctgatgccatactttgcagtagcagcccagagagatttgttcactgcagggctgtggttatggccaagttttaaagaatcacctttgcttagtgctatataggaaatgctttcctataatttttttctctgatgaggtacatgtcatgcaaacttaattcccatcatgcatctcttacccatgtataaggaagagaggtgttttaatttctgccaatgtcatatgactataaggaaacaaaggaaggaaaagctgtcacctgtggaaagaacactagaattaaaaattgggaaattttcttttgaatcccaaatttgctattagtttgctgggacaatggataaatcatttattcttttacagtctcactcttctcaactgtaaaacatatgaaagttaatatctcatagggttgctgtgaggattgcttagatacaaacacacacacaaacacacacacataagtctacatgcatacatatatgcatacacacacatcactgactgaaacaaaactaagcattttctttgtgtgtgaagctgagcaatggagggattcccctttagcacagggccttggcaagctaaggagacttgcaggtgatgatggtcactacgtggggagagttgctggaggtggagagggaaccagactggtgcagtggaattattactgagtgaggaagagtcagaaaactagaggttgggtcccaacattggcacttgtgagctgtgaggccttgggcaaattactttaccatttgctcttttttcccccctcatctgttaataaagagaggtaacactttgctaatctggcatggccacaaggatcagatgaartaatatgcctgaaggatgaaaggcctcaactgcctggcatggcgcaccgctcctgattgataggcaatgagcaaatatcacgtgcaatgaaatgaactgccactgtctgaaatatctgctattatctgaaacctcagcttcctctgtctcagtttttctataggtaaagctgggatgatgatagtatctaccttgaggaattgttttaaggattaaatgagaaggcaagttgtgaagcctttgtaaacactgtttcctcatattgctgcttctcacacatgtccatattatcaacattttagaagcaacgccagttgaggaggtacttgagtttggtataatatagctgtttttccaggagactctaaaaagctcctttcatttcgaaagcaaacagcaaaatacagcttctaaacattgctattttccctgaattttctgaaccttgagcaaaaaagttgtttctctcttgagaggctctgttctgattggatcagccagaaaagcccaataggaagttattttcagggccaagagtaccagggcaatattacagcaaaagtttgatatattatgctgatggttaaactgggccttgtgttccgtatatgaaaaagtatacttctttcaaattcctgcatatactaactactctctcccaggagtgtttctagggctttcacagtatttaggaggaaaagtcaggaattcactttaacatttctgttttctattaattaggcactgtttagctgttttctttttagaaagaaactagtagcagaatttgaactagtagcagaattgtgctttccattcttctcctctaatctttgttgwctttgttattccctttgttataaggagagtgggataaataaaagtattcaaaggcccagttcattgtcctttggccatatttcaccttcattatgttacagcctagtctgaacccttttaacaagttttcctttttatgtcctgctctcctacatgacttttgagtgaaaaagagtrctgtgctctaacacacaaacacaaatgctcacaaatgcatgcacgtgcacacacaaatgaacacatacacactattcaaaaggcaccactgcattgcttacccatagaggtgaaagcaggaagtaaatccttttgaattcatctcatgaggtttttttttccctgcctccaattggtttctcaaggagatctcatagcttctccaatcaattttaattaatgttctccaatcactattagtcacaaaatcacgttcatttcatcaattaagatttgtgtcccatgtaaaaattaaaaatttaaatttaatttaactttaaagtttctttttttctctcagcctgataaacttttagaagctcaaagtttgggaggatacctgatcactttattttctctcttctgtctcctccccctcctcctcttcctcctccagtaactcattcgttatagtttttgaccctactaggatcaaaattaaggttccagaaagtttttctttcccctcagtaatttagattggtttgtggcaaatgcatggtgctatcttttgcttttcaaatgtgccaaaaaaaaacctttctttagctgtgtaggaaggaatcaaattattggttgacagtcctggctctgggctaagagaataaagaccattttaattgctttattgaggggcttgccagagttttgtagggaaagcaaagcattaaattaagcagttgagtaacgttatgaggacacagcagtggtagacaagcacgccagaattcttattgtactttaaaaactaaatgctggcagcaaaaattcctttgagtcatttttctctaaattcagattcaggaagtgcactcttaaaataagttcatttttggagttccatcttaactatagcttcaggccaaaagacagacttctccaagtagaactgccctgcataggatcacattttagcaaaacctgtgtgtacgtgtgtgtgtgtgtgtgtgtgtgtgtgtgtatgtgtgttgattgttgctgacagaaacaaacttcaatcattaggagcaagaactgaaaggattagcttttaattaaaaaaagattaaatatggaactttaactgtcaaaaaagcattttatttcaagcaaattttataggcaaaatttctaggcaacaatgaagttgtattttacatactgacgtaaaacattcttgtaaataaaataggctttcctctcttgaaagccaaaacattaaaattaagaaccaaaacaataacaaaaatataaaataagggataaacacaaattaatgaatagattatagtgttaaacagaatgtatttgccttaaatcagattttaatatcttctatatattcataatgaaaaattaagaagtcattattaatttataaacagacttgctgcaggtttcatttgaattgctaccttttgattatttttaaagtagtatcaattttcaaaaatcatttcagagaaacaaattgtaaattcatactgtgtaaacctgttgcttctgaatgtacagcactgtgatcagtgctaaaggagtacaaaataaagctaaagacaaagtttccttcagaagcttataatttcactaggaaggaaaaacagacgttcaaggattcagttaatgaagaacacagaataaacagtgtttcagtaactaggatgcctgtgtacactaagagtaattgcaatttagaggtcacagctacctcatggtccaggtggaaggaagccacagttggattctgagcaacattgaattagaatgtgtgcaagagaatggtgaggatggagggaggctgtgggaagggaccagtgaatgaaaacctcagtggatggttacaactgtaaagggtggagaagagcaaagagattagcttttcttatgctaagggcccagcttggagaaaatgtcatgtgcagggtgctattgctataccacaaaggggagaaacatgggcagacagaaaaggacagtgtgagtaaccctgagaacagaaaggagttcttgtgctttagaaaagaggtgtgggccggatgcggtggctcacgcctgcaatcccagcattttgggaggccaaggcgggcagatcatgaggtcaggagatcgagaccatcctggctaacacggtgaaaccccgtctctactaaaaatacaaaaaattagctgggcatggtggcgggtgcctgtagtcccagctactcgggaggctgaggcaggagaatggtgtgaaccccggaggcggagtttgcagtgagccgagatcgcaccactgcgctcagcctgggtgacagagcgagactccatctcaaaaaaaaaaaaaaaaaaaaaaaaaaagagttgtgaaattgaatcttaacattttagcaatggtcctttgggactccagagaaaacggagtgaaaaagcaggtttggaaaagagaatctgattttagaactagagtaagagaagttgtcctggaaatccctgcctgtctcctctacctttttattgttgttgttgttgttgttgttgttgttttctgagacaaggtcttattctgtcacccaggctagtggcacaatcttggttcactgcaacctcgaccgctcaggctcaagtgatcctcccacctcagcttcctgagtggctgagactacaggcatgcaccaccacccttgggtaatttttaaatttttttgtaatgatgaggtctcactatattgcccaggctgatctcaaactcctgggctcaagggatcctctaaccatgtcctcccaaagtgctgagattacaggcttgagctaccatgcctgtcctctacttcttaatggtaacctcaccctagcacatcagctcattcatctttaagatgatgttaactaccgactagttattatcttcactgggtgaagttgaatttaaatgattataccaaatctgtgcgcttttttttttttttttttacattttttggttcattctgtatcaatgagcagttgtgatatgacagttatgtgtgaattcatctataacagtggattttggggaaatgaataggccaaaaaggaagatattctccaaaactcttaaaatttaaaggttgcagtaggatgctactccagctaattttaagctagccctcctgtattcttacagttatttctctctctctttctttcacacacatgtactcattttcttattctattttataacaatttccccttatgctgacttcgaaaacttattatcttaaaaaatcttattgcatgcattcctgtaagcagctacctcaaacgctttttgagccaggctgaaaataaataaagccaaatttaaaaaaacaaaaacaaaaaacactccaaatcttgccaaactgatgaatcaaatgttttttgattgtattttctttaacctttatctatatgaatacataatttacacatatttatagtcaaggtgtttgggtaaaagaacaaaaaatgatttatcctctttcaaagaagaggactacaaaaggactgaaaaatactttgggaggccccaggtccaggatccctggtggtagacccctgagtggagcgtagcatccgccaggcagcttgagacacacctatatttagccaaggtgggttatgtgataagagggaggaggcctggccacatgctctctgactcatcctctcaagcacatgtgtcaatttttcctacagttgggacaacctccttcagaagacagagcctgactgtaactttcctgggctgcaatgcttaacttctacagaacaaagtatagaaactaagaagcactgggagtccccgagctttcaatgagccacactagtgataacatcgttattacttgctttgagcacccccacccccgccacgcatgtgccttttctctggtttggaactggagcttgtgcttctgtgcagtgtctaattcctccccagactccctagcagcctgccaggtcaataagggcatgttaaaatgaaactgctttaacggctacttcatttccttgcactttgtgttcaaagctggcatgtgtaatcctgtgatacacaggactttagattagagctgggccaacacaatttttaggatcctttttgaggggagattggcaagagatggaagagagtgcagaataattttgagcatgaattttaatcatttctctacaatgactagctttgtgaccacaggcaatctagcatcccagggcctcagtttcctcatctttgagtatgtctgcattctcctcaagactgtgattatcaccagggtgagaagcgtgaatggcacagtgcttggtataagcagtgcatggctgatagctgtttgctgatggctaagagatggaaaacgacctggttgtagccgacatcacaatgaagagactcttctttctaatgtggataaagcttctcctgtatctgccttcctcctagtaacactgactaaaatgtaatgctgactacctagatcacaaagaagaattttctacagaagccaaacaaggccattgtttacatgccacatgtgctaagtctcaatcttgacattccccaatccaacttcctggcaaatattgtttgacttagggaactgagttaacagatattgaacatacggctgttgagtaccttcacttatcagtgggccaagaaaaaaaatgccaggaacccaattatatttgaatcagattaaatatctatgttttgatccacatctggtgatatagttataggaatttaactttttgaaggactggttactgaaggcccattgggcagctttagaactgcattaccttgagaaagtgttgtaacttctgagcgccctcgccagcttgttaatttgaaccataatgactgcctcctcctttgcagggctcatatggagttcatctatgtgtatgcaggctctttgtaaatagtgaatgtctacaaatataagtgattattattatgctttttatacctcctgtaggtgtttgctggtcatggactgattgactttttccaacattatgattcctatgtaactgatctcctgaaatatctaccatctccacctataaaggagattaaattttagggagtaaagtcacttctcttgctatcctgcttatcattacttatgattaggcagaattctgctggttaagatatgattccagggaggcctagaagagtccttctgtgtgcttctttcccaaatatattcctgacaaacttgctaataatgaaaagttccaaaattgggaattcacttcattgtcactattctaatggaattacactttaagctctaccatttatatacacgttattatgaactgagttcatctaatcattttaataggttttcaacagagggaagaaaattgaacatgagctaatggtagggaccaaagtctcagagaacaagaactctgcaactgctaataagagaatttttgtctctgtagctggtgaaatatttgaatgatatccaatgattaatgtttctttaattctctaggtgaccaaaaatcacacagaattatctagcaataaatcctctttacataacagccaaagcacttggggttgaggaaagagaagagaaataggtcttacccagcaggtctggtgtcttcaatggctctatccactgggatcaaatcgctaaggtagacattgaagtttccttctttccatcttctttctgcctccttctcctttccatgggggacaactacaggacgcccaaactgccctggagctttggggtcccttggagaaagtgtcacatcaattcttaacacctggtgcgttccactgtcttcaggtaaaagggcttttatatgactctggttgtattctgtagagggggctttggcagttatgttgatttttgctggctctagccctccagttaaagcatggttagtttgggacagtggcactctatgtggagcaagtgaagaggaagacatctcacttctattcctggaaatgtgtttactttggcttttacccaatactttaggaaatattgttttggttttagaattagagacctctttggggtctgccttttgctcttcctctttggttataatcacaagatggctttcagagaaattgagtttcttcccatgagcccctctagctccatcatcctttgacaaacttcccaaaggtgtctcattaatagattgcttccttaagcgatttgaattgacagtgaacttaggaaaaggaagactcgtattggctttgtgtttatttgcattgacttctttgctctgagtcttagttttgtttaaggccatggcttccccagacttcggcactgctgtgctggcagggtgtgccctctcgtttgctactgcctgtgatcgctgctttggtctatcagtactaagactgatggtcacattcaagtccctttcagctgctagttttgatgtgtcactgctgggactatgactcttccggggctcctgttttaaactgacacgtcccatgtgtactgatattttgactacctgagttccttttgctgctatgaatgaggtctttggagccccctgagctgtcgtttgctttggtgtcccctggtgagaggaggcttcaggtttggtgcctctcccgtctgtcttctgcttgttaggagtcacagggagggtctgcagatgtgcaggatgccacaacggcacaaccttgccccttcccagggcattctgcatttttctttccctctgggtttggtccaagtccacctcaaccttgagcacactctcctcagtttttctaacattctctttgccccatgcccctttcccatgtccccttaggrgaggtttcatctcttttatgctgctgtaaaaaatttttccttggtctggctgaactctgaatcctatccgctccctcctcacaatgtcttccttgatgacccgagtgttgatctcactgaatgagaggcggagagctgccatgtcaaagaggagccagatgacagaagctacaaagataaatgccaagactcgcccacttcctcggaaaaactttcggatcctgttcatggtacaaagctttccctagcagcctgccctcccttagcctgcttaccttgagtggagaggaagctgaagyagcagcagcagcagcagcagcagcagagttgccagaaagtgaccccctcccctgaacacagcaggaagcagcagtccaaggggaaagctcagttcctaccgcttgtcagtctctgcctgcgtggcatttcatagcagagcatctgtgcctgcttggctggccctggctaagttctgataaacactggccttaggtcactccaggagcagttgattccagccaccgaacagttcaacatatcacttgtcttgtctccgggagcccatgtccaccttcctacaagcccaagaaaaggtgggggccagattgagactgccgtttctctcctccccgttctccgtctgcacgctgtaactcaacaccayttctcataaggaaaacatttcatgccattacccagaaaacttcattcagctctcaccttctgtgttatgtgagagcatgtgtgtttaaacggcaattaaagaggaaaaaaagctatctaacttggagggcatgtgttcctggtttgtgaccccacctaccctactcctgctcattaaccctgttgtagccaggtgccaatgctctgcctgaggaatttatcactgaagttaacatttcagctttaagacataacagcttaaagaaggggcctggtatatcctcacttccagagatgtatatgtttaattatttagatcattcattcaaggggtttcaatgtatttctttgtaagccaactatttttttttcactaatccatctgtttttattattacatttgattacaaataaacttaatttgtcatactgctataaaagtttctaaacactttgttatggtctgaatgtttatgtccacccaaaattcatatgttgaaacctaatcataaatgtgatagtattaggaggtagggcttttgaaggtgatttcattataaggatagagccctcatgaatgggatcagcacccttaaaaaagaggccctattgccttgccattccacaaagtgaagacataatgagaaggtgccatctatgaaccaggaaatgggccttcaccagtcaacgaatctgctggtgccttgatttctgacttctcagtctctagaactgtgagaaataagtttctgttgtttatgagtcacttagtctatgttattcttctatagtagcctgaacagattaagatacacttactctcagtttcagtacttatctcgtcttaaaccagcaagcaacagtttcaggaccacaccaggacttggaccagattttgagtgatgctggttgactggtagggtagcagttccgccacaggcttttcattagaaccacttgaaacaagatccccaaaactctggtcaattgatgagagaggaggtggagatgacatttgggctgatattgtattaaatatatatatatatatatatatatatatatatatatatatatwtttttttttttttttttttttttacaaagcttcccaggtctttcaaatgtgcagctaaagttgagaaacactggtctagaaaaaaagtctcaattttttgtttgtttgtttttggtttttgaacattgcctatgaracatttaattttaggtgtctacttgactgggctaaggaacacccagrgaaccagtaaagcattatttttaggtatatctgtgagggtgtttccagaagagattggcatttgactcagtgcactgagtggggaggagatgccctcacccaatgtgggcaggcaccactaattggttgagggcccagatagaaaaaaaggcagaggaaaggtggattctgtctctgttagtgagctgggacatctttcttcttctgcctttggactaraactttagattctctggctttggcctctggggcttgtaccagtctgcccccacaacctccacatccctcactaggttctcaggcttttgacctcagactgagagtgatgttattggcttccctggttctcaggcctttggactcagaatgtgccatgttactggctttcctggttctccagcttgcaggtggcctggactgaggtttctcagtctccataaccacatgagccaattcctgtaataaactgcaactcacttatctacctctatgaatcctattggttctgtttctctgaaaaatcctggccaatacagtctacaacttgtgtgacattccttccctgtctaaagtacagtctaataaaatctatgcattcccataacaactaaatcagaatacacattttgacattgccagttgtaaagattgtccatagagtttgagaagcacttctcgggaccactgtccttctctctgaggaactctgagtgatttgtggacaacactgctgttcattactctagtgtggggagggtctagcttccatgctttgaggtaaacttatgttcccaatgacttgggaggggaaggagagattccaaattcatatatatatctcaagcactttgctaagttctttccattgactatctcactcaatcctcacaagaatctaatgtgaaggagtaaattacaatatgtattttgtagtcagcaaatgaaaccttagagaggtaaagcaacttctggtagagattggaggggttgggtcttgaatacacgactgtagtccgtgtgcttcaatatcacacaatactgctctctagctgtatgatcttgcaggctagttaattttatgtggttactgagcaataaaaaaaaattctgctttgcagattaatgtgagaatatttaaaaatggttaaagttattgttatattgaaggtactctttaaatgttagccattcatattgttgctaatactttgctgtaataggagtgtcggatgcatgtgggaggcaatgtaccagctcttcccmaaaaaacaagtagaaaactagtgactaacatgattctggcaatggggaagaaacaaatctgagtattttattttattcttgccattcttatttcctctaattatagatttaacaagaccattgttcactgagaactccctacatgcccaaaacatgaagtaggtgacattgtctctgcccctaacaaccttaaaactcccctcagtagaacgccaccagtataataataataataataawaaaagaacgccaccagcaaaaaacatagcacacatctttagcatccacattcgaaaataaagtgagaattttttttagcatcatggataaatggtttgcattacaatattgttttaaacatgaaaatagaatactttaaaattattttactctgcatgattcaatcttgtccagccaccatcccaccccaaatggcagttggaattactcaaatgtcttttaggaaagtcaacacttgttatattctatgcttggcagtttaaaacactgcttgaaatatattcttgtttccatataaattttatcaaagagtactgatttctttttatccctctctggtttgtccttgcgaatcaaaacacaaattacttgcaacaggagagcaacatgttaagaaaattaaaagggaatcttggcttatctatcatgggtaaagcaacacattaactctggcttagtcttcggtctatttgacatacaattcagaatgaaatgtgaagagtgggtaggagagtaaggaaacattgattaaatatcctagaaatggaggagtagatttgttgtcagacctggtctaaagtactgacttggccactaatagccatatgactatggatgtgtcacacatggaaaagcttgtgtaaggttctcttcccagcctcttcttggtcttttcccttgtgagtttatgataatctgtgatgatggtagaagttggttataagccataccactaattcaacactatgtgtcttcaggcactcagtaataatttctgtggccctcatagctgtacatctttctccttttttttctcttttccgacacacatgctgtttcacatctcagatcaatgaattgcataggtaaaaggaatagaaaaaaaaggatattaggaaattctaccttttcatcaacacacatattgcccaacacatgacatttgtatattggtaaatgacggtgcttctaaaattttagttgtattaatttccatgttaccagcaggaaactaaatacgtaagtgggttggttatttgaggtaccccacagttagggagcctggcttgtcatcccaagtcgtagaatgcaggtacctttggctggtcaaatttctcaagaatctgtacatacttagttggagatgatatccatctgaaaatctggagttacgaattatccttgggagacatttggaggggttattccaattatcagtctgactccagcttgtactaaacatttaaaaacagattttagtttcttcttctgtaaaacgagcataatagtaggaggacttgccctctactctatttggttgttgtcaggataatcatattaatagcaacctttcattgggaatttactgagggcctaccactagtcacttcacggtatctcatttaatcctcaacatttaattttctcagactagatcaaaaactgttcagcaaaacagatctgcataaagttagagtgaaaagtatatttgtgttatattctcatggcaaatgtctttgaatcatcctcattgttaatcaagtaggagctcagtaaacactgttttatatctagccttaaatctccctgatggaagtacagaatcttagaaacaccggttccagctctctggctttgcatctacagttactttatctgggtatttgaagatttcttgactatgtgagtatatcctaagtaactaatatctgttttattttatgatatttactcaactactcactcctaagtaaaaagaaagatgtaaaaggaaaattaatttaaatgtatattttacagagaataatgattatccatggatgcatcactgaatttctttttccccagttttactgagctataattgactaataaaatgatacatatattaaatatttaaggtgtacaacatgactttggatagccttatacattgtggtatgattgcctcaatgcagctgatctccattatctcacataattatctttttktgtgtgtggtgagaacatttaagatctactctcttagcaagtttcaagtatacaatatattattatcaactatggtcatcaggctgtacattagctctccagaacttactaatcctgcgtaactgaaactttgtattctttgaccaataccttccaactttctccatcccccaacccgcagtaaccaccattctactctctacttctatgagttcaattttttagcttccgcatatgaatgagatcatgcagtatttgtctttctatgcctggcttatttcacttagtgtaacgtcctccaggttcatccacagtgttgcaaatgataggattttcttcttttttgaggcaaaataacattcttgkgtgtgtgtgtgtgtgtgtgtgtgtgtgtgtgtgtgatatatatgtatgtatgttgcactttctttattcattcatctgttgatggacacttaggtgaattccatatctaggctattatgcgtaatggtgcaacgaacatgagactgcagctatctcttcaaggtgctgatttaatttcctctggatatatagccagaagtgtgattgctgggtcatatggtaattctattttttagtttttttgaggaaactccacactgttttcgataatggttgtactaatttacattcccaccatcagtgtacaagtgttcccctttctccatatccttaccaacacttgttatcttatatctttttcatcatagccattccaaaatgtatgaggtgatatcttattgtggttttgatttgcacttccttactgattagtgatgttaagcattttaaaaatatrcctgttggccatttgtatgtcttcttttgaaaaaggtctactcattttttttccctatttttaaatccagttgctttcttgatattgagttgagctctttgtcaatcagtaggagcgcaataaacatggttatatatttgagatattaactccttattggatgtatggtttgcaaatatagtctgtcatccataggttgtcttttcactctgttgattgttttcttggctgtgcagaaactttttagtttcctgcagtgtcatttgtctatttttgtttttgttatctgtgctttcggagttccaaataatcaccactcagaccaatgtcaagatttttccctgtgtttactttcagtagttttacacttttaggtcttctgtttaggtctttaatcaacattgagttgattttaaaccacaaagaaattaagcaaacaagcctatttacaatagcataaaagtacttaggaataaatattttttaaccaaggagatgaaagcatttttaactaagaaggtgaaatctctgtgtactgaaaactataaaatattgatgaaagaaatggaagacataaacaaatggaaatatatactgtgttcacagattgaaataattagtattcttaaaatgttcatacaaaccaaagtcatctataaattcaataaaatgtctatcaaaattctggcgtttttcacagacatagaaaaaaaatcctaaaatttgtatggaaccataaaagatatcgaatagtcaaaaaaatcttgagaaagaagaagctagaggcatcatagtacctgacttcaaaaatatgctaccaagttatagcaatcaaaatagtatactactgtcttgagacaagcctgggcaacattatgagacccccatctctacaaaaaataaaaaaattagcagggcatcgtggtgcacctctatggtcctagctacttgggaggcagaggtgggaggatagcttgagctcaagaggtcgaggttgcagtgaaccgagtttgtactgctgttctccaggttgggtgacagagcaagactctgtgtcaataaaaagtatatgatactgccataaaatcagccacatagaccaatggcacagaacagagagcccggaaataaatccacaagtttacaatcagttgttctttgacaaaacagccaagaatgcataaagtggaaaaggtagtttattcaataaatggtgttggaaaaattggatatccacatggataattaatttcaactcattgcgacttcagacaatacaggatgaagatactaattagaaaatttaaatgggaaaaccaagtaaatactaattactgtttttttcggattttaatgtgatttttttctttccaaattctctctttctcttttttagagaagagacaagttgtaatcaactggataataacatcctgtgaaacaaatccataaaaggaaagaaaagttttaaaatcatatactaaaaggcaggcattattgcaatatcaacaggtagagtaaaaatacaaatggaaatattattccattttaactaattcttccaatgaagatgaatagttacaacttctggcagtcattaaacattggtgtatgtctctttttaaataaaatttggaagctgactaacaaatgaccttatttcctaagaccaagagaatcagtataccctttacacatttgttcttgaaaagggttgcctgtattagtgataaatcataattggttaagcctaagtttaaaaaaacaagaaccctattattgaaagacaatttattgtgtttagacctcagttttcattgatttttgagtagtgaggctaagccaacatttgtgctatactactttacaggtccctagccaatttttacttaaaaaatattttagtttaattaggaaaaatttaataaatttaaaagcaaaacattaattgagtatcttccttggacaaagaactgtgctagtcattaaaatggagaaagtgagcaggttcctgaaggacatattgtcaatgagcccaaaactggcaactcataatcttaattaactgagttattagtattggttaattatagctttggggataaaaagagaaaatagctcagggtggctctgtaagaacttcagtaacttaaacaggaatggtagggggaaaatgatagtttgagagaaaagaaaagttcaaatttaaatatgttgtatttgaaataaatgaagattttgtaactaggtgcatatttaaaaaatatttatggagtaccgaccacatactagactaggccctgtgctaagctttgggaaaataaagaagccaaagcccataatttagtgtagttgttttcatttatatgtgtgtccatcaaacatttcatgaggaagtgttgttaaaatatagactctgacgttctcccctcagagatttcaaggttggttgtagggcctagcaatctggattttaactggagtagataatgattctgatagagttggaccaccaaccatacattgaggctcacaggttcagcagcagaagcatattaatattaaaataagaaaactggaatagcttatttggaggggtgtttggaaaggtgtcctgggggtgatgactgagtgtgaattcctcttatgaatagggagagggtaatttaggaaaagcagtctatgcagaggtaaaagcaggctcaaaacattgagggaggaaggcatgagaataatatgaatggataattaagatttgtttgatagtactagattttacagtagattggcaagcaacgaggtaaagattgttggctgagcttctgttgtatttgttcaagattttggatttttactgttcaagggctagaagctttttaaagttggagtgtgatactctcagggttttggatagagagcgggtgggtgtatgaagaataaattggtagtaagcaagctgcaggctgggagaccaattaacataagtgctacatatttattgcccttcttttgaacagtctaatcacacatggaataaaatctgaactttaattgtacatgttagtctatttaagatatttttctagatcaagagggaagactggaagagggatcatttctactaatagagtgggtcttcattaaagacacagtctcttaaagtgcacgtaaggcacaaatatacaagctatgccctctgtttctaaacctaaggtgtgtttaacttttaagaaactgccaaaatgtccccaaagtgcttrtatcatttcatattcccactgacacttccccacattttcagtaacacttaactttttaattgtagtcatttttgtgggtatatagtggtatctatttgtgttttaatttacatttccctaatgactarcaattttgagcagatttttctgtgcttatttgccaactgtctacattctttggtgaattacgtcttcaaatttttgatccatttgttaatggattggttttcttatcatttagggacatgaagaaacctttaaggatggaggtrtgtctactgtcttcatcctggtgatgctttcataggtatggacacaatatcaaaatgtattcaattgtacaccctagaaatgtgcactttattgtgtatatattatacctaaataaagctgttttttaaaaaacaaaaacctaaggaaagaataaggacaattcctggaccaaaaaacgagtgcagtgttttagtttcttactattccaagcaggaaaaaagtggacgatgccattattacagcttgtagatcctcaagaaatgaggtccctacttctttggtcctaagaaggagctgcagttctggtctccacaaggtcagtgcagactctctggtttgtgcagtgctgccttaggctgttaaagagagcaggccattgtgtgctccctggatgggcccagccagatgcccttcttactctgttccccaggtgcaaagtacccatcaatgcttttaaaacgtttaaatggaagccactctcaaaattagagttcgtcccattgcctctacattcaaattgttatgttatcattgagttgtataacatttaaaatgaaggcctataggcttcaattacagtattgtttgaagaaaatctttataaaatatgatatttttggagcagagttgggtaggagctccagactccaggtctagagtcaagattgtgccaggggttctttctacgaatgacggtgagggctttgatactataaagagagtggatacggcctaatcagataaaagtgtgtcaccagaggagacaagaaatgagtttacaaatacaggcttataatttaattgtaaaaaaagattagagacaccttttgttttgaaattgttccagttccaggacagataaaaatgagtggaagaaagcaaagttcagagttcgggcctggtgacttctgattttctcagagaagtacgagatagactaatggtgaacagtgaagagttgagggtgagtgatgtcaaaagacaacactgtaacaaatttagtttaaagatttaacaggaattggggcagtatctcctccacaaatttagaaaaggtgctctgatgggcatggtagaacagttcgtttttataggacagtctaagcaggaccaaacatatagcataatacaaaaagcagatgggttaccatcaggttacttcaggttactttccttgcagggttaaaaggatgtttcctgactctaccagctaaaactggcctgtttggatacttggcaatggtctttctctcctgatttcctgaaaggtgaaataagcaacttttttagtttggtaccaaggaactttagcacgagtgattccattttgatttggtcggttggggcctagttcaggagctcagtccaactcaatgacttcctataaattttatttaacagtgggtaggggttggatgcacttggtaaagtttggaatcagctgttaagaggagaaagaaatgtgctacctcagaacaagagtaaggacttctcagagagcttcgagagtcctgctggcattttaaccaatgcctctaagcaaggagaaaacacaatgagtgacagtagaacaaagaaggcatgtggacactcccacagcattcctgagacagagtgataaaaggtgacagggaagcagatatggagtaatgatttctgacaaacgtggaaagaaggggatatcatgaaaggattttagaaagtggaattgccgtatctaaaagcattaggagaaattctacaggcgagaataaaaagaaggcactagagatttttgttgttgattttatttgtagaaagagacattctttaacaactgcaggcatgttaggactttgccctttgaaaatctattagtaatgatataaaaatccttccgtggtctcttttggcagaaactgaattaaatcttcagctgctctctgaatcactcatttaaaagtttcagtgattcatatgcaaagcttgagttaagagaacaaagacctgagcgagtttctgtagggctcggcctaagcaaagttgtcacgcagaacaacatgagtgctgggtcccctacccttggccctgacaacctccatccgagcagcaacccctatccaacttactgctgccctgcagcctcccaggtgctgccctgggaatgccctcagaacgggtcctgtcctctgatcctgactctccttcctcttctcatccatccccctgaaatgatcctgtcctctttatggcctccattatagcaaagaaaagagaaggaagaagagaggagtagaaaaagaagtcttgtgggaggagcagacagcaggtgctatgtagggcatttgagggctcttttcatgtgctgtgaagaagtgggatgaaatgaaaatctttttgaaaaagctggaagctgtttcagatctccccctgccctgctccccaccaattcaattcctgctcccaggggaaagtgcaaaataactttctgtggaatgaaatgatgacaatgactttggatccaataatgttatcataacctggaaataacctttccatctgaggcttgcaaaggcagtgaagtgtgaaactcagactacagttagagaaacgaaagagacttgaactcaggaccctttggacatttccttcaatatcaaagaaaagtttttatttctctcctctgaaaatagggtaggaaatgggtaagtgataaacagagaaaaaggcagaagcaatacctaattagaaatcaaactaagagaggaaaagaaaaatgggttcagattaatgtcaggtttggttattccaggatctcaacttcgttgctgttatcacatactttcagaggcattcaggtcttgtgatgccgtgtgcttgagtgtttttcttactcttggaagctgaggattaatactcagggctgggcacacaggagaaaagggtttgttaagcatccactcctggttaagctaaaaaatgtacatagaacttgaaagcacccaactcagttccagagggatgaaataaacctaaaaataggtgagctctggttgtattggggctggcctgaaaacacacaagaaaggagcacttgaaagagaaggaaagaggagcaatgtgcatattttacatggatatacacatttgtgtctacatatttatatacaaatgtacaaactccatgtgtgcttcgtttgtgtgtgcatattcatatttatacatatgtatatatgtagagttcacagagcatacccacacaaatacacaccagaggtgctgactttgagctctgtaagaaaaaatttactactcgggaagaaatgaaacaggccttttgaggacattggccatacactaccaggtatactaccttttggagggcagatcatatgttttgcatatgtttattttgggtaggaggagactcaggagcaacataataaccacttcaaaattttagaggaatatcctgtggaagaagggtttaactcattccgtatggttccagaagagagaactgagactggagcatagcagatttctgttctaaatgagaatgactttctaacaattagtactaaacaaaagacacgtgtatttcttctaaaagtagttaacgatatgcctgctcttgtaaatgacatgtggcagaggatgaatggccatctgtcacagaaacggtagggggtattcttccattaggtgggggtttggactacagcattagctggaccagctccattctgaaattcagtggttctctgaaatacataaatgagttttgaggcaaggcaagtcagataatggttttgatttactgattgcttttacttcattcagtgacttaggagcagaaaactcctatctcaatagttcctatagatatctatttttttgccttctgtttgatttctattcttcctccttttctctttacctttaatttttgtgtttctattatcttttccttttcttttcttcttcctccccatgccctctagatataaggatggagtaaaggcaatgtttgtcaagaaagcaacaaggaagaaaaaagaatagagaaaggaaaactttgaactcagttaacttttaattttcacttcaaattttggctgtgtgtgagtatgtgaatgcatgtatgtatactggattgtgtatgtgtttgtgtgtgtgtggaggggtgggatagaaacagagagaatgtgtgagtaggtgaatagaccctcagatgtttggaaatgctggaagttaggtaccacttcttgttgtcacgatgcctagtgggtgctagtagtaattaatggcaaaaggggaggaatgctctatgtcctgcaatatgcatgtcagtgccatccaatcatgtattatactaccctacataacagggccccattgaggaacactagggaaaggctgtggagacagactgtctgggtttgaatcctggttctgccatttttagctttgggatcttggataaatactttaagctttttgggtgtttgttttctcttctgtaatatgaagggtaataagaacaccaacctcacattactgtcagaattaaatgaattagtatgagtcaagtgcttagaaaagcacagacacataaaacacattcaacagtgtcatctatgattttaatttttctgaaatggctggaaatggactacttggactcatcttatgtgctgagtgtatgaaagtctctacatgctttaactgattttttagggaactagatagtaatgaaccagtacttaagaaagtgcagcttatggaccccttgatgttgtgaagcttttgtgatatcacatgaacacacgtaagctttggcagataaaattaatttgccttgttctttttgtcttcctcacacataagcaaacatatagtcatataccacataactatactttggtgaggaacagacctcatatatgacgatggtcccataaaattataatgaagctgaaagatttctattgcctggtgatattacagccatcttaacttcacagctcaatgcattactcatgtgtttgtggggatgctggtgtaaacaaacctactgtgctgccagtcatataaaattgtagcacatgtaattatgtacagtacataatacttgataatgataataagtgattatgtttctggtttatgtattcactgtagtaaagttatatttactataatttattatcatatttactatactatagtttttatcatcattttagagtgtacttctactcattaacaaaagttaactataaaacagtctcaggtgggtccttcaggaggaattccagaagaagtcattgttatcataggagataaaagcttcatgtgtgttcttgtccctgaagaccttcctctgggttaagacgtggttgtggaggatggtgatatggatgatcctggctctgtgtaagcctaggctcatgtgtgtgttgtgtcttagtttttaacaaaatgtttgtaaagtaaaacaaaaaattttgaaaatagaaacaagactttagaataagtatataaagaaagaaaatatttttgtacagctgtacaatgtgtttatgttttaagctaagtgttattacaaaaagttcaaaaagttaaaaaatttaaaaactaataaagttaaaaagttatagtaagctaaggttaattattgaagaaattttaaaatgaatttggcgtagcctaagtgtacagtgtctacaaagtctatagtagtgtacagcaacagcttaggtctccatattcactcataattcactcacttactggcacagaacaacttccagtcctgcaagctccattcctggcaagtgccccatgcaggtataccattttttatcttttatacaattttttttgtggtatcatttcgattttagatatatttagatacacaaatacttatcattgtattacaattgcctacaattttcagtatagttacatattgtataggattgtagcctaggagcaataggctatgccatatagcctaggtgtgtagtaggctataccatctaagttcatgtaaatacactgtatgatattcacccaatgacaaaattacctaaagatgcattcctcaggacatatctctgttgttaaatgacacatgattatatacccaaccgttc

SEQ ID NO: 97541 - DNA, 27501 bp, Homo sapiens
  misc_feature (1)...(27501): n = A,T,C or G
cagtgatgtttaaaataatagctttattgagatataactcacttaatatgaaatttacccttttaaagtatactattcagttgtttttagtatattcagaggtgtgtgaccatcactaccaccaagtttcagaacactttcatcaccccataaagaaaccctgcacccattagcagagtttctcattggcagggtttcacatttcccctaatattagtgattttttaaaaagacagttttggagaagtatgaaaaactaaaagaaaagtaaggaattataagtaacaagggtatattatgctttcaaagggaactaggagagagaggtaaataggaagaggtggtatcagaatggctgtttaaaatgggaaaggccatagactgaagggaaggattcggggaaaaagactgagaggcacagagacagaagatatatactcgctcacaaactggatacagttgaacaggatacaatcagaaacacagatggaggggtttgacttggaaaggaagagacaccttaggggactatcatgacaaaagtaagaaactactaagtcaataactaaaaatgagggacagctgggagccaatggtaggaagcagatttactttttgctaaattttggtagttttaaatttttcatcatttgcatgttttaatatctcaaaataaagatgataaatacggggattttgggccaggcatggtggctcacgcctgtaatcctagcactttgggaggccgaggtgggtggatcacttgaggtcaggagttcgagaccagcctggccaacatggcgaaaccccatctctactaaaaatacaaaaattagctgggcatggtggtgcatgcctgtaatctgcagctactcaggagtctgaggcaggagaatcacttgagcccaggaggtggagattgcagtgagctgagatcatgcaccactacactccaacctgggtgacagagtgagaccctgtctcaaaaaaaaagaaaaagaaatgtcacagaacagagaacacacaaacacctaatgaattaaatttcagaaagtgatagccctttaatagagagagaggcccaacactactctcttccctggtgcagcagcatcaggagaaaacgtactgtagatggggataagaagaaacaaaccagacttttaagaaatttttaatgccaaatgtaggctagcatgacagattaaaattctaaggcgtggtggaggtaaagctgagtagtctaatgtgctggaaaaagaattacaaggagccccagacatggaacccatctgtacccatctaccaactctcctacaggtcttcactaaatacacaggtagcacactgaaagctgaagacagatcagaagaactgaaagagatcccatctgaagtatgtaggcctccctgaagtacaaggcagttatcttccaaaggaggattggcaagtggcagacagaaatccatctgaggtaatccaagcttttggctaccaaaggctgtggaggcaagagctgagaaaaagctctccacggcattccaggccttcacagaatgtaaaacagctgccctcctgaggcaagggtaagagcagcaaggcagagatctcctttgctgcagagatctcctgagacacagaaaggcaagaagcacaattaaagaacaaagagaacctcccagcgacctaaaaagctggcagctcagctggcaaaacagatctctgaaatcatgtcagtgcttagatcccaaatcctgctgaggagaaagtcataattctgccccaaagtatttggacccagtggtaaactgaatcaaactacagctgcaacaaagcacagactcatcttacttataaattagacttactcaatttagtggccagacagaataaatggaattttggaggtaaatattaagtaaaaaataagtaaacttcaggttctcctttgttttatagaagctgtctggtatacatgccaggtacggcagctcacgcctgtaatcccagcactatggcaggccgaggcgggtggatcacctgaggtcaggagttcaagaccagcgtggccaagatggtgaaaccccatctctactaaaaatacaaaaattagctgggcatggtagcacaggcctgtaatcccagatactcaggagactgaggctggagaattgcttgaacttgggaggcagagattgtggttgtttttagtatattcagttgtttttagtatatttttagtatattcacaggcgtgtgaccatcactactaccaagtttcagaatactttcatcgccccataaagaaaccctgcactcattagcagtcacatttcccctccctaatattagtgattttaaaagaagacagttttggagaagtatgaaaaactaaaaagtgagctgaaattgagccactgcactccagcctgggtcacagagtgaggctctgtctcaaaaaaaaaaaaaaaaaaaaaaaagatgtctggtataaaataaaagattatgagacataaaaagaagcaagaaaatgtgaccaatggtaagtaaaagtaaaggaaatagtcaaaataagcaaactcaaagatgccccaaatgttggaattattattaaatagtaagtttaggctgggcgtggtggctcaggcctgtaatcccagcactttgggaggccaaggtgggtggatcacttgaggtcagcagttcaagatcagcctgcaacatggcgaaaccccatctctactaaaaatacaaaaattagctgggcatagtgacgcgtgcctgtaatcccagttactctggaggctgaggcaggagaattgcttgaacctgggaggcagaggttgcagtgagccgagatcatgccactgtactccagcctgggcaacagagtgagactccatctcaaaaaaaatagtaactttaaaataattatgataggctgggtgcggtggctcacacctgtaatcccagaactctgggaggccaatggatcacctgaggtaaggagtttgagaccagcctggccaacatggtgcaacaccatctctattaaaatacaaaaattagccaggcgtggtggtgcgcacctgtaatcctagctactcaggaggctgagacaggagaatcacttgaacccaggaggcagaggttgcagtgagccgagattgcgccactgcactccatccagcctgggcgacagagcaagactctgtctcaaaaaaaaaaaaaaattatgataaaaatattaaatgatctagtagaaaagatagacaatatgtatgaagtgatgggacatttcagcatagtaacaggaactacagaaaagaaatactggaaaggaaaaatatattcaaaatcaataattaattagatggactaagcagaaggattgataaacccgaggacagatcaatagaaaatatccaaaatgaaacagagaaaaagagggggaagggtatacaacagcatgtctaagttctgtgggacaatttcaaatggtctaatataatgtgtaattggagtccaagaaggagagtagagagaatgaaacagaagaaatattttaaaaggaaatggccagaactttccacaaagaaagacatcaaccaaacaaaaccaagaagttcagtgaagcccaagcaggataaaaatatactagaggattcacccaatgaggttataatgtagtttaaatgactacttgaaagaaattatgtcggttcttattaatacatggagttaggatcaaatccatctattgtctacagagtctgttcctaaagaaaccatggaggtaagttttaattttacatcctacctattaaagaatttagccttgcccaaagacaggtgccctctgctcctgagaggtaatctatgtcatacttgacaggagtgtccttctggccagggttggccaaccagaaaggccaaccatgtgatttaggatggggactttgggtcacccagtatcagtctgaatccaatctagagactgagctcaactatgtgggcaatccatcaatcaaacatgcctatttaatgaagtcctaatttgaaaatctggatgctgaagcacaagtgagcttccccggatggcaacagtccatgcatactgtcacatactgatactgagagtaacacctcctgacttaatggggagcgaataccagatgctccaacatttgagaccctcttgaacttggttctatgggctccttgccttgattttaatctgtatcctttccttgaaataaactgtaaccatgaacataatagctcttagcagtgagttctcctggcatctttttagcaagttatcgaaactttgggaacctccccagcccccagacttgcagttggtgtcagaagtgaaagtggtcttatggaagactgtgtcctcaaactttacagtttagctaactcggagaggatcttcataaaagttttaggttcatttaatgatgaaagctagttaaaagttcaggcttggccaggtgtggtggctcatgcctgtactacgaacactttgggacgtcaaggtgggcagactgcttgagtccaggagtttgagactagcctaagaaacataaggaaaccctgcttctactaaaaaaaaaaaaaaaaaatagaaaaattagccagcgtggtggtgcatgattgtagtcccagctagtcaggaggctgaggtggcaggaaagcttgagcccaggaagcagaggttgcagcaagcggagatcgcaccactgcactccagccagggtaacagagcgagacccctgtctcaataaataaataaattaataatgcaggtgtaatagaaacatatggatcctcttattatttgtttaaacatgtgtttgaagatgctctttggggaatattgctgatacagtaaagttatattctccaagctaaatccaacattgtgggtcaatctaaatcagaacaggagacttaatttaacaagctgaataagctacattactatactgtacatctccatctcatattttatacaactcttttaacatatgaaaaaaataattgcttctggtccaacaactacaaataatccccacaaaagaactgtattttttgtatttttgagacaatcttgctctgtcacccaggctggagtacagtggcgcaatctcagctcactacaacctccatctccaggttcaagtgattctcatgcctcagcctcctgagtaactgggattacaggtgtgtgctaccacaaccagctaaatgttttatttttggtagagatggggtttcaccatgttagccaggatagtctcaaactcctgatctcaagtgatctgccctcctcagcctcccagagtgctgggattacagacgtaagccaccgtgcctggccacaaaacaactgttatggaaacctcatcactagtcaaccttttatagcaaatacagtatttgactttaaacattcagccaattattatgtggtaactatgaaaacaactatggttttaatgtcccctccaaaactcatgttgaaatttaattgccattgtgatagtattaagaggtgggacctttaagagatgattaggccaggagggcatagtcctcatgactacgactgtgggagtacactcacacaatgtcataattgtgggattaataccataactgtaggaatgggctcctgattaaaagatgagttcagccagatttcctctctgtcatatgtggtcgcctgcactctgttaggacacagcaagaacgccctcaccagatgccaagcggatgttagtactaccatgcccttggacttcccagcctccagaactgtaagccaaataaatttattttctttataaagtatcaatctgtggtattgttacagcagcagaaaatgaactaagacattcttccaataaaaactatcctgaaataagagatttttccgccgcagttagaaactgaaattccctgaagaatatttccttagaaatcggctttgttatcccactaagttttatatttraaaaatattcttaaatctaaaggtattaacagaaattcaacttaaaaattgctgaatatagcttccggttctaggtgcttcaggagccatggcttagggtgcagacatggccaagtccaagaaccacaccacacacaacattcccgaaaatggcacagaaatggtattaagaaactgcgatcaagccrggtgtggtggcttacgcccgtaatcccagcactttgggaggccaaggcgggtggatcacgaggtcaagagatcgagaccaacctggccaacatggtgaaaccccatctctactaaaaatataaaaattagcggggcatgatggcgcgcgtctgtagtcccagctactcgggaggctgyggcaggagaattgcttgaaatcagaaggcggaggctgcagtgagccgagatcgcaccactgcgctccagcctggcaacagagcgagactctgtctcaaaaaaagaaaagaaaagaaaagaaaagaaaagaaaagaaaagaaaagaaaagaaaagaaaccccgatcacaaagatatgactctctcaagggggtggaccccaaattcctgaggaacatgtgcattgccaagaagcaaaacaagaagggcctaaagaagatgcaggctttggcaggccatcagtccacgtggtgaggctatgaaggcccttgtaaaggaggttaagcccaagatcccaaagggtgtcagcagcaagctccatcgacttgcctacattgcccaccccaagcttgggaagcgtgcttgtgcccgcattgccaaggggcttgggttgtgccggccaaacgacaaggacaaggatcaaaccaaggcccaggctgcaannnnnnnnnnnnnnnnnnnntcccagcactttgggaggccaaggcgggtggatcacgaggtcaagagatcgagaccaacctggccaacatggtgaaaccccatctctactaaaaatataaaaattagcggggcatgatggcgcgcgtctgtagtcccagctactcgggaggctgcggcaggagaattgcttgaaatcagaaggcggaggctgcagtgagccgagatcgcaccactgcgctccagcctggcaacagagcgagactctgtctcaaaaaaagaaaagaaaagaaaagaggaggggaggggaggggaggggaggggaggggaggggaggggaggggaggggaggggaggggaggggaggggacgggaggggaggggaggggaggggaagggagcgcgaggggacgggaggggacgggagcggacggaaggtgaacggaacaaaagaaaagaaaacaaaagcaaagatcagacaaaagaaagagaaaagataccccgatcacaaagatatgactctctcaatggggtggaccccaaattcctgaggaacatgtgcattgccaagaagcaaaacaagaagggcctaaagaagatgcaggctttggcaggccatcagtccacgtggtgaggctatgaaggcccttgtaaaggaggttaagcccaagatcccaaagggtgtcagcagcaagctccatcgacttgcctacattgcccaccccaagcttgggaagcgtgcttgtgcccgcattgccaaggggcttgggttgtgccggccaaacgacaaggacaaggatcaaaccaaggcccaggctgcaactccagcttcagttccagctcaggttcgcaaaggtgctcaggctcctacaaaggcttcagagtaggtatctgcctgccaacgtgaggacacaaggactggtgcaacctgcccaggctgccgtctgcatggggctggggtcctcacctcctgtgctatttgtacaaataaacctgaggcaggaaagaaaaaagaaattgctaaatacaggcatcacaaactaacaaatgaggactttgaattagaagaaaagaaaaactgagtttctgccccatccctattattattaattagctatttcaacttgaataaagcacttcacctctctgagcttcaatttctcaagtacataaagttgttagacattggatgataagattcattctagcctggcgcagtggctcatgcctgtaatcccagcactttgagaggccaaagcaggtggatcacctgaggtcagaagttcaagaccagcctcaccaacatggtgaaactccacctctactaaaaatacaaaattagctgggcatggtggcacatgcctgttatcccagctactcgggagtctgaggcaggaggattgcttgaacccaggaggcagaggatgcagtgagccgagactgcgacattgcactccagcctgggcaacaagaacgaaactccatctcgaagaaaaaaaaaaaaagattaaytctaactcttagatttctataatattaaatttaacttgtaaagtttaattcttttctccaaattttgttacgttaagtatgcagtcacatttccaagttgagggtatgacacaatgaaacttcctcattcgaatctaacttaattttaccctgtggatttcttgtgatgtatttttttataaaaattagaaatatagggggccgggtgtggtggctcatactcataatcccagcactttgggaggccgaggcaggtggatcacgaggttaagagatcaaaaccatcccggccaacttggtgaaaccctgtctctactaaaaatacaaaaattagctgggcatggtggcaggcgcctgtaatcccagctactcaggaggctgaggcaggagaatcgctggaatccgggaggcagaggttgcagtgagccgagatggcgccactgcattccaacctggtgaaagaggaagattctgtctcaaagaaaaaaaaaaaattagaaacatggccaggtgcagtggctcatgccagcaaacccagcactttgggaggccagggcaggcagatcacttgaggtcaagagttcaaaaccagtctggccaacatggtgaaactccatctctaccaaaaaatacaaaaattgaccaggcatggtggagtgcaccacatagcagtcgttgttgctgtcgtcgtcccagctacttaggagactgaggcaggaggattgcttgaacccaggaggcggaggttgcagtgagccaatatcatgccactgcactccagcctgggagacagagcaagactctattgcaaaaaaaaaaaaaggagccccgcgcgctggctcacgcctgtaatcccagcactttgggaggccaaggcaggtggatcacgaggtcaggggtttgagaccatcctggctaacatggtgaaaccccatcttgaataaaaatacaaaaaattagccaggcatggtggcaggcgcctgcagtcccagctacttgggaggctgaggcaggagaatggcatgaaccagggaggcagagcttgcagtgagccgagatagtgccactgcactccagcctgggcaacagagcgagacttcatctcgaaagaaaaaaagaaaagaaaagaaaaaagaaaagaaacatactatcacattgtggattaagaaaagaaacaaaaaaaaatcagaaacaagttaaatcactaagctcaactatcaaaaatcagaaatctctccaaaaaaatcttaaaatctccatctatcaataaaaacttttttaattattaaatttgatatacctccaagatgggggatactatactgaattttaggtataataggaagcccagggtgaatttcaggcagacacagtcatgtgatctgatttacattgctcaagatccctattgttctgtggaaaataggcataacaaacaaaaatggaaactgggagaccaattaacaggtagctgaaaaagtctagaataatgacttggactaggataacagcaatggaaatgttaagaagtggtttgattcaaacaagtaaacaaaatggtacatacagacagtaaatgaaataggagaaaagaacagtaatgtgagagagaatgatttagttggggaggatactattattattatttttttttgagacggagtcttgctctgtcacccagcctggagtgcagtggctcgatctccgctcactgcaagctccgcctcccgggttcacgccattctcctgcctcagcctcccgagtagctgggactacaggtaccggccaccacgcttgactaatttttctgtatttttagtagagatggggtttcaccgtgttagccaggatggtctcgatctcctgacctcgtgatccgcccaccttggcctcccaaagtgctgggattacaggcgtgagaggcgtgagccaccgtgcccggcaaggatacaattttcaatagggtagtcagggaaaaaaaaattggagccacaacctggacataaaaaagagtgagccatgggaaaagtgaagaggagagtcttcccaagcttcgtcacaagtttaaaaataggtgagcctggccaggcacggggcctcacacctataatccccgcactttgggaggctgaggtgggaggatcacaaggtcaggaggctcactgcaacctccaccttccagctcaagcgatcctcccgcctcagcctcctgagtagctgggattataggcgagcaccaccatgcctggctaattttttatttttagtagagatgcggtttcaccatgttgcccatgctggtcttgaacttctgggcacaagagatccacccacctcagcttcccaaagtgctgggactacaggcatgagccaccgcacctggcccccactccattctttagcctccatattactctattaaaacgattatccactgcacaactactataagcacattaataaaggccttaattctattttgacaaaaggcaayggttgcaccatagcttaatatccactagtagtcattattcctgaagactagtagtcttcagcccttaggagcaacattctacacataagtgattcacaaccagggtatctaaccatgataattttctatgtctgcatatgtgtatcactgtatgtatgtgggagggggacaaggaaaggggatatagtcacagcaagagatccytattgaaagacattttgctgaccaagaagttttcaatctaactcagaatcccaacagtagtactgctttgtggagataattactgaactttgatctacttcattgttcattcacttgacatgaatcattaaataaactttgacatcaccccaattccaacatgacagataacagtaaagcttctgtgttaaatgttatggtatatacctgcatttaacatggcttaaggtagaaaaaagataaaactgagttgcaactgagaaaccctgaatagtgaataataaaaaataacgaaaaactgacatgactacttctggaattttcccccaaactccatcaatttctatgactaaaaaagtcttactttcacatgacatcaacatgtggattaaattcatagttttatataacagtgatagcaggagaaagaaccatgtagcagcaagcaaatatcagacttccctcttataaactgtgtgatttttttttttttttgagatggagtcttgctctgtctcccaggctggagtacagtggcacagtctccgctcattgcaacctccacctcccaggttcaagccgattctcctaactcagcctcccaagtagccaggattacaggtgcccgccaccacacccggctgatttttgtatttttagtagagacagggtttcaccatgttggccaggctggtctcgaactcctgacctcaggtgatccacccacctcagcctcccaaagtgctgggattacaggcatcagccacactgccaggccaactgtgtgatttttaaagtaagttacttgatctccctttgtctttagttttctcatctgtaaaacacagataatactgtgttttcagagttaaataaaattatataataaaatgcttagcatataatagcgattttaaaatacgtttccatccaattatttttccttttaaaaaatgttaacatcaccctgccttgaccattgttgaaacaagcatcagtatgttgctaccattaactgtgcacagtggcatgcatctgtactcccacctactctggaggctgaggcagaaggatcctttgagcctatcaggtcaaggctatactgcattacgattgtctctgcgaatagccattgtatcccagcctggacaacacagcaagacctcataaaaaacaaaacaaaacaaaaaaaaagccaccttagtctgggcgcagtggcttacatctataatcccagcactttgggaggccgaggtgggtggatcacttgaggtcagcaattcgagaccagcctggccaacgtggtgaaacactgtctctaccaaaaatacaaaaattagccacgcgtgctgacaggcacctgtaatcccagctacttgggaggatgagacaagagaatcacttgaacctgggaggcagaggttgcagtgagctgagatcatgccattgcactccagcctgggcaacagagtgagacaccgtctcaagaaaaaaaaaaaaaagccaacttattatcaataaggacatgaaaagatactcaatatcactagtcaacctactagaatggctataactggaaaaaaggaaaacaacaagtggtggcaagggtgtagaaaaagtggaaccctgatactttgctgctaagggaatgtaaaatggtacagccactttggaaaacactttagtgtttcttcaaaaaattaaatatggaattacaacaacccagcaattccactcctagatatatacccaaaagaactgaaaataggagtacactaatactcatagcagcattgtttataatagccaaaaggtgaaaacaaatgcagtatccatcaatgaattaatatacaaaatgtggtacattaaatatgattcagccataaaaatgatacattctacaacatgtatgaaccttgaaaacattacgctaagtgacataagtcagacacaaaaggctaaatattacacgattccaatcacacgaaagatctagaataggtaaattcacagagacaaaaagtagaggctgggcacaggggctcacgcctgtaatcccaacactttgggaggccaaggcaggtggatcaagaccatcctggccaacatggtgaaaccctgtctctattaaaaatacaaaaattagctgggcgtggtggtacatgcctgtagtcccagctactcgggaggctgaggcagaattgcttgaacctgggaggcagaggttgcagtgagctgagatcgtgccactacattccagcctccatctcaaaaaaaaaaaaaaaaaagtagattagtggttaccaggggctgggttgagaagagaatgaacagtcactgcttaacagctacagagtttgtttgggatggtaaaaaatacaaaaaatacaaaaatacaaaaattagctgggcatagtggtgcgtgcctgtaatcccagctactcaggaggatgaggcacgagaatcgcttgaacccaggaggaggaagttgcagtgagctgagatcgcgccactgcactccagcctgggcgacagagcgagactgcatttcaaaaaaaaaaaaggcattagaaagtcatcgtcttgatcgaaatcttcatattgtttcccattttcaacaaacttaattctagaaccttgcaggtttgaccattagcaaaaattagtagtttacataaatttaaacataggggaaactaggtgcagggtttaagggatttctctgtactacaattacaaattttctgtaaattggtaacttcatgatttttctataaactttctaaaaaagtttattaataaaaaagagacatgttattgaatctcaaaagtgttatgctaaatgaaagaagccagtctcaaaaggctatatacactgtgtgatgccaatttatatggcattttgggaaaggccaaactatagggataaaaaacaaatgagctgttgccagggagtgaggggtgggctgaagggatttacttcaaaagggcataattatggaaatttttggagtgatggaaatattctatatcttgtatcttaattgtggtggtggcagttacacaactgtcactgttttttgtaattcatctgttttagcagaactatacagaactttacacctaaaacagatgaattttactaagtgtaaattataccttaataagtatgacttttcaaaaagaatccttaacaatkgtagtatcatgtcatacatttcaatacacacagaattctagcctgataaatgtcattatgagatctagtcagatgaaactaggcgattcaagccgggcacggtggctcatgcctgtaatcccagcactttaggaggcagatgtgggcggatcacttcaggtcaggagttcaagaccagcctggccaacatggtgaaatcccgtctctactaaaaacccaaaaattagccagatgtggtggcagacgcctgtaatcccagctactcaggaagctgagacaggaaaaycgcttgaacctgtgaggcggaggttgcagtgagccaagatcgtgccactgcactccagcctgggttacagagcgatattctatctaaaaaataaaaataaaaaataagccttgaaaacccctccctaggcctggtgtggtggctcatgcctgtcatcccagcacttcaggaggccgaggcaggcagatcatgaggtcaaaagattgagaccatcctggccaacatggtgaaaccccatctctactaaaaatacaaaaattagccgggcgtggtgacgtgtgcctgtaatcccagctacttgagaagctgaggcaggagaatcacttgagcctgggaggcagaggttgcagtgagccaagatcgcaccactgcactacagcctggtgaaagaacgtgactccgtctcaaaaaaaaaaaaaaaaagaaaaaaaaaaagaaaagctttccctaaacctacgttttatgttcccttagctaagttttcccttaagttgttctctgtgcattgaaataacactatccttaacacctcatcatcttcttcttcctatagtaaggatttacaatctaaactctttactcaaaaatcttgtctaattaactcttatctattttccatttgactatattatcccttacatcttttctttcccgtaacaaatttttttaaataactgaagtactttttgctacatggattgtagttagttggtctctcctagttggaatataaacttcccaaaggcaggaagtaactatttctttatacactccaaaaatctggtttgtactatgtatctaaacactcaaatgccatatgaagagattcaatgaaaagaatactggggcccggggcggtggcccacacctgtaatcccagcactttgggaggcagaggcgggcagatcgccttaggtcaggagttcaagaccagcctggccaaaatggtgaaaccccatctctaccaaaaatacaaaaattatccgggcatggtggcatgcacctgtaatcccagctactcgggaggctgaggcaagagaatcacttgaacccaggaggcggaggttgcagtgagctgagattgcgccattgtactccagcctgggcgacaagagtgagacttcatctccagaaaaaaaaaaaaaaaagaaagaaggaagaaaagaaaagaatactggggtggacgtggtggcttatgcctgtaatctcagcgctttaggaggccaagktgggcccaggggttcaagaccagcctggacaatgtggcaaaacccctcctctacaaaaaacacaaaaattagccaggcgtgatggcacgtgcttgtagtcccagctacttgggtggctaaggtgggagaatcacccaagtgtgggaggcagaggttgcagtaggctgagatggagccactgcactccagcctgagcgacacagagagaacctccctcaaaaaaaaaaaagaacagaacactgggcctagcattgttaagacctgaattcaagcaatgcttctaatttattatgctaagtaagtcacaacatctttgggcctcagcaaaatcagaatacttgctgtatttacctcacaggtaataaggtcttggagggaaaacagtgttagctaagctataaccatcagtcaatccaagtgtaaagatgtattattgtcagtcatagctatcttgtctaaaattagccactagtgttttttaaccaagctcagtgcacagcaaattaagtgcaccaacattgcacatcagtcatatcaataatgtaactgttatactgtaatactaacagaaagccttatgtttaacagtaagcatgttaattatacactatcttaatgcagtctcaaggttaaaagataaatacttgttgctaagccaacaataactgccttcaaatctattaaaagaggatttataaatcccatttgtttttgtacccaaatagctaagtttaaaattttaagaaatccaagaattagtttaaaattgtataaattctccttttaactttctaaaatgtccatatgcactctcattgtgttttaaatccattacattagaaaaacagactgcaggccgagtgcagtggctcatgcctgtaatcccagcagtttgggaggccaagatgggaggatcgcttgaggccaggagttcaagaccagcctggtcaacatagtgagacaccatctctattagaaaaaaaaaagaagaaagaaaaaaagaaataacatactgtagaaaaaaaggatacaaagtatacataaatgaacaaaataaagataacaaaaatatgactccactacagatgcagagaaaacaaagacatttcttctcatcccaaccataatcctatgaacaacctgaaagatacttacagcaatatttgcaagtatgaccataattctcatcaaaagaacatcatatatgagtaccatcaaaatgattacaaattataaattaccagtgataattttctcattggagtcccttttcctttttcaagcagagaaccaagacagaatagcctctagatcttttttgtggtggtggttgttttttgagacagtgtctcactctgttacccaagctggagtgcagtggtgatcatagctcactgcagcctcaaactcctaggctcaagagatcctcctgctggcagggtacagtggctcacgcctgtaatcccagcactttgggaggccgaggcgggcagatcacaaggtcaggagattgagaccatcctggctaacacygtgaaaccctgtctctactaaaataatataaaaaattagctgggcgtggtggcgggcgcctgtagtcccagctactcgggaggctgaggcaggagactggtgtgaacctgggaggcggagcttgcagtgagcggagatcacgccactgcactccagccttggcgacagagcgagactccgtctcaaagaaaaaaaaaaaaaagagagatcctcctgcctcgatcctccaaagcactggactatgggcatgcattaatgcacccagcctctagatctatactgtccaatatggcagttactagttacatggagctattaagtgcctgaaatgtggctgttccaaattgagatgtaccaagtgtaacatacaccagatttaaaagatttaggggaaaaaaataatgtaaaatctcctacctatgtgactcccatttttggctcacatatttctcatgtacagcactgctttatatatgtagtcgaatcctgaataaggaaaatggataccagaagtattaagcagtttgctcaatatctcaccgcttgatagaagcagagcagggcctagaacctgatcacgtttatccatcctgcccttatgaatagaaggaattaatcatttaagactcaacttgagcatcctcttcctcctcaaaccccctcattccttttccatctcccagcccaggtgaccatatcctatttagcctgcccttataattatactgttataaaatgtacgttgtcttccaaatggatgagaaattcttgagagcaagcactgtctcattcatttttcttatccctgggaacctttgaagtaccaggcactctttcaggccctccggcactctcagagctttgagagggttaatttttagccctatgcaggtacaactactaaaatgaaatcacctacaatgtgatgcaccaccagaaacatccacatttatcatttgcctgtcttaaattatttttggaatatgctaaattaatacaatgcataggccaggcgcagtggctcacacctgtaatcccagtactttgggagggcgaggcgggcggatcacttgaggtcaggagttcaagaccagcttgaccaacatggtgaaaccccgtctctaccaaaatacaaaacttaggtgggtgtggtggtgtgcacctgtaatcycagctacttgggaggctgaggcaggaggattgcttgaacccagaaggcaaaagtttcagtgagctgagatcacgccactgcactccagcctgggtgacggagtgagactgtctcaaaaaagaaaaaaagagccgggcagggtagctcaagcctgtaatcccagcactttgggaggccgaggtgggcagatcacaaggccaagagctcaagaccatcctggccaaccaacatggtgaaaccccgtctctactaaaaatacaaaaattagctgggcatagcggcacacgcytgtagtcccagctcctcgggaggctgaggcaggagagtcacttgaacccggcaggtggaggttgcagtgagccaagatcgtgccactgcactccagcctcgtcaacagagtgagactccatctcaaaaaaaaaaaaaaaaaaaaaaaaaagaataattcatgttatcaaagaaaaacaagttacaaaaaatgctttgcactactgctgctctgatgctctataagaactctgagttctcaggaaattcaacactctttaggtataagttcacttattgaatgtgcttacttaaatgcaaaactttgtgctacagaaagagtcctggacatgggaattaatgcaagcaatcttcaattaattgaaaattttagaactattaattgcagaagaaacaaacttagtatacagttattcattacaaaaagttagtttctaaaattcctcaatgcaaacatgccagcttttgtattctataaaacagaaaaaactgccaggtgcagtggctcaagtctttaatcccagcactttgggaggccaagacgggcagatcacttgaggtcaggagttcgagactagcctggtcaacatagtgtaaaccagtctctattgaaaaaacacaaaaatgagccatgtgtggtggcgcgtgcctgtaattccagctactcaggaggctgaggcaggagaatcacttgaaccctggaggtggaggttgcagtgagctctcgtgccactgcactccagcctaggcgacagagcgagattcaaacagaaaaaaattgtaaaacctgtgatgaaaacattaaaacatgttatttgcaaagaaaactgcargaaacacgcatataaaacacaaatagcaagacaytttgataagaaaaaacctactttagaatgtattaattcagccaaaattacggaatttatggaagaaactccatatgtgctttctacctacgtaaaatcacttttgaactaaatctgagttaacaaataaaatctctctattcccagttacattgtttttcagtatgtaaccactgtcttgatactaaacaaatatcttatataaaaataaaatctgtatacttcaactagggtcctttcgtctaatttgctgctgtgaataagagcaccatcctgtccagataaggttagatcaaatttaaaaaaaaaaaaagcaccattctgctgggcatggtagaccagcctgggcgacacagtgagaccccatgtcaattaaaaaaaaaaaaaagagcaccaaccccaactatggcagagctgctaaaggagtctcttgtggagacttgaaccacaagccaaggaggcaaaggtacaaagtctctcctggaattagttcctggacttctgtgcagccttccctctttctactatgtcttcaccgttcccctacaaacagctttcttcttcttgcatctcttatatgctgtggcctttgatgctacaatagatttaaaaattttcccaacagagcttttctgcctgaaacccaccaggaaagatttcaggacattctttaataactaatcttgttcaaagaggcaggcctccttcgtttcacttaattcaaacccccactgttcaaaataagaatataattataacctcaatttctatcgggccagtataggaaaagaactacaacaggctctctcttccacgttatgtccagacttttttccttagtttctccttcctcatttccctcctcaatccctcctcccccaaaaaataattccacagctagagaatgtcgtttttaaagccagaaattcagtgaggaaaataagtatgtgcctttttcttcaattatttatgattcctccgtcactcaggaagagttaagctagtattttttaatctgaccgctctctcagaaggatgatgcgctaaatacacactgaaagaatagtgttcccaaagcaagtggattcgcggctaaaggcaacgcggtgggagtggggggtccgggaagaagaaaaagtatccttggcccccagagccagagatgggacaggaggtgaaagaaggggccgtcactgagaagtacaacacacacactcgccagaactaacaatctgccaagaaaataggaccggccactgcggctccagcccggtcccgcgggacaaggcgggggaggggggccggcggccggggggsctgccctccttctgtgggacaaaactaactccctggcgcacctccgctcccgagaagaggggcctggtggggacgcgggctcctcgcacctccagcgcassacttgctcacggcctgggtggaagcaaggcccggagggaggggggagtcgggctgggcaacgccaagagcacgggatggagggtcagacgcgggcacccaaggcactgggggccgcgacaagagacccttccagcccgggaaccccggggcccctctccacccttgcagagcaggaccccgaatatcgtccccagccgcaccgaccgctcctcacctcaagctgcctgagcctccgcctctaccacaacctgagccgccgaagccgccacagtccgagccatttttcccctcagctggctcagccgccgccgaaagcttcggccgactccacagccagccaagcgcagcacgtcacttccggacagggaagcaccgccttccccgcccggacttgttgcgaattggctggcgcggacggcctacctgagctggcgggcggggcttggacgctgccggggtggcgtgagcaagggagctggggcgctggggcgcacgggcccgggggaccagggtctggctctctcccgaggaatgctgagcaggctctggacgcctctccgtgcacaccccagacctggggaggggagctctccggacaccccagctggccgcccctcgggccctgagtccgaagacccgctaaacagggcccgggcactgaagtaccctattgttctcatcccctctcccgggaccccgcaccctcctccatctaggctgaggttcccagatttgtgtcttggcccctggcggcgccgagattactttgtgattggaagactgaaaggaacaggcaagacttaaactcgtccactccaaccagtatttaccgaggcctcacggtgggtcaggtggtatacggtgggtaattagtagcctatcacgtggtttctgtaaaatgcttgatagcacgtaaaacgctttcaggtcggcgtctcgtttcatcctcacaacagccaggtaaggaagataaccccctgataataactcacagccagacggctctttctacattacaaagtattttcacatgcaacctccataataatatattcttattgagaatttaatgagattatgcttgtaaagcgtttggtcctcacgtgttagatctaaaaattacgtaaccatgggaagatataggaaaattatccccatttacagatggggcttctggggcacaaagatgttaaggggagaggaacgattccatagcgttttacaacaagattgtcttttaagcagtaggagaagggggtccacaccatccagacgttcacaatctgatgtggcagactgatttaggctgcatttctcagcctaaactaaaaattatcagcctatatgatatacgcataattagaaggctctaagagaagttgaactttcagcaaataactggaaagaaagaaattggcctgatttggcagggacgggggttggcgaaagggggctagggcaatggggaatgtggagtggatgaatccctcatagcgctgtaataaacatgcctgcacctccgcagggatggtaaaattggatggagtttctattctatggggaattctagaaacaaatgtgattatttcttacggctgtagctactggctgttgtacaccccccccccttccaactcctatctttcccccaaccccgcccctcctctatgcacacacacttccaggcaggctacacactctagaagaatgtcccttagaaatcaacttagttccgcagcattgttctgctttatcttctgatcaaaggaggaatttctaaaattggcagcagctctttcacaagattaaaaagggtggggaaagtgatttatctcagggtagcttcctagcttctgctccagatctgagtgtgccttcaggaaagaaggaagaggccttgggagaacactgagtcttcaggaaagagtaactatttgtctgtcttttttttttcttttgttttctttctttctttctttctttctttctttttctttctttctttttctttctctttctttattcctctctccctctctctctttcttcctttctttttttttgatccagcgagacagactggattttttcttctaatttttttttttaatgaaacgtatttcccctgagtctcagcagcagagggccctggtccttgagtcacttccttgttgcagttctgaattcattattttattatagcttttgaatgactgatacatggtaggctctgatcaaccaaaaggttcccaataaggtgaagagaaagaaaaggagtttgatagttttccagattccaaaaaaattagctttcacaagttgccaggtgtcaagaatctgaacaggtaaccctctctcagcatatctcatctgtcagcaatggcttgtgaagatgcatgtgtaaacagtaggaacacagacttctgggagacagtacaaactggtgctgctgtcatttggaaccaactagaacatagctggcaaccatttctcctgtttcctttcttccactggcttcactttttttttttttttttttgagacagagtctcatacttgttgcccaggctggagtgcaatggtgtgctctcggctcaccacaacctccgcctctcttggttcaagggattcttctgcctcagcctcctgagtagctgggattacagtcatgtgccaccacacccagctaatttttgtatttttagtagagacagagtttctccgtgttggtcaggctggtctcgaactcccgacctcaagtgatctgcctgcctaggcctcccaaagtgctgggattacaggcagaggccttacatttttcactgtttcaatcctaacttcccacagacaacttcccagtaccacaaatattccccagcttcttccagtaccacatgagaaatgggcaatcttttttttttaaccacagataaaatatagtggataacaatgattagcatttgctaaggccaagccctgttcttagtgttttatgagtattatctcattgacttcctccaacaaccttcctgaaagatataattattatatcctaattttatagctgagaaatttgaggaacagagaggagagtaacttgcccaatgtcacacagctactaaagagcagagctgggatccaaaactgggtctgactgcacaacccatgcttttttaacctcacagttccgccagcgggccaagattttaacatctacgaaatgctgttaagaagtataatagttaggtttttatttcctttctcaatgttatatccccacctgagtagaaggactctgctgggtactataccaaactacctacctatttatttatttatttatgtttttttgagacagactctcactctgttgcctaggctagagtgcagtggcgcaatctctgctcactacaacctccatctcctgggttcaaacctccagagtagctgggattacaggtgcacaccaccacacctggctaattttttgcacttttagtagagacagagtttcaccatattgaccaggctggtctggaactcttggcctcaagcgatcctcccatctcaacttcccaaagtgctgggattacaggcatgagccaccgggcccaattatttaatcctgattatgtaagcagtttgaaggaaaactacagtgttctttgatttagaatagaaggcaggaaggccttccctgaaaaagtgacactgagctgagatccaaaggataaatagaaattgaggatgggggaaagcatacccagcagagggaacagtgtgtgcaaaggctctgagaaaggagcatggctcagctgaggaactgagaggccagtgttgttgttatactgagaagaagaaggaagtatctttattcaaaaaaaaatttttttctagacacggggtgtcactatgtagcccaggctagtcccaaactcctggcctcaagcaatcctcccacctagcctcccaaagtgctaggattataggtgtaagccactgtgcctggccagaagcatgttaggtactatagtgagacaggaagataatgccaggcctgggaggctgtattaagaatttaggtctttatcttaagaatgaagagaaagattttaagccttcaagtgatcagagttgcatttttgaaagatttcataaagctaggaggagaaagaattagaagggtctaggggatttgggtagcccagtctggagtttattgcaactgtgtagggaagtgatgatggtggcttgaaccttggataagacacaataagtgtgtggctcacgcctgtaatcctaacactttgggaggccgaagcgggtggatcacctgaggtcaggagttcaagaccagcctggccaacatggtgaaaccccatctctactaaaaatacaaaattagccagtcatggtggtgcgtgcctgtaatcccagcaacttaggagactgaggcaggagaatcacttgaacccaggaggtggaagttgcagtgagccaagatcgtgccattgcactccagcctaggcaaaaagagcgaaactccatctaaaaaaaaaaaagacacaataaatgtgaagttgactgagctagggttcctggccttggagacagtccagtaggggagagcaacttagaaataaaaatagtatattgtgctatgagcactactagaggtaaacccaaataactctggaagctcggagaaaagatagagggaagatggaaaatgtattagttatctattgctgcatatcaaattaccccagcatttagcagcttaaagtaaaaatgataaacatttactagatcacagtttctgtgggacaggcatgttggcatggcataggtgagtgtttctgatttaagatctcccacaagattgcagtcaagctgtcagctgccaatcccatctgagggcttgaatggggggagatccacttccaagttcactcatgtggttgttagaaggccttgatctctccctacataggcagccctctccccagggcttcctcacaacatggccactgacgttccgcaacgtgagtgaccaagaaagagagcaagagaaccaagagtatgtgagagaaagcacccatggaaagaagccacagtctttttgtaacctaatctcagaaatggtcttatcacttctgccatactctatttattagaagtgagtcaataaattcagtccacattcaagaaaagggaaatacacaaaggtgatgaatacacaaaggtgtgaatagcaggaggtggggatcattggggttcattttagtggctgcctaccacagtaggttccacagaggaggcagtacatgagtagttgtattaaagtttttcaggagcatttcaggaggaagggctttccaggcaaagcaaaggacgtgtgcaaagatacagaggcatggaagaacttcatgtgttcaggatacgctgttggccattctgtgaccaggcgagaggggcttggggagtataattgattcagctgagcaaatttgaagaggaggtaaagtatcattggttgaaagatgatacatttacttctttgaattctaccagcatacctgcatctttgtgaaaaatatatacatacgaatatattcattaaagcatcatctttatattagtttgctagggctgccataacagaggaccacaaactgggtggcttaaacaacaaatttattgtctcagaatgctggaggctagaagtctgagatcaaaatgccagcaggattggttctttctttttttatttttcacacagggtctcactctgccacccaggctggagtgcagtggcacgatctcggctccctgcaacctccgtctcctgggttcaagcgattctcctacctcagcctcccgagtagctgggactacatgcgcgccaccatgcccagctaatttttatatttttagtagagttgaggtctaaccatgttggctaggctggtctcaaattcctgaccttaaatgatccgcccaccttggcctcccaaagtgctgggattacctgtgtgagccactgcgcctggcctaagattggttctttcggagcacccaacttctgagggttgccagggaaataatttgttccaggtctctctccttgacatgtagatggtcattgtctcctgtcttcatattgtcttccctccttaaatgtctctatccaaatttctgcttctttaaggagaccagtcatattggattagggcccccactaatgatgtcattttatcttaattactttgtaaagaccctgcctctaaatgaggtcacattctgagatattaagggttagaaattaatcatatgagtttggggggagggtacacaattccacccatatgttccatgaaagggctatatatgcaaagcaacctgcagacacaaaaggaaccaagaaacc

SEQ ID NO: 97542 - DNA, 13099 bp, Homo sapiens
aagatggaggaagagcaaagtcacgtcttacatggtggcaggcaagagggcacgtgcaggggaactacccttcataaaaccatcagatcttgtgagacttattcactaccatgagagcagggcagaaaaaacccactgccatgattcagttacctaccactgggtccctcccatgacacgtggggattattacaattcaagatgagatttgggtggggacacagagccaaaccatatcaggtggtatatttagtgttactcttcttccacatcagaacttgacagatgattcaagaacattccaacacaatcctgagcctcacttgcttcatctgtaaaatagggataatgccttcttcacagggctgttgtgaggattaaaggattctgtgaggtaaaggaagtctgtgtgaagtcccagcacagtatctagcatagagggcactgtagaatgagaagggtggaaatgagtccactgtagccttatgcggaaatcactctgcggcaggaccgcactttatcggaacctgctttcatgtggtttgcccacaggcagttttaatcctgtgattattatggggtggggggaagtgaacttctggttggaaatgttactgatttacttactcataagcacaatcagtttaaccttatgaaggtaattaaggcttctgctggggactcctttgcttctgtaaactgcaggtggtaacaccgcccagtcagcattgatggagatgagggaaaggtggccgggccttccagggtggttctccccacaggagcaggactgatgctaacaagttttcaggcatctgagggcagcaggcacctggaaatccagacttctaagacccctgtggccattttcagaaatgaagcaggtcccccaggcatgaaaggtacctggagattcaagagtatgactgcccctgggcctctgtggcttgaaaatattatcagagcaaaacttgtcattccttattcagagctaaagtgctcactgcacatactcctgggagaagtaacaggacagtcagctctgacgtgactgacacaggcagaagtgatttgtggaagcaggcttggacgggggagcaattctggatatttcatggggaaaacaaagagctggaagaaggaggtagtgcagaggccctcagaaggggaaggacctgggacccacacaaagacaggctttgcttctttcatgttttacttggggccaaacttactttctcctgtgtagctgattctctggtttgtgtgcagaaacactgccaatgctgccatttaaataaggatttcaggaagtaaaaggaaaaaaaaatactggagtgagaattgatggcgcagagtatttaatgatattaagatgcagagtggcaatttaagacatttatgctgcctcccgaggagttttgtaggtatacaggctaattttcagaagggttgctgggggtgggggaggcatcatttgcctacatatggtgaggtataatcactagtaccttggcatttattagaattttgaagaacgaggtaaaaaaaaaatcagtccactttattgaaatcttttgcagaaatatgacacaaccattttcaaatagtttttactaccaccaaaataatattcgtgaactaaaagctaatgtaaggaatcaaaattcttacagtggttattttggctaggagaaatatgattgtttacctcttttcaattttctgtatattttttaattttaaagaaaatgtgagtcctatgtagtgatgggatcgcaaatttgaaatgtgtgtgtgtgtgtgtgtgtgtgtgtgtgtttttctctttctgcaacagggttacatgatggaaaatcgaatctcaggcttaaagtgtgacacagatgtgtttgccacttttgaaggtgacgatgttgttatgcttcaggtaagattcgggaaatgttttcaagatcaagagttatccagaagtctgaagtgtttcatatattttatctttatctgattgccttctttaattggcaggtgctttcctgttaggcacttgatatttgttgtagctgaacaggggattacgttatttctctcttagctgatctttgactttgaattttatctttttggtttaagaaaaccacttatacatagtgagtcagattcttctactaggaagggtattttgaaagagtatgtaaggccccagaagatgaacaagcaaaaggcatgaaaacccagtttacaaaagaacggcaatggatcagcctcctaatgatcaaggaaatgcatattagactattcggcaatactcttttcctttctcaatccaatcggctcatgttttcaagtatgttgaagtccccatgttggcacaggggggtccctttgcatgttgctgttgaactgtgtataattctacttctgggctgtattttaagataacagcctgaaatacaggaaactttaaggcacaaacattttcaccagtacattatttattgtagcaataatgttggagtccaaattttcaacaataggaaaattattatacagtataaatcatgctctggccactcagtggggaattatatggcttttaaaatagtgctttcagagagtgctatttataacagaaatttaaaacttatgatacggtaagtaaaaatgatacaaaaacatacagttatgcattgcttaacaacaggaacatattctgagacatttgtcattaggctgtttcatcgttgtgtcaacatcatagagtgcactcacacaaaccaagatggcacagcctactccgcacctaggctatgtggtggagcctattgctcctacgctacacacctgtacagcatgatactgtactgaataccataggctactgcaacataatttttgtttgtttattgatacatagtatttgtacatatataagggatacatgtgatgttttgttacatgccttgagtgtataatgatcaagccagagtttttagggtgtccatcacctcaagtatttatcatttctatgtgttgggaacatttcaagtcctctcttttgtgtattttgcaatatgcaatatattgttgttaactatagtcactctactctgctatcgaacattataacttattccttctgcctgactgtatatttgtacggattaatcaacttctgttcattccccctacccgcccccacacctttcccagcctctggtatctatcattctacgctttactgctatgagatcaacttttttagctcccatatatgagtaagaacatgccatatttgtgtttctgtgcctgacttatttcacttaacataatgacctccagttccattcatgtagctgcaaatgaaatgatttcattttttatggccaaatagtattccattatgtgtatataccatattttctttctccatttctttgtgtgatgggtatttaggttgattccacatctttgctattgtgactagtgctgcaataaacatgtgggtgcaggtgtacccttgatatattgatttatttttcctttggataaatacccactagtgggattgctggatcgtagggtagttctatttttagtttctgtttgtttgtttgtttttgttttttggaaacctccatactgttttttatagtggctgtactaatttaccttcccaccaacagtgcctaaaacaatttttatgtttaagtatttgcatatggaagcacatcaaagcatagataaggtgatgtgttgtgctatgacatcatgatggcaaagatatcgctaggtgatgggaaatttttcgctgggcacttgactgtataaagaatgtgatcatgatttggagttctcaaaaaaggacaatagggactcctggcctgctaagatagaatagccccattccttacagattttcctcttcacagttaaactccctggacaaaatacaacagacaagcatgggaagagaagaccctggaagggggaaggaagaaggaggctgcctagggactttgggacttgaacaatgaaacagcaataaggtctctggatttccttattgtctcccatatatcccagacaggatacacatcccctgtatctctaataggcacacacaaaatatgctccaggagacacctaatcccctagccaagggaccaggaagatggtggcctgatgaccgaaaatctttttggtgatacccatgctacaccagccagacacaacaaaaaaacataaccattctcccgaccgccgttgacaatttctgcctcgctgggagctgatcttccactggatccttgacctaaggaagcaggcaaaagcaggggtagtactcccatcccccacccagtggccttagtggggctgagcagggagctcatctttcattcctctcctggtggaaacaggtggtgctcagattccccaccagagtagtgtcagcaaggcccggtggcgaatccacccccactcagcagcaacaagaaccaatgaagtggcttaaggtggagcccatcaccagtgtgcttctgctacccaccctggggccagcaggggtccagcagggagctgagtctctactcccacctgatgtcgattagactaaccaggaggtgtgagcagggactagtcactactctgtgttctccccacccttggtgtctgtgggcccagtgaggagctgaagctctatacccacaagatgacaagaaactggatcaagtagcgtgcagcagagccagtggacactttgacctcttccctccctgccccctaaacccctaaaggggatttagtggggagctgagcctcttgcctcacctgacatcaacagaatgaaataggatgaagtgggggagttaatatccttcttcctcctcccctatttttagcaggagtcagtaagcagtggagccttcacctcatccagcatcaatgaggcacaatgaggtggtgggaaaagggggtagttggccctgtgcttccccactcccttccctgacgtcagcagggcctagagggaacagaacttgcccccaacctgtctccaacaaggcaatgtgcatcagcactccttttcctccagcatggtgtcgatgggacctagcaggaaagtgaacatatacccatcaggaccttttgctacccttcaagattaaatgtcatctcataatatcatatctaaatacactgggtacaacaaaacatcacattataaaggaaccaagaaaattgcaacttaaatgagaaagtcaatagatgcggataccaagaagaatccaatgttggaattatctgataaggattttaaagtacccactataaaagtgtttcaaaggtgcataaaagtactacaaatgctcttaaaacaaattttaaaaatagaaaaaatataagcaaataaaaggggaccaaattcaaatgatagaattaaaaatataatgactgaattaacaaacttgcagtctgaccccaataatagagtagatatgatagagggtggaatcagtgaatttgaggccagatcaacagaatttacccaatctgaacaacagagaagacaaaaatgaacagaatcacacagatcagtggagcaataacaaaagagctagcatttgtattatcagagtctcagaaggagagaagtgtgttgctcaatatacataaaggaaatacttcagacaattaaaaagtgaggagggcaaagagacctaaatggaggtaaggtttccacacttcactcaaagtggtaaaacattaatatcactagactgtgatgagatatattacaaatttttacatgtaaataataagactatataatgtgatactgtgaggttctgggggaaaacctgaaagaaatgaaaggagaaatagacaaatcaacaattatagttggatatttcaacacatttatttcaatggttaacacaactactagacagcaaatcagaaaggatatgaaagaactgaaaaacaggcactgctgggcctgcaggtctctgttgagccacggatgtgggtctctgttttgcaggatggggtttgttaaagttgttaagaataaggcctactttaagagataccaagtraaatttagaagacgacaagagggtaaaactggttactatgctcggaaatacttggagatacaggataaaaataaatacaacacacccaaatayaggatagtagttcatctaaccaacagagatatcattagtcagattgcttatgcccgtatagagggggatatgatagtctgcgcagcatacgcacacgaactgccaaaatatggtgtgaaggttggcctgacaaattatgctgcagagtattgtactggcctgctgctggcccgcaggcttctcrataggtttggcacagacaacatctatgaagrccaagtgtaggtgactggcaatgaatacaatgtggaaarcattgatggtcagccaagtgcctttacctgctatttggatgcaggccttgccagaactaccactggcaataaattttttggctccctgaagggagctgtggctggaggctcatctgtctctcatagtaccagatgattccctggttatgattctgaaagcaaggaatttaatgcagaagtacaccagaagcacatcacgggccagaatgttgcagattacctgtgctacttaatggaagaagatgaagatgcttacaagaaacagttctctcaatacacaaagaacagcgtaactccagacatgacggaggagatgtataagaaagctcatgctgcttatacatcaagtctatgaaaagaagcccaagaaagaagttaaaaagaagaggtggaactgtcccaaaatgtccattgcccagaagaaagatcagatagctcaaaagaaggcaagcttcctcagagctcaggagcgggctgctgagagctacaccaaacaattttctatgacgatttttcagataaagacaataaacttatggacagcaaaaaaaaaaaaaaagaactgaaaaacataaccaggcaacaggatttatttaacatgtatggaacactctattcaacaggaacagcatacatgtttttcaagcacttgtggaattttcttcaagatggactgtatcctgggccattaaaataaaactcagcaaatttaaaggaattaaaaaggtacagaatatgttttctcatcataatagaatgaaatgagaaatcaagagcagaaagaaaagaagaatatctctaaatacttggaaattaagcaacatgcttcaaataatccataggttatataggaaattttaatggaactttaaaaatacatagaaatgagtgagcatgaacacacaacacatcaaaacgtatgggaggcagataaaatagtgctgaaaggaaaattcatagtactaaatgcttatttaagaaaagaggaaaggtctcaactcattcacctaaatccctacctcaagaaaattgaaagagaagagcaaaataagtagaaaccaaacataagaaaggaaataataaagttaagattatacattaataaaattgaagccaggagaacaatagagaaaatccatgaaacaaaaggctggctctgaaaagaatcaacaaagttgataacactcaagcaagattgacaaagttaaaaattaagaaggctcaaatcaccaatatcaggaatgaaacagaatatgtatctagagatcatgaagtcattaaaaaataatgaggttgccagtcgtggtggctcacacctctaatcccagcactttgggaggccgaggtgggcagcttacctgaggtcaggagttcaagaccagcctgggcaacatggtaaaaccccatctctactaaaaatacaaaaattagccgggtgtgatggtgcacatctgtaatcccagcttctcgggaagctgaggcaggagaatcacttgagcttggggtgcagaggctgcagtgagccaagattgtgccactgcattccagcctgggcgacagagtgagactttgtctcaaaaaaaaagaaaaaaaaaagaatgctagaaaatagctttacattgataaatttgacaacttagaggaaatggaccagttcctcaaaaactggaaattatctgactcaacaaagttgaaacagacaaactgaatagttctatactcttaaagaaactgaacccttaataataatataaaagctcctgaaaaataaatctcctggccttgaagccttggagaattctatttaccatttaaagaagaatgttactctctcctcttctattttcagaaaattctatttccagaaaatagaagaggagaggtactccttgattattttagaaggctagtattactctgatactaaaagtagacaaagatagaagaaaaaaagaataaagctacatactagtatcactcatgaatgtagatacagaaatcttcaacaaaatattaacaaattgaatctggtaatgcacaaaatgaattacacatggcaacctagtggaatttatctctgatatgcaagtatgcttcaacattcaaaagtcaatcaaatgcaatccaccacatcaacagactaaaggcgaaaaagtcacatgatcatgtcagtttacacagaaaaagcatttgacaaagtccaacaaccattcatgataaaaactcagcaaactaggaaagaagggaatttcctcaaattgaaagagtctacaaaaattatagctaacatcatgcttaatcgtggaacattgaatgcttttcccccaagattaggaaaaaggcaagaatgtccactgttattcaactagtgctaaaagttttagcagtgcaataaggcaataaaaagaaattaaaacatagagattagaagggaagaaataaaaactgtagctttctgacaaagttgcaaaagcaatccagtggaggaaagatggccttttaagcaaatagtgctggagtaattggacatccacaggcaataaactgaacctcaacctaactctcacacattataaagaaatctaactcaaaatgaattacttaaatataaaatgtaaaattataaagcttttagaaaaaagttaggagaaaatccttgagacctagggacagggaagaagttcttagggttgacatcaaaagcacatttcataaaaggaaaaattggtaagctgcatttcatgaaaaataaaattttttattctatgaaagaccctgtgaagaggatgaaaagataagctacagacagggagaatatattttcaaatgacaccttcaacaaaggacttgagtctagaatatataaagacctctcaaaactcaacagtgacaaacaaacaatccaattagaaagtggtcaaaaaaacatcaacagacatttcactgaagaggatatacccatggcaaataagcacatgaaaataggtacatcattgtagccattatggaaatgcaaatcaaaactcctagaagatattactacatttctattagaatggctaaaatgaatattaataacacgaaaattgaataagctttgtggcttgcaccaacactattttcctggttgggatgccagtaaatgttttgtaaagtgttaccgctgggagaaaatggataaagcctgcataggatctctctgaattatttcttgtgcttcattgctacagttacattcatgcaaatgctacatttaaagaattttgtaaaaaggtataaaacaaaaacctatgcatgaataagtttagaaagaaatagagcaaaatattgatatctcaatgttgtaaacggtcttgatgattaaaaaagaacattctttccattgttatatatcttaaaaagtgtattagaatgaggacagtggcatgtagtggcagctccccattccctcttagcttttagcaatatctataggagagtagattatttgggggagaattgagacttataatttaacttgggctagattaaaagttgtctgttttttgtctccctcctgcttaaatgtcgtatcaaaaaatcttcttaagaatattcagtaattcagacattacattaattcacattctccatctcagcttgtgatccaagtgaggttttttgacaactttctctctgggagtatattttaaacataagcatgtgattcaacagcacttgaccctgaagttgtgatttagtgctttaattggaagctctagcttgtaagcattatggaaaggctgtttagtgtgttatgggaatgatcacaatttctaaatgtgaactcaagtggaagtgtggggaaaaacagggactccttgttgtttatcacatacgtgggagcatggaaaatgaaatgaggaactctgaaccatgaacagcaggaacgtgcagggatgctgggctgcagggaggctgagcacctggttgggagaatgaacatcagcacagaaagcagggcaccctgtgcactaagaacacacacaagtgctccaaggcctaggctggggaaggaaccagggcatggtccagttttacagtctgctaagaaagagatcaccacagaccttaagtccagactgtaagccttgttttgaccaatttgctagacagatatcttccagacacatactggaaaaatgctacctcaagtgatgatccagccggaaacacttcttgtataagtggggtgtgtcaacggtccccagggtcacccccaggattgatgattcactaggagaactcacaggacttgacatatacttatactcatggctatgatttattacagcaaaatcatatgtaaaaaatacatatatacacacacatgcatctctgtctctctcacacgcacatgcacacacacacacgtgcacacacacacacacacacacacacaaaattcaaggtcagcaaaggaaaaagacacatgggctgaagtccagaggaaaccagaagcaagtttccaagagtcctctctcaatggagtcatgcaggacatgcttaattcctccaacaacaaattgtgagaatacctgtgaaatgtttaccagggaagctcagcagagactccgtgtccatggtttttattgggggctggtcatgtagacaccctctgcctagcacatatcaatgcagactttcagaagaaagcacatgttcagcataaaccacattatgtgctcaattggtttaggcacagtgagccacccttatcagtcaaggaatggtgggaatcttcccaaacccaagttcccagatgaaatctcaggctagcagtctcaggcctttcatgttaactttattttgcacatggtgccataagataaagcatatgcccatcctgattggcattagtgctcttccctcttcaaggtcaaatcactagaataaataaaaagcaggaataagtaaatgacaatgtcaatgacactgacagtgggagagaagccatcagatgactgagtatttttattactttctggagaatgcaaagcatggaatgaaattgacaggccaacctgctacagcctgaatgtttatgtctttccatgattaatgtgtcaaaacctaccaagatgatggtataggaggtggggcctttgagaggtgattaggtcacgatcacgctgccctcatgggtggggttagtgccttatcaaagagtgcttccttgcctcttacaccatatgcagactcagcaagaaagtgccatctgtgaacaaggaagtgagccctcagcagacactgaatctaccactactttgatcttggacttcccagactccagaactgtgagaaatcaatttctgttgtttataagccactcagtttatggtattttgttatagcagcctgagctaagacacaagttgagtggacacagctggaggtggggttgtttcttctggatgaccgtggagagacactgggtcacaaggattgagagcaggagagggattcaggcagagagtcatgcatttccataaaggcctgtttaatagcaggacacccagttccccacatcagagcgactacagtaatagcatctgccacagctccagaaaccttctctgggaagaaaacttaacagcctggccaggcagtgcttggtcccttggggtgagagaccgagacccctgaatacatagcttagtgctggggagggtcagcctgcttgtttgccatcagtcagcaccccctcataggaagcctgccaggtgactgccctgcgttggacccggagttttctgctgctgggcatccaggggtgatgcctccacagtgatgggaggttgtgctggctgcctgtactggtccactcagccttccacttgtgtgttggaatctccccattttggggaggccacccttctgtgggctggatcctgctttgattctccttattgaagtagagatggaaatttcaggagacacaggggagaaactggccagtgagtttcacaatattctgatattacctacagtgctttcagctttctaccagaaggtaaaactttcaagatcctgaaggtgctaggttgctgtcccatgattgaggggatgtgctgtggcatttctgcaggctttacatgtttccctttaagcaagatggaaagttttctgacccttttattatttgccagggcagaggttgtagccccttggtgaaatttaattataccctccaccaaatccaattactacccacacccatgaaaccccattataactttcttttgcttcattagagatacactaagacaggtcccttcctaatccattatggcagattccctaaagaatgttagttagagattttgcatatattgttcattacttcgcagtgcagatatgcaaaaatgcagatgacctgccattaacttgcttaaagaccaggaaggggtgtcctcttcctgactgatctggctggcttctgttgcagagacctctgtcttggaactgcccatggcaagatatgtgcctgctgacgggaagcctggtagtaataccatcaagccttatgtccagaagagcacaaaatgtttctccaatcagaagggagcattgggttgttttggggctggactgtggcaggtggccaag

SEQ ID NO: 97543 - DNA, 12458 bp, Homo sapiens
agggaagacatagattttaacaatgtgtaagaaaacaggaacttgggaggaggggcgaggaagcaataatggtgaatgaggggtctggcatctggtagggtgatctggtttcagttctttgatactttttgtgccaaaagaacagtctgtgggactattgggtttgtttcaatttcctcatagataaaatttgaggcctgaggaagagaagagtaaaccaaatgatctttaagacatttctagttctcacattctgaagttttataatgttgagtggctgctacatactgtattaatattagtcttgttggagtcacaaaaagggaatagaaaatgctttaagtgctaatcagataggctctaacttgtgaatgtagcttgcgtaaattaatttgtttatttgggtgaagctaattaatgaagacattaggtaaacatgatgtttgccctgatctctctgacttaccattttgtttttcaacttgaatagtgtatttggaagaagagcattcttcaggtcacttaaagttagaaaaatgctgcactctcaggctgagttcacaaaatgaaataacctttcctgaagtgaatatgagaatgtggttccccttcccccttcattgcccacgtttgtctgtcatgtcattcttgtggtcaagagattttagaaaaattcttactagagaatggtaatagtactgtgaggtggagcatggtgttagaattctaggtgtaagtgaatcatgtgctattgaattttctttgcgttttaaataggtcactgtagtatcgtatttgaattctttgtttgaatcatgttgaaagtatgtaataattactgcacagagatattgtgggcactgaaaaattctttggtactaccaaaaccccctgtggtcatgtatgtgcttgttctttgaagttacaaatgaacaatgactacatattgatgataagtataaatacaggttgaaccaatgtttttagatctggacaaaagttactgaagtaggagaaaggacggatttttattaattccatatggaagaaattcaaaaccatataccagggggagataggattgtctcaccacttaacttaaggatcttcctgtatgtagcccttccatcacacacaaattgtactaagtgttttcatagtggatatttgggcaattcagagactctcactacatgttgtaacaatggtaatgtatttaattaattttagaagatacattagaatatagaattagcagtaacactccagcaatacctgaaataaaatgtgttaaaacagacagaatatagaaattaaatagacataattacaataataaaaagatatacctctatcatatttctattcacatttctattctagtcaattaaaagagtaggagaattttttatctttctttattaatttttttgagacagggcctcactctattgcccaggctggagtgcactggcgcagtcacggctcactgcagccttgacctccttggctcaggtgattctcccacatcagcctcctgagttgctgcgattgcaggtgcacaccaccatgcctggctaattttttgcattttttgtagagatggagttttgccatgttgcccaggctgatcttgaactcctgtgctcaagcagttccccacctcagcctcccaaagtgctgggattacaggagtcagccaccgtgcctggctaatatattttcttagtgttaaagaaaagaatgttaaggagttactcagaaagtaacttgaacttttggtgtgggctgttttgatgattgttgggaagattttctttttttcttcattcctggggccatggtggctgatcatccaagcttggattaaactctgttccttgtacttttccttctcattttaggttttggagtcagtatacttatattaccaagaaaataaggttcctccaacttgtaagaaatattttctagtttcagagaattatgaattggtaaagattgaaaaagatggtatggatgtgtttgaattattcacttttatggtgtatagtcttcactttccatgttgtgttttgttggactcaaagatgcttgagcagttagagagattctccctggctcccccagccacccctgcagccccactggggaaaaaaggaaacaaaggaggaaaaccgtgttgaacacatattttttcttaagcacctatactggattaatgtattactgtgaaagttgtttaattggagtttttttaaaatagatttttatttcttagggcagttttaggtttacagagaaattgtaatttcttacagagagttcccaaatatctcccccttttatcttacaatctgtagtaattgcttattatttccaggagtttgttggtcagtactttgggttttttttttttttttttttttacatagatgatcatgtcatctgcaaatagagagttttatttctttcttctcaatttgtgtaccttttatgtccttttcttgttttactgcattagctaggatgtccagtatgatgttgaataggagtggtaagaagggaagtccttgccttgttcctgatcctacggggaaaggatctggtttcttaccattaggtatggtgtttgctgtaagttttttgtaaattttatttatcaagtggaggaaatcctcctctatttctagtttgctgagaacatgtaattattaactgatgtagaattttatcaaatacttttattgcatctattgatatgatctgattgtatgattttttttttctgtttcctggattacattaattgacttttagatgttgaacctaccttgcatacttggaatatactctacttggtcgtggtgtataatgtgatttgctgagatttttgagaacatttgcctctgtgttcatgaaagatattgttctgtaattttcctttcttgtaaggctgttgcctgggcttatgatcggggtaatgttggcctctgagaatgagttagaagtgctcactctgcttctacagattgtagaatattggtatcatctgttccttaaatatttgatagaattcacgaatgaattatcttgagtgtggtgctttctgttttggaagattattaattatttattcaggttttaaaaattgatttaggcttattcagattatttgtttcttcttgtgtgaattttggtagattgtgtcttttaagggattggtccatttcacctaagttatcaaatttaagggcatagaaccagctttgagtcttgttgattttctttgttttcctgttttcaattttgctctgatttttgttgttttcttctgcttcctttggatttaatttgttcattttctggtttcctaaattaaaagcttagatgattaattttacctttcttcttttttaacatatacattcaatgctaaaaattaatctcttagtcctgctttgctgcatcccacatttatttacttacttacttacttatttatgaaatggggtctcattatgttgcccaggctggtctagagctcctagcctcaagtgatcctcctgccttagcctcccaaagtgctgggattacatgtatgagccactgtgcccggccataaattttggtgttttattttcatgtacacttagtttaaaatattttataatttctcaagactatttttttgatctacgagttatttgtaagtgagctgtttaaacatctccaaatattttgagattttccagctatgtttttgtttaactagtttaattccattgtggtgtgtctatttgtatggtgtctattctttaaaatttgttaaggtatattttgtagtctctctttgtgaaatgttccctgtggatttgagaagagtgtgtatactgctgttgctggatgaagtgttctataaatgtcagttagatctagttgattgatggtgtcatcagttctatgataccttcctgattttctgcttctgtcaattaccgatagagggttgttgaagctccaactataatattgaattcatgtgtttctccttgtagttctatcagtttttattataccttatgtattttgacactctgtagttaggtacatacatataaagatgattatgtcttcttggtgaataataacagattgaccatctgttattaggtaatgcccctctatcactgataatttttcttggccttaagcttgctctttctgaaatttttatagccattccaggtttcttttgattaggtttagcatagcctatctttctccatccctttacttttaatctgtcttcatctttatatttagagtgggatttttgtagacatcatatagtagggtcttgtcgtttgatttgctctcgacagcatgtgtcttttaactggtgtatttagaccacagatgtttaaagtaattattgatatagttggattaatgtctactgtatttataactgttttctactcattgtccttgttctttcttttttcgtctttcactttgtctctgccttcttcattgtaattcagcattttatataattccattttgtctcctgttttaaaatataaattatacttaatttaaaattatcttttaggctgaggatggtggctcatgcctgtaatcccagcactttgggaggccaaggcgggtggatcacctgaggtcaggagttcgagactagcctggccaacatggtgaaaccctgtctctactaaaaatacaaaagttagccaggtgtgctggcgcacgcctgtaatcccagctactcagggggctgaggcaggagaatttcttgaacccaggaggtggaggttgcagtgagccaagatcgcactactgcaccctagtctgggcgacagagcaagactgtctcaaaaaaaaaaagaataaaatgaaattattttttagttgttgccccacagtttgcaataattacacagttaaactgatccaagttcactttttaaataacactttaccacttcatgggtagtgcaaataccttacaacttagtattgtcagttcctttttcccattccttataacattacttttatttgttttacttttccataatttacagtcactaaatatattgttgctattattattttgaacaagttgttatctgttagatgaattaaggatcagaaaaacaaaagatttagttttacctttatttttttcctctacactcttcctttctttttgtaatccatatttctgatctatataattttccttctttctgaataacttctgttaacatttcttgcaagtcatgtttattgggtttcatttctcccagtttttatttcagaaagtctttatttcttcacttttggaggatacttttgctgggattctataggcattctagtttggtattttattttattttttttaacagcccagaggtcttattttattttatttttttgagatggagtctcattctgttactcaggctggagtgcagtggcacgatcttggctcactgcaaccactgcctcccgggttcaagcgattctcctgcctcagcctcctaagtagctgggactacaggtgcgcaccaccacacctggctaattttttgtatttcttttcttttttatttttgagacagagtctcacactgtcgcccgggctggagtgcagtggtgtgatcttggctcactgcaacctccacctcctgggttcaagcgatcctcctgcctcagcctcctgagtagctggaattagaggcgcccatcaccacgcccagctaattttttgtatttttagtagagagggtttcactatgttggccaggctggtctcgaactcctgacctcatggtctgcccgcctcagcctcccaaagtgctgggattacaggtgtgagccaccgtgcccagccagtctagaggtcttttattttttttaacacctgttatgctatgaattcacagggaataggttccagcagctcaggctccttcccactggttctcacaaagtgtgctkctctggatggagcaggctggtgcttcagtagaacccgggtacctttctctttggcttctttctttttccgatcattttcctttacgtgtttcaggaagctattttggctcttagagtgctgaatgtgctcaatacgcacattaattctcttggcaagaatcttgcccttaacttgtttgttgacaagttgtttacaataccaacagcatgctgagtaacgtgtttgtttacaacttgcttacagtgccaacagcatgttgggtaacactgcagactcttccagttttgccatgataacactcgcggagcattcctttttgaatagtacccattcccttgatgtctacaatatcacctttcttatagattcgcatacatgtggccaaaggaacaactccatgtttactaaaaggcctagagaacatatatcgggtgcctctcttctttccctttgtgttcgtccttttggcgaattactggaagatggtggttccggccgaaaggttggatttttttttttttttttttaacactaaatatttcacttcactctttttgcttgcatggtttctgaagagaaagtttgatctaattctttatttctctgtggataagatgttttctgtgtgtgttgatttttttctttacctcttgcttctttcgagatatcttattggtcttaaagttaataaggaaaaaactaaagttttgcttttgatttagttttctctttgtcttattttctgcagcttcactatcatttgcctatgtaaatattttggtatttatcttgcttggtgttctctgaacttccaggtttggtgtttcttactaaagacattctttcctgttacagtgttattgatttgtacactccccttcctcgcctcccctcttcactgttttttccttctctttactcttcctttctttccacaggatctcactctgtcaccctggctggagtgcagtagtggcgtgatcataactcgctgcagtcttgaactcctaggctcaagtgattctccctcctcagcttctcaagtagccaggactacaggtgtgtgccaccatgcctggcgattaaaaaaaaaatcgtagaaacagggtctccaatgttgcccaggccggtcttagaaaaaaggacttagctgggcatggtggtggcatgcacctgtagtcctacctgcttgggaagctgtggcaggaagattgtttgtgcctaggagttcaaggctacagtgcgctgtgaatcaccactgtactccagactgggtaacagtgagaccctgtctcaaaacatatatataaaaaaaaattcctggtgataatttgataattcctggtaaaaatttctgccacatccgagtctgtttccgaggcttgctttgtttcttcagattgtattttttgcctttatagtgcctcataattttttttcatagccagacagaatgtatcaggtaaaaggaactgaggtaaataggcctttagtgtgaggttttatgtttatctgtttagaagtcaggctgtgtttagtgtttgttctggctgtggtatcggaggcaaatgttacgggatctttaaggtgttgcttttctgtctagaaacctctgtggccagtggcgcctttgcccgagttcttgtcctgtgtccaggaagaattatgtatgcagacaagtggagggtgagcaagacaaagagaagctttactgagtgttagaacagctcagaggagagctgcagagggcagcccctctctgtaggcaggttgtctcatccagtgttcagctctcagcagagaggaggccctggagtgagtggctcctctctgcaggcaggtccccattgacttcccagctctcagcagagacgatagctcctctctgcagctagtcatctggctgtctctctggcctctgccctgctctggctgatctcggggcttttatggacctcagtggggaggaagtgtgtcaattggtacatcggtggccatgggtgggctggaaaaggcaccacaagcccccactgcagtctgcgggactggcagcccggtccccaaccttcaggccctccctggcctgaaggtggggtctatctggggacgtgcccccttccacccaggagcctgtctgcttcctgccactttccatggctcccaggctgcttgtgccaaggggcacctgcctgccagcatggagcagctctccacctcagcttcctcagagggggcctaggcggcagggcctgagcatgcgcatatcctgttgggctgtgatgatatccaggcttggctccaaccccactctgagaacctgccacattggagccggtgcgggaagtggcagcgggaacaggcatttccgagcctgcaaaggcaaggggggccttcctgagcccccaagagcacacggaggcctgggtccacaaccctgacttgggtagctgcagctgtatggggttgggggacagggctcctgcctgtttccagtccccaagagcacatggaggcctgggtctaccacccaggcttgggtggcttgggctgctgcctgctcctggctcccactggcactgtggagcatgcagccctggctccgccccctttcagcctgagacaggggctccagatccttgctggacctgggctgggatccggggcaggggtgacatcgccgggagctaccccagttgccctggcgcttcagtggcccaggcagagcagataactgtccggcctggctgttgggagtggcaggctcagcagtcgcctgatgtggggtggaccctggggatgtagccccgggcagccctgcacagagcctcctcctgaggcccaggaacctggcaccctcagtggggtgggcgcagtggctgtgtcactggctggtccctgaagtgggcaccgctcccacttcctgcctcaggcccctgaagctcagcctcagctctgcatcggtctgctctctgcttgactgtgctgcacagagggcggcgggctgttgagggagggggtctgtccgcctctccctgtgccgtccatgtaccagaaagccaccgccatcactattagaggctaaaatttcttctactgtccttgcttttatctgccctgttgtctttgggtttttgtaaagaatccttaaatggggtctgaggcttgcaggtttttaagttgtaatcctgtgttgtacaagagctgtactgatgtggtggtaagggtagagggatgagggggaaagttctatagtcctgtaattagatctcaggactatagaactttccccctcatccctctgccctctaccaactgtgagcctgagttgagtaactgtctctttttctcggtcaaaggatagatggggctggagttgggtatttcccttccctccggttggttaggcactgtaaaaccgtagtaggttaggcaatctaaaagccagttggttaggttctggtaaaatagtttccttttctggaataccttttaagagaaataaagttcctggcgtatttcaaaatggtttttcttcttcccctgctgcaagcaggaggggttttttttcagatctttaccatgagaacctggtagggctcctggaggtaaaactcaggaaagtatggggacccctgtaagactggtccccttacagtttttaactctcaagctagtccacaattactgtttcaagtgttcctactgatgctggcttcagttgagagcttgtattcctggacttctgcttcctgcacactgtgattctctatctgcctgtcttgtctctccaggttttagagcagcagtttgccctctgacctcaattctctgatggctctaagaagagttggattatcagtttttttttttttacccccagctttttttcttgtcgtgaggttgggagtgatgaattacaagctctttacaactgtacttaaggttattttttgaccatttttgatgcttttgtaactagtcaaaagacttattacagtatcctttatctcatttggcagtattgttcattaagaattttatttctttctgacatcaggtctgcacattttggggataatatattctaatttgcaagaaagattaaaaaacttctccagagggaagttgatcataggactgattcttattattgatgaattgactgccttgtcttgttttgtgttgctatgtaggaatacctgaggctaggtaatttataaagagtttgatttaccgcacagttctgcaggctgtacaagaagtatggcaccaggatcggcttgtagtgagggccttaggctacttccactgatagcagaaggcaaagaggtgccagcttgtgcacaaaatgagagaggagaaaagggtgggaggaggggccctggctctttttaacaaccagctcttgggggaacaaatagagtgagacctcaagcatgcctgaggaagagcattaatttattcttgagggttctgacccctccccaccatgcccaacaacatctcccattaggccccacccccaacattgagatcaaatttcaacaggagggacaatcatctaagtgatagcatagactcaggctatttactattctgttttcaagtatagattgagggcaacagcagcctttgttttctatgttgatggccaaaggtttatttttatattcttatactgtaaaaaaaaaaacaactttatttttatagcctttttgggtgtagggtcatgtcaggctttactaattgcacttctgataagtatactgatgatgctgaggatggttattaaagccctatgctgatactttggatttatggaaccaattaatttgatgactcatttacattgaatttcttaattagtagattgcccactaattatttttatgagcacagaataaggtaatgtttattcttattttttttgtgatatggtaaaaaacttagttcatataatgaatttagtgctcaaatatcttagtagaaattgaagtagaaaaagacattgttgtaaattaaatgtaagatataattttattttctttagaaaactttacattgaaaagatcacattatagataatttagacaacttatttataacttttatttattattattattgaatgtaaaagaattacatgcagtcccatgatcttaacataactgtggttaccatgttggtatatgtgccttttagtcctttttcatacacaattttttttacaaagttataataataatttcttttcaaatttgtgccttatttcagttaacagtgtaaatgtttcccatttctaacaatgttttctcattgagtgaggtactgttaggttggtcagactgatagtttattgtacgtattgctgtaatatctttgtacatttagcttttccatgtttgtaccatatctttgggttttcagaagtctgtctctctctctgtttctctttttgtctgtcttttctatctctcaccttcatttggggagcattttgtgttctctttcacaggactaattaagttttattggatcttgaaaaacgggattagaaattttttcttacttatataattagaaaacaatgcttttggacttacattgccacggcagtttacacagttttattcccaaaaattgtagttttgtgactaggtgataaaaatgatctcctatatgtgccaaacttggtattctagacactcatacttaggatgtaaattgactgtagtccaataatttaatatgttgtgtttaattcttgtaatattttactcacaaattgaacttttccttaccaatttaatgtttgtaggcttaatttggcatctttgtcaggattattagacttctctgcattcttctgacttctccctaaactaatgtttagaactgaattgggtccagcaatttaagtggaaaatcagtatgactagagacttctagaaacttctggtgtcactgagatggtgaatttgatgattctgaccctacttgctcatctgtaaaagctattagaggattgttttaagcatttctattctatacaggtatatgtacaccatgtaataccactcagccataaaaaagaatgaaataacatttttgcagcaatttgggtggagctgtaggccattattctaagtgaagtaactcaggaatacaaaactgaataccatatgttctcacaagcgggagctaagtcatgggtacgcaaaggcatacagaatagtaaaatagactttggagactgagacgcggggagaataggaagaagataagggataaaaaacgatatattgggtacaatgtatgctactttggtgatgggtgtagtaaaatctcagacttcaccactatacatttcatccatgtaacccaaaaccacttgtactccaaaagctattgaaataaaaaagatatt

SEQ ID NO: 97544 - DNA, 12326 bp, Homo sapiens
cagctctggctgtggaagccctgtggttgctttttgacctggcatcttttagtgcaaatactaacttaataaatatttaataataaccatcgtgactcactgggagtgcagcctgtagggctcaggaggtctgttgctaatcccaaccagcatgatttacgggaagtaaatcatctatgacatgcccaaagagaataaaagtacatacaggatgcttctacttagggcttttttggtagagaaagaaataaacaagttaaaaagagacaacatttttttcttgacttaaagactatgtaacttaaagggggagggaggtcctccaaatccccacaaagtcaaaccaaaccaaattacccaagcttagctgcgcaatcggagtgtaaccacatcaagcgagctgcaaaacatcacttaaactggagctctgacttattgttctcttactgccctagagcaattttgttttgaagagcacagaacaccctgttctgaatgtggctggcacatgaactcgatgtgctgacagcaatttgtactccgattaaaataggggggaaaaaaggaaagagagtgcacagcagtaacaaaaatgaaatgcaagaacccctaaaccatgcaatttgtattttaggaagcaaaactgagaaagaggctccataacttaaaaaacaaaaaacaaaaagctgtaaatgctccagcctaaagacattagctctggtaagtgtctatttttcccttttctaattatagtagttggtgtctgatagctttgcactcattctcaaaacaattactgggtcatgaggatctgaatgggaatgttgtaatggcattactactcgacaagactggttatctggccagagaaaaccaggttgtgacaggttactcccactgagcaagagttttctctgttgcctaattcatgccaagtgagcttctttctgcctgtgtctcctgcctaatagagcacagtatccaagagagtaggatcttaataaccccctgaaaaagcaagcagagatggctttctaaaagcaggagaacaagagaaatacttccaacacgcatggtggtcagatttcccctaagctgtccgccttcctcctctgcactgttttgtactacttaggatgaacacacaccactgtaagattgcttacagaactgacggacagatgctaacaggcgtggaacctggctcctggaactgaataacatttatgcaaatgatttcttttggttgatcaagtttgaatgttttcaaaacaggaaatctaaacaagaagtatacacccagcaacaaattctccatgaacaccaacccttaccagtcttcccttcacaccactatagcacttgagttagacctggattccagtcccattctgccacttcaattatgactttgggcaaggtaattaaagtgatctgaagctcagtttcttcactgatagaatgtggataatacactagctaaatgataattgttgagaggattaaattagatactgaattagagcttttaatctagcacctgatattcattcattcattcattcatatgtcagggtgtctatcatgtgaaaatgctgttgttaagtgtggatatacagagacaaactaaaggaatgttagctataattattttcctgtgcctagtggtaaattataccagattaaacatgttttagagctctgtgtaagaaaacatttactggttcaacacagaaagctgtcaaagtatgaataaaattcttagtaggcaaaggcagtatcttgtacttcttttgtgcctcacagtacccagcacagagttcagggccagcaagtaaatatttatttaatgactaatcttaaaatagggcattaaggacagggtggtaattttcactaatttatacaaattttcctttttgaatctattagtattcctattttaataaattctaggaagctatacaaattttatattgatatggaaactttgttttttaatactattctaaaataaatggccaattggctggaattttttttttttttgtaacaacaacaacagcagcagcagcaacaaaagactgttttctttctttttttgagacagagtctcgttctgttgcccaggctggagtgtagtggcgtgatcttgcctcactacaaccttcacttactgcaaccatctgcctcccgagttcaaggacttcttgtgcctcagactcccaagtagctgggactacaggcccgcaccaccatgcccagctaatttttgtgtttttagtagagatggggtttcgccatgttggccaggctggtcttgaactcccgacctcaagtgatcctccagccttggcctcccagagtgctgggattacaggtgtgagccaccgtgcccggcctctttattgtttttgttttgagttgggggtctcactttgttgcccagcctggagtgcagtggtgtgatcatggctcactgcagcctcacactcctggactcaagctactctccttcctcagcctccctagtagctgggactacaggcacacaccaccacgcctggctattttgttgttgttgttgttaagaatggggtctcaccatgttgccaggctggtcttgtactcctggcctcaagcaaccctcccaccttggcttcccgaagtgttgggattacaagcgtgagccaccatggctggccagaaagacttattttctactatgattttattctacctgaagacttgaagataactttttggaagaaagaaattatataaatccaaaatatttgaaagaataaacactggccactttagaccaagtaccatattacattattttgtgaaaacatataataaaatggtttcaagaatttgctcctattcctagacttatatcccaggacattcataaatacttcaaaagcatatgaaaaacaaaaatgtaaagtctcacagctccatcagatctcaatatgggcagacgtaatctttcctctattttcaatttttggtacctttttgattttagtgtttcatttataaagaacacatagctagatactgttgttgttctcactttatgagaccttttgcctttaataggtgactttatcccattcatattttttgtaatcactgatatgagtggttttattcttgtctttggttttctacacagtgttttctttttttttttgagatggagtctcgctctgttgcccaggctggagtgcagtggtgtgatctcggctcactacaacctccacctcccgggttcacgccattctcctgcctcccaagtagctgggactacaggcgcccgccaccatgcccagctaattttttgtatttttagtagagatggggtttcaccatgttagccaggatggtctcgattcctgacctcgtgatccacgtgcctcggcctcccaaagtgctgggattacaggcgtgagccaccgtgcccggcccgtgttttcttattttttaaaacaatttttgctcaattgatgaagttttccttgttcctctatttccccactccacatggggtgatttggaaattctacatgctattcttactagtactttccattaaagtctgaacaaatcatttaaagatatatatatatacctctttatcaatgttcagaatcaatcagcataaagcattcaataaaatccaacatcccttcattataaaaaaccctcaataaactaagcatcaaaggaacatacttcaaaataataagagccacctatgacaatatcttttttttttttttttttttttttttttttgagacaaggtcttattccattgcccaggctggagtgcagtggtgcaaccataactcaccgaagcctgtatcacccaggctcaagtgatcctcctgcatcagcctcccaagtaagctgggactacaggtgcatgccactatgtgtggctaattttttttatttttagtagagacaaggtttcactatgctgcccaggctggtcttgaactcctaggctcatgcaatcctcctgcctcggccttccaaagtcttgggattacaggtgtgaaccactgcacccagccgtcaatatcatactgaacgggcaaaagttggaagcattccgcctaagaactggaaaaaaacagggtgtccactcttaacaactcctattcagcatggtactgagccacagcaatcagtatgcggcaagtcctagcctgagcaatcaggcaagagaaagaaataaaaggcatccaaataggaaaccagacgtctacctctcaccatatacaaaaacaaactcaagatggattaaaggcttaaatgtaaggcctgaaactatataaatcctagaagaaaagctagaaaatactcttctggacattgcctaggcaaataatttatgattaagtccccaaaatcaaatgcaacaaaaagaaaaactgacagttgggacctaattaaagagcttcagcacagcaaaataagctatcaacgaagcagatggacaaactacagaatgggagaaaacatttgcaaattatgcatctgacaaaggactaatatccagaaaagaacttaaacaaatcaacaagaaaaaagcaaatagccccattaaaaagtaggcaaaggacacgaagaagcagccaacgaacatgaaaaaatgccgaacatcactaatcatcagagaaatgcaaatcaaaaccacaatgagataccatctcacaactgagtcagaatgactattaataaaaagtcaaggccgggcgctgtgactcatgcctttaatcccagcactttgggaggccgaggcaggcagatcatgaggtcaggagatcgagaccatcctgtctaacacggtgaaaccccgtctccactaaaaatattttaaaaaattagccgggcgtggtggtgggcgcctgtagtcccagctactcgggaggctgaggcaggagaatggcgtgaacctgggaggcgggagttgcagtgagccaagatcgcgccactgcactccagcctgggcaacagaatgagactccgtctcaaaaaaaaaaaaaaaaaaaaaaaaaaaaaaaaaaaaagtcaaaaaagaacagatgttggcaaggttgtggagaaaagggaatgcttaaacagtgttgatgagaatggaaattagttcagctcctgtggaaagcagttttggaaatttctcgaagaactaaaaatcaaagtaccatttgacccagcaatcccattactgggtatacaaccaaaggaaaataaatcgttctatcagaaagatagctggcatttacactgacatgtttactgcagcattgtttgtgtgtttgtttgttttttgagacagagtctcactctgttgcccaggctggactgcagtggcagaatctcagctgactacaacctccacctcccaggttcaagcaattctgcctcagcctcccaagtagctgggactacaggcgcccaccaccacacccagctaatttttgtatttttagtagaggcagggtttcaccatgttggccaggctggtcttgaactcctgacctcaaatgatccacccacctcagcctcccaaagtgctaggattacaggcatgtgccaccacgcccagcctgttttgttttgagacagggtctcgctttgttgcccaggttagactgcagtggtataaatgtgactcaaatgatcctcccactacagcctcctgagtagccggcactacaggcatgcaccaccatgcttggccttttttttttttctgtagaaatggggtcttactatgttgcccagtttggtcttaaactcctgggctcaagtgaccatcccaccttggcctcccaaagtgctgggattacaggcatgagccacacacagcacttactcttaagcacagttatattcttaatagcaaagacacggagtcaacctaggtgtccatcaatggtggattggataaaaatgtgggcttccttctgccacggccaccattggagagcagcggccatggctctgtgctgccctatggccatgggcctcaacaagggccacaaggtgaccgagaacatgaggacgcccaggcacagccrctgctgcaggcacctgaccaaatataccaagttcgtgccggacatgatctgagagctgtgtggcttcaccccatacgagcggtgcaccatggagttactgaaggtctccaaggacaaatgggccctcaagttcatcaagacaagggtggggatgcaccaagaggaagcrggaggagctgagcaatgtcctggccaccatgacaaaagccgctgccaaggactgagcactctgccctgccctctctccgaaataaagaatagcttgacagacttgaaataaaaaaaaaaaaagaaaatgtggtacatatataccatgaaatactatgcagccataaaaaagaatgaaaggatgtcccctacagcaacacagatgcagctggaggccagtaacctaagtgaattaacacagaaacagaaaaccaaatactgcatgttctcacttataagtaggagctaaaccctgagtatacacagacataaagatgaggacaagagacactggggactccaaaagcaaaaaaggatggaggggtacaagggctatattctatgttcactatctggatgatgggttcaatagaagcccaaacctcggcattacagacaatatatccatgtaccaaactggcacatgtcccccctgaatcttaaaataaaagaattaatcagcataatctcccctggaacaagaaattaaggcagctggttgtggtagtacacgagcctgtaatctcaactacttgggaggctgaagcaggctgatcgcttatgccctggagttcaagaccagcttgagcaatatagcaagaccccgtctctaaaaggataaaaaaagttagctgggtgtgcacctgcagttccagctactccggtggctgaggtgggaggatggcttgagggcaggaatttgaggctgcagtgagccacaactgtgccactgcatgccagcctgggcaacagagcaagacctcatctccaaaaaatgttttaaaaaagaaaataatcttagacaattttgccttcccctcttcatttcctatcctcaccaccttttgttaaaataacccagaatccagactgttattattgttttattattattattattattttgacacagagtctccctctgtcacctaggcagtggtacaatcttggctcactgccacctctgtctcctgggttcaagtgattctcctgcctcagcctcttgagtagctgggattataggcatgtgccatcatgcctggctaaatcttgtatttttactagagatggggttttgccatgttggccaggctggtcttgaactcctggcctcaagtgacgccctcccaaagtgtagggattacaggtgtgggccactgtgcccaggccagactgtttcattattaatattacttctaacattacagctctactgcttcagagatctttcaggataaatgtatccaatatggaaattattttttttttctcgctactgtttcttatgccttgagttgttgcttcttgacttatttttttgttttggtacatcccacagtatttttttcgaaaagaatatgagtctgcaaattccaaaaagttaattttgttctcatacataaatgacagttgggctgagtacggaattctaggttcaaaatacacatagctatagacaatgatcaaaagcattgtctttagtgtaatgaataagattcttattcctttgtacatagcttgttcttccctggaagagttcagaattttcttgtaagctgcagaattcagaaatttcaccaggatatatctgggtgaaaaaccactccttcctcctgggtaccactatcaactggccctttcgatcttaagaatctttttcttttattccctgtaggaaattttctattagatgtttgattggatgcatattacctctcctggatttattatccatatcttctaatttctttttcacttttcatccctcttttttcttgtgttctgagaaatccttggctatctttcagatcacctgatttcagggactgtccattttgctcttcaacccttcctctgagtttcagttttgattaatcatgctctaacttccagaaactttcttgtcctccctttcctttttcagggaagttggctttttgacttatgaatctgatgtcctgttaacaatttctgaagacaataattagtatttttaaggttctcttctacttcttctgttagtccattttagtgctgcttttttcgtgatatttgctgatgattctttgctgtctggccgtattataaaggaaggattctggatgatcaaatgactatagttagctggcaccatttttctaagcagttggatatgtttccatggcaggcctttctgcaaaaggatgggctgattgcggggatctaagggtgaagatttcacaaatatttattaagcatttactatgagctgggcatgatgggcacaggaaagttgactttaggagcagaacactttagtattatttactgtgaaaagctgtctttacacttttttcccctttaaatttgttttaaaagttcaaaaaaggccgggcgtggtggttcacacctataatctcagcactttgggaggctgaggcaggtggatcacgaggtcaggagatcgagaccatcctggctaacacggtgaaaccccgtctctactaaaaatacaaaaaaaatcagctgggcgtggtggcaggtgcctgtagtcccagctactcaggaggctgaggcaggagaatggcgtgaacccgagaggcggagcttgcagtgagccaagaccgcgccactgcactatagcctgagtgacagagcaagactccgtctcaaaaaaaaaaaaaaaaaaaaaaaagtttcaaaaaatacattcattttccctagtcgaagtcctaacacttggagtcttttgaggcacattttgttttattatttatttttaaatttattttattatttttctattttattttagaacctggccttactggttttagcttgggagaaaaagtcacagtcagaccgtagtctagtagttttcagtccttgcctgcaaactagaataatctgggagtttaaaaaaaaatacttgtgcctggagttccatcttctgagatgtgagattcttatttaactggtctgggtgtcagaatttttaaaagctccctaggtaattctaaattcaggaaaagttgagaactactgcactggaggtttactggccccgctgttccatcttgttttataacaaccctgatgattgctgcatagcctgcttgggctccctcacaccagatgaccatgagcttggagttccgcctaagcctgttgagaagaacagtgtgtacctctgcttaagtcctctttacacctgtctcgggttggatttgctgagactagtttccattggttcaacttcatcaactttacatattccagaaattctccataatttctgatccactcttacattcctctcctttccagcactattattgatctcttcttcttcttttgaaaatctttgttccctccatctatcatttcagtgagatttggagagggaaaggaggtacgccaacaactggaacctgtagaacactctgttgaaaatttcacatttaaaaatactgctgactgtctgcattctttgcattcaaatgtggctgaaagtactgagaggcgagagaaccacatacagccagcattttgatgggcctcttccaaccactaaagttgacaaatcagacgatgtgagagactgggggatgggggaagagtaactggtagctatttagaaccttatgtaagtcagatttgattttctaagaaagcaaagctgaaaagtagcaatgtagccaagacctgcaattaaacttaaagactgaagtatcagtcatcataatcatatcaattagagtaccttagaacacagtaactttttaaatgaaagaaaaactttgaataaaaattacaagatggtcatcttaactgacacaagaaaaagcgtagggggacagattctaaaaactgatttgtaaccattaggatcctcatataaagagtaaaaatcaaaatttccttgagaaagaataaatcccatcaaactaacctaagttttctcttccacacagagacaaattatgaaaaggaagtaaaagtttacaattcagtaaaaacctttttgagtccataatgttattctttccccggaaccttgagaaatgtgatttagataagattactattaagatatatcattaatttgaagactgttattagagacaattttaggtctctaataaccatggtaggtagagccaagaggatttgctgatggatgacatgtaggagataagaaaaagaggagtcagccaggcacagtggctcacgcctgtaatcccagcacttagggaggccaaggtaggtggatcacctgaggtcaggagttcaagaccagtctggctaacatgacgaaaccccgtctttgctaaaaatacaaaaattagctgggtgtggtggcacgtgcctgtagtcctagctacttgggaggatgaggtgggagaatcacctgaacccggaaggcagcagttgcagtgagctaagatgcgccattgcactccagcctggcccactgcactccagcttgggcaacagaaaaagaaaaagaggagtcaaggatctttttccttagatcaattaaaaggaagcaaaacaaattagtgaaacacaatatatagggtagaagaaattaagtgtccactaaatgtctgacactcttctttgtaactgtttgtattagtccattctcacgctgccatgaagaactgcctgagactgggtaatttataaagaaaagaggtttaattgacttacagtttcacatggctggggaagcctcaggaaacttacaatcatggcagaaggggaagcaaacacacccttcttcacatggcggcagaagagggaagagccagcagggtttccctgccagacccttataaaaccatcagatctcgtgacaactcactctatcatgagaacagcatgggagaaaatgcccccccgattcagttacctcccagtgggtccttcccacgacacgtggggattgtgggaactacaattcaagacgagatttgggtaggcacacagccaaaccgttatcactgtcacacaacctgtgggagtgaaaactattcccatttgacagattaaaaaaactgaatgctccacgtagttaagtaacttgtctaaagtcataaaagtatcaggtagcaattccaagattcaaaaatcaagtccatcacttacaaagtctatctgtcccctcctccataccacttcattgtctctttacacagaaatgacagaaatttagtaaatcacgtatctataacaacatattgtaatgggtgatcagtgtctattgttcttgttcactctatagccggctttagttccaggttttatttattttatttatttatttttttgagacggagtttccctctgtcacccaggctggagtgtagtggcgtaatctctgctcactgcaacctccacctcccaggatcaagcaattctcctgcctcaccctcccaagtagctgggattacaggtgcccacaaccactcccagctaattgtttgtatttttagtagagatggggttttgccatgttggccagactggtctcaaattcctgacctcacgtgatctgcccacctcggcctcccaaagtgctgggattacaggcgtgagccaccgcacctggcctagttccaggttttatatctggtttcacatctaagtgtatttggtgatgctataaagaaaaggcaaaccagtaaagactgagaagatttcaaaaagaacaaggtgatcttggttttgaacaggaccacctttagggtaatcttttttctcctcccccagatagctaacttgtttaaaggaggaaaaaccaggacattttaaccttgataaatgaaagtataacacaataaatttctatgaaatagatttgttccagaaaaccaagacggtcttttgagtgaaaaagtaaaatcaaccatttaatctaaaatttcccaggaaagtacattctaacaagatgaaagacaaaagattagtcattgccctttcttttgttctttctctctttttttcaaactgagacagagccttgtt

SEQ ID NO: 97545 - DNA, 19656 bp, Homo sapiens
gaatgatcagatgggctttaccaactagcaggttggaaatgttttgctagcctgggagaatcagcttggaccgagaagactagaccctaggtacagtcctgacagccacctgcattgatgtgcttgctgagaaaaatggaggtgaaggaaattgcttagaaagaagaacagtaagggcagaccactggagcactgcagtattcaggagcaggctaggtgaagcagaggtggctgcagcaaatggaggatgttctttggtgaagtttggtattaaggtggaaaagatgggttgacccagtgtgtagcaggttcaaaggaaggcattttaggataagtacactgaatatgtttacggactgagggtgtaaaactagcgaaaagtgagagactgaaaatacaggagaaaatgcatagtagattaaagattaataaagaaatgctgtttatccaaggccaggagacagaactctgcagtggttgtgcagagcgggtggattttgagaggtggagggcaaggtctgcctctgagagggaaagcaagggtgtgagtggagacataaagaaaatgttggggtgaagggacatagacagaaagaattcatgcaggtgacttgaattgtcatcatgatgtactcatcataacaatagcagcagcagctcccacagatagagtgttttctatgtgctaatgtcagggttaagtactttacacatatcgcctctatcatctcattaatattacctaagactttatgaggtagtaattattaaaagacctattttgcagataaggaaactgatgctcagagtggtatgtaacctgctagttaatttcaaaggtgggataagaagctagatctgtcatattccaagggctgtttttaaacattttatcatattgagtaagaaaacacacacacacacacacacacacacacacacacacacacaccccagctgcttggccctggcagcatcagggtccaggatctgggagacttggacttgtgcttgctttaatttttcaaaatgcacatcctgggtcccaagtctacaaagactgatctacaggtctgaaggatcgcccagtaatacacattttcttcaaggtcacattttgatgtgactcaggtatagtgactcagactcagtgcatcacactttgagaagcccaggctcaggatcatcttaggctcatgggcttctttgcttaataaaatatttttttagcaaggtccaggaaacatggatttttttctggaattttgctgataggggaaggtgagtcttcttacctgtatgatgaccttggtgtcaaactgtggcagatggtggataaagactgtacaacccgctgtccatggttctaccagggtccaaatggtagccacaatccatcctgagtccgacaggcaccaggagacatcagatgtcttcaggctccgtaatttcctactaactccaaaatgcagtggcctcagctgtgtgatcatggctgatgtgatgaagggctgtgcactctggtttttagctacgaacccacctttctcactctcagttcatgtgatttgtgtggggctccataccaccctcaggccaggtctcaaaggtgtactgccaaatatttcccaattacgtacaactgaaactggttcaatcatgctacctctcttgaactgattctcctccagtgttctctgtaaccagacatgtcatccctatccatgaaactgtccaagccccaaactttggcatcaaccttgacctcctcccatctcccatgtttaaccagcagatctggtccactctatttcctgaaatctcaactgtgttaatttccatcatatgtctagtacctgatccatgccactactagcttgcacctggattagactaggagcctttaactggtcttccctaactctattctaattttctccaatccatcctgcatcctgcagccatgatgatcttatcaaaatacaaatttgatcagatctcctcctccctaaaaaactttcaatatctccccgttgttttcctaataaagtccaaaatctactacaaggtctgcaaatccctgcacggtctgagtcctgctcacttttccaattgttcccattggtccttcaccctacaccctgagcaccagatattcccaagtctctgtagttctatgaatactactttttatatctttgtgtctttgcacatattattccacctgcacagaagctctcccttctctcacctccattcctccctgggttttgctactcaactgtcatcattagtgtaaatacccactgcccctcttcgggttaatacaaaaagacatctgtgctccatattctgtttaatatgttaatacattaaaaaatataaagaatttggtccattctgaatattactagttggagatgagaaggcgtagagaaggagaggtttggtttgcaggtgattaaataattaacccaaggatagagctttgccctcttagaggtgatggcttggcatagcttggttccagatattttcttccctagaagtgaataattgaggaaccctaagtctgatttgcccataataggggagaggtgaggctctgtcatctcaggtcaccctgctagaatattctgtctttccctacaaaattatggaaccactgtcaggcttgtcatgtgtgtggcatctggaatgtctactgtctctacccacatttcctccacatctcctatgaagatgctctggtaaaacctaaatgtgcctcctttgtcactctcaggcctctgtcagcaaacatttaggattcccagccttcacctctcagaccctgagaggtctgaacaaaagagagtggaagggaaaaggagtatgtagtcacttctacttccagttcctttcccaagacacacacacacacacacacacacacacacacacacacaaactttgcccacatctgggtccagcctctatgtcggtgccctctttcctaccttcctgggaaggagggttgtaaggccaacccatgggagtgttttgccatcttggggaagcctgtggtcccactggtgaagaagatgaccattgggtccaaggtctttgacttaacacaggtgtgttctggggatgctgatctgcaaaggggttcaagacaaaaggaaaaaagtcatgattgctgtttcttcatcttctgggaatgcaaaagaaacataaggcacggacaggaaactgggagtttgcaacactagaggaaaactggctctcccggagttaggcatcacactgacttgatgggtgattcggacatgtggaccagcatttttttatttgaaaaattagtaaaatacaatgaatcttaagtcatttaatcttaagtaatttaagtaatgaatcttaagtaatttaatgaattcattaagtaatctaatgaacatttgaatagcacttgctatgttccaggcaatgctctcaatgagttacaaatatgaaccattcagtactcagagcaaccctaggagatgagtactactctaatcatgcccattttgcaggtaaggaaactgagactcagagaggttaggtaatttgcttggtaatatacagctagcaaatggcagagccaggattcaaactcagtcggcatcctagtctgtgcccttaaccagactgctaagcttgttttttaaaattaaactctgtgaccttggtgatgaggggtggggaagagaaagagagaaagggggagagtaaaaaaaatatatttagttgggcatgctggtgggcgcttatactcccagctactcgggaggctgagccaggagattagttgtgaacctgggaggccgagcttgcagtgagccgagatcaaaccactacactccagcctgggtgacagagcaaaactccatctcaaaaaaaaaaaaaaaaaaaaaaaatatatatatatatatatatatataaaaaacatatttatatattatatatcatatattaaatttatatataaaattatatataaatatataaaatatatacttttatgtcatatataatatatacttacatgtcatatataaatataattataggatatataatttatatataagtatatataatatatatcatatagtatatattgtatataatttatatataagtatatatatacatatacatgtatatgtaagtatatgtaagttatatataatatttatgcttatatataaattatgcttatatataaattatgtacaaaatatgtataatatataatatatattatataatatataaaaatataaatatataatatatgtaatatataatatataaatataaatatatataatatataataaatataaatatatataaaacatattacatataaatatataaaaacatttatatattatatctcatatataaaatttatatataaaattatacataaatatataaaatatatacttatatgtcatatattatatacacttacatgtcatatatacatataattatatgatatatatacttatatataaattatacttatatataaatttgcatattatatatatattatatataaaattactgcgatcaatgtacctctgccctagcatgagcttgagatggcagataagatctgtggttccctcagtctctcttgtttctcaggagcttcccctggactgagagggccttgggcctactacaattgtaaatgcaaggcttctatggtgttcaaagcaactgcaaataatcccaacacgagaggaaacactaggtctgctggtcttgctgtgaaatggtatcatactgactttgggaaattcgagggatttttcaagagtactctgttttaattaaattctctgacattagactacagcataagatgtgactttgctgtaatgtttgccttttggggttgaaataaagagctttaaaaactcaagtattactccaagaaaacaaacccagcatggtttgtgtgtataatgtgagacatgactgaaggcttacagaatcagagttttggaggcagaaggggcctttcttatctccagccttccttcactttgcccccaggtgtctctgaaggcacccagtccctgggagatggaaagagtttgctcccaaagctacctataagccatagttggcaattccatttttcttggggtcttaagttttaccttaaaaattcattttaacctttcattcaactacttcatatatttttaatagaaaaataagactttaggtttcccacctacaaggaatatgtaacacaataaccccctgactttacaaatctcctttgcacagtcccaggggtgagtatattttaatgagaggaacatggaaggttgacttgctgaaaaatgtgaaattttacagataaagcaactgagatcaagagagggcaaggaactaggtcagggtcacatagcaaaacagtgacataagtgaggtttctgacaactgacttgatgaccttcctaccactggctgcttgtctctcaccacttgggagtgaatggcattcttctacctgtggaacaggaattaaaagaaattaaagaatgtgtaagcaaaaactcagttgtatgtaagaaaacccagttgccccagaggaagagaaagaggtggagtcctttaaaaattaactgcctgtttctctgtctgtggctagtgagccttatctctccctttcccaggcattgtgaagaccctgtttctctagctgtgcagctgcaaggtcactagacagataaacccaagttgcaaaacatgtttttccttgaaaagtaagaaatgatgtaatgcatgtctcaattgaataactgtctttgtttctcacttctgtaatatgcttccccctgaacagatctctccctcccccctctccacccccaaaatgcttaaaaggtaacctgactctttgttctgggctcagtcctttggatattaatctgactgggttggctggtgcacctaaataatacatatatcctcctcaaccccatcggtctctctgattcctaaatcatccccaaacatttctggtggcccatatggggattggagataacagatttactgtctcctttgcccatgggactagggccctggggctgtggaagacctggcatccaaggcatgccatgggggagtttcacccggayggagactggctctccccgcatcctgcccagcagtgcaactgaacctgagatggggctgcaggatgacaccagcacttcaggaaccgcggtaaggagaaagggcccaaggtaggaaagcccatcccatagggatgaaggtgagcttgatcacctcccagggaccaaccactcatccaacccagagtggctgggggtggcaggagtggcccgccaatttggatgaacctcgtgtccccctaacaaagtgaaagtggttcactggtggagaaaatgggccgatacagcggcaagtgcagcaaggaagagtttgctggcagaatggtaagagtggcttgccaccccaactgggagtgtgtgggtgtgtgcggacctacccaggacaccagagaggttcgtttcctctgatgaagagtcctggggtagaagtggtgtgtgtatgtgtgtgaatgtgggaatctaactaggctcacccgggacacgagagagggttgttttgtccgatgaggagtcctgaggcaagggaggtgtgtgaaagtgtgtgaaagagacggtctcaggagaggccaatgcggggagyaatgtggggaggcacagatcccttagcgcaggctgtgtgctcccaggcgagtgtgggggaaatcagtcctaggatgttgcatatggctgataggttgagcttcacagctgcagcagtctgtggcagggaaaggcacgttcctggctaagcagcgtctgaaactcctgtaataggacccagtctggtggaccttagagtgaaagtgcacctcaagggaggaaatgggaggaaaagcatggaaaccaactccttttggagtgcatgataaagaatttttaaaarggatttagagctgattatgggatgaaactggatgttcaaaagttaaggacatactgtgaattagaatagccctcttttagtgatggatggctgaccaatggcactataggtaaattggctgtgtgttttaaggtagtgactagccctggaagacagccagggcattcagacctagtctttatattgattcatggctaaatgaatgcagccctgcctagcagtttattgtagaacgttcacagctcacacccagagaaaccagctgcgctggcggctacggagttaaaggtaaagtcacagaggcttgtagcaccaaaagtgaaaagtgaaagccaaaagtaaaagtaaaaatcagctgccctggcaactacggagacaaaagaaaagtctcaggaaagagaaaaccagttttgcaagaaccacaggagggaatagagacccctcctccctacattccaatctacctccctttaccaaggctaactgcccctaaggaattaagttcaaagagatacaggctcccagtctcacctgagaaggagaaattagagctccaggaagttaaagtgaaaggctggaaaagtcagggagggtgtctcaggtctggtcacgcccaagttatgcttaygcctcttaagaggacaagaggayacccactaggacccagatgatgcagtccagcttcagcacctacaaaagtgccaagaagcccttctgcaaaggctaaaggctggtaaaagaaaaaggcaaccaatataaaaaatctcagaggtgctccagggtgcagataaaagcaccagccagttttaagaaagactttttgaggcattttggttgtacactctgtttaaccctaaggctgctgaaaatcagtgcatggtggacacagcatttgtaaggcaggcccaaggagatatcaggcacaaattgcagaagttagaagctccgtaggygtgaatgcaactcagcttattaaagtggttacaaggtgtacattaactgagttcaggaggcagagaagaaagctgatcagaggcttaacaaaggctaatttactagcagcagcccttatgggaagagaagctggctttgcaaggaggcatggtcgtgggcgtgaacacagtcatggaaaaggctggtttggacaggagtttgaaagctggccaaggctagagagagattaatgtgcacggtgcaaaaggaaatgacactagaagaataaatgccccaaaaaataaataaataaaataaggagaatggtcaaggccatggtataaaaaaaaaccctccagccaagggctactgcacccaggagaaacccaagactccctgcacctgctgtgaaaggcaggacataaagtgtcagaaaaaagctcaaatctgctctaaaagtctccagtatttaagcctttatataagccaagaggaaagatggcttagtagtaaacaaaagcaatctgtttgtgcacttcctactccaaccacctggtgtcaaataagagagttcctaagggcagcaaggttctgctgcatttagatcccaaatttctagcttatggctaagccacaaagagaaggaaagaaagarcccctcctctaggaggctaaccaggagaagacttttaaagaaattaaaaaaaaaaaaaaagccttgactcaggccccagctttaggactgccagatctaactaactaagcttatcttcttgtatgyccataagtgaaagggaggccatgaaggttctaactcaagccataaggtcatggcatcacccagtgacatacttatccaggcaattagattctgtggcacttcactggcctccttgttttaaagcaatagctgccactgccctactggctcaataagctaacaaactaactttagagactgtgaataccctaaacccggctaccttgctcctcatcaagtcagtaccaggagacccccttcattgctgtgtaaatgtgatagatgaagtgttctcaagccagagagatttgacagataggccccttggggasccagacatagaatattttactgatggaagcagtttcatacgaaagggaatctgctgagctgggtatgcagtggtgactttggactcagtagtagaggtgcagtctttgcctacagaaacttctrcttagaaagcagagctaatagctctgacaagagctctctggctagcaaaagaccaaaagacaaatatttacacagattccaaatatgcttctgacactttccatgttcatgaggctatttacaaagaaaaaaaaggcttttaactgctgaaagtaaagaaataaagtacaaggaagaaattctacagctcttaaatgctgtataggccttaaaagatgtggcagagatgcactgcaaggggcaccataaaggaagaatactaaaggctaaaataaaataaataaataaataaataaataaataaatgagacaaagaggcaaagcaggacaaccccaccttctaaagaagaagccttagctatgcctctcctcccagagattccccttctgtagatcccaagctacactccaaatgaaagggcttgttttgcccagaaaaatatcaactacattgaagaaggatagtaaaaattttccagtgggaggctagccatccctgaaacggtggcccccagatttgtaaaacagttccaccaaggaactgacctgaaaaaaaaacacacaaaaaaacagcactaaagacattattaaggcatcatttctatgtgccatggctcactgctattactcaagccatttgtaaatgaacaatatttaacttgtgttcagaacaatccatgacaagggcttactccacccccaggagttcaggaaacagaagccatgccatgtgaaaaactgcttatgaacttcacygaattaccctgtgatgggggctatcagtacatgttggtgttcaccttttcaggataagtcaaggccttcctcaccgggacagagaaggaactagaggtgaccaaagtgttgttaaaagacattattcccagatttggactgcctctaactctaagatctcacaatggaccaacatttgtggctgaaatagttcaggacttaacttgactattaaaaataaaatggaaataacatatagcctacagactgcagagctcaggtaaagcgaagagcatgaaccagacactaaaacaactgctgaagaaattgtgtcaagaaactcatcaaaggtaggatcaggtcttgcccatggtcctcctccaagtcaggtgcacctccaccaagcaaactgggtattccccctctgagattttgttcagccggccaccccccatcatctgtagactagaagaagtaactttaagaaggcaaatgcagactttaagtatggccatgcaaaaatgcatggctaggtatagaaaaatgcctataagtctaacagacccagtacaccctttcaaacctaaggattttctttaagttaaaaaatggaatccaaccactctaggacccatacaggataggcctcatattgtaatcatgtctacttctactgctgttaaagttgcaggtgtcacaccttggattcaccatagctggctgaaactagcagcagcagtgactcccgactatgaccagtggattaaccaacaagaccctgattgccccacccgaatagacctacggcgaatcccaaccaccagtaagaaggacaactgccctgctctgaccacactggaggctggtcagtctacacatggctgaagcttgaagatcttgcaagctctgctctagtcacatcctggaagctgactagtctacacacagccgaagctaagaggaccatctctagataagtaaatgtagataaaatttataagcctagttataattgttctgttgttacattattactgcaaatgctgcaaatgtccatgcccagaggaaggtttgccattcctatgtgtagtgtaagcatgtttctattacatacactaatgttgttaccatttctgcctatactagaaggggagaaatctctagaaggatgcccacactgtgtacatactacctgggtaaggaataccatagttaaaactctactgtaccatacctacagtacaggaaccaagttaggaacctgcacatacaaccagaccacctattcggtctgtgacccaggaaataatcagctatatgtatgttatgaccctaagctcttaccctatgaattctggtttgaaatacatattaaatcagagggagaaaaagaaggagagttatagctcgaacaaaagaagcccctccctcctgtaaagggcctatttccttgtactttgatgcctgctatgctgcatatgttcacaatcctaaaaaaaaacagaagcagtctgcaatggtgtaacacaagagaggcttagcaggagcagccctaagcatctgtacaaagaaccacaaatcggatgcccagactgtaacattcagtggtccacactaacacaactccaatatttatattcaggaaggagtgctctgctaagtagtatgttaaccaaaccaaactgtaagacaagaacatgcaatcctttacattttactatcttaaagccagagatacctttctggtctacaggacagacagcactataacgacttgatagactaggagcaggccttggagttccactactaattgtcaaaaagactaaaaggactcaaatgcatccaaccccgcaattctgggtccataatcattctataagcatttggataagccagtgcctgagcttcccccaccaaccaaaaacttatttgctcaactagctgaaaacatagctggcagcttaggaatttcctcatgctatgtacgtggaggaactaatatggggaaccagtggccatgggaggcaaaggaattaatgccacaagataacttcacttcgcttaaccctgccagtgaaccaacagcctcagccagtgtttggttgttaaaaacctccataattggaaagtaccgtatcgcccgttggggaaaggctttcacagaggcagtaggagaaataacctgcctagggcaacagtrttatgatgagactaaaaacaaaactctatggagaagcacccrgaattactcctacttaccagatccaaatcctttatctccattctctaccctaagccacacttggcrtcaactagaggttccaaatgcttcgaaagcaccctctggcctatattggatctgtggagcatgggcatattggcaactkccagctaaatggacaggagcatgtgtgtagtaacaatcaagccattcttctttctaattcctctaaagcaaggggaactcttatggtatccagttgatgatgaaaataaaagaagaactagaagagcataatcacaaaaatagacacaaatgtcaaaaaggatgtggacataggagactggaaagataatgaatggcctcctgaaagaataattaaatattattggccagctacctgggtgcaagatgggtcatggggttaccacaccccaatctatatgctcaactgcatcataaggttgcaggcagtctttgaaattataaccaatgaaacatcaagggcactagatttattggcaatacaagcaacacaaatgagaaatgctatatattgaaatagattggcattagattatcacttagcctctgaaggaagagtatgtggaaaatttaatttaaccaacygttgcctagaaattgctaataatggccgggttgtcatggaaatcagagctagaatgcacaagttggcccatgttccaattcagacttggtcctaatggtccctggattctttgtttggaggatggttctcaacctttggaggattcaaaaccctcactggtgggtttttgtttattcttggcatctgcctcatcctcccttaccttttacccctgtttattaggaggattcagtcaactatrgaggcagtaataactcaacacactaccrcacagttgatggcattaaccaaatatcagccactgccagtagaagaagctcagctctgtgaagaggtggcaaatagtggtgctttctattaacacctttgttataaaaagcaacaaaggggggaaatggaacaggaattaaaagaaattaaagaatgcataagcaaaaactcaattgtatgtagggaaacccaattcctcctgaggaagagaaagaggtggagtcctttaaaaattcactgcctgtttttccgtctgtagctagtgagccttatctctccctttcccaggcattgtgaagaccctgtttctccagctgtgcagctgcatggtcactagacagataaactcaagttgtaaaacatgtttttccttgaaaagtaagaaatgatgtaatacatgtctcaactgaataactgtctttgtttctcacttctgtagtaagcttccccctgcacagatctcccctctcaccccatgaaatgcttaaaaggtaacctgactctttgttcagggctcagtcctttggatgttaatctgactgggctggtgcacctaaataataaatacatcctcctcaaccccactggtctctctgattcctaaattatcccacaacaactgtactcagagattatattcatcagaccagagactcacttaaccagcgatcggaagtccagccacccttcacggctgtgatcagacaccaggagcttggttttcagagaggggcactgagaagctatggagtccacctctgaggcaagggcatctatggtcacaatgcccttggctttagacaactgtagtcgatagagaatgtctttggccttcaacaggatggtcgcaggaatgaagatgatccctggggatgagaaaggaactgattgttttggtttctttttcacaaccatgggctttagacttggcttgtctgcatcgaaataccctaacttcttgttatgtaaagtacaggccacagaacaacagcagcagcactatccaggatgcagaatctcacaccctgtttcaaacctacagaatcagaatctgcatcttaacaagttttccaagtgattcttttgcactaaaatttgtaagccctgccctaatcttttctactgtaaatggatctagccaaaaaatgggtggacactgctttacacacatttacacaggatctggaagtatagatgtaaacagaacagtgtctctgacatcaagaatagctgcatctctcccccatctttcccttccttttcccctttctgtcattccttggatgtcatcttgaatgtcccctctttccttcattctgtatttcaccacattgtcctttgagttttttgcattcccttctatctccattgccaacagtgagctcaagcctttgtgtttccttctggattctcatccctccaccagttttgaatcttcctgctacccatcttccatattattatttgcttagttccataaacattgacttttttttcctctgaatttctttttttcttttatttatttatttttttttaaggtggagtctccccctgtcacccaggctggagtgcagtggtgtgatctgagctcactgcaacctcagcctcctgggttcaagcaattgtcctgtctcagcctctccagcagctgggattaaaggtgtccaccaccatgcccagctattttttattattattattatttttagtagagataggttttcaccaggttggccaggatggtcttggacttctgaccacaagtgatctgtctgccttagcctcccaaagtgctgggattacagctgtgagccaccatgcctggcctccctacatttcttctctgcactaacacctgtaccctctctccaggaaaacaccacacttctcgtcctgactttgaagatgctgctttctttccatctttctcccctacaccttattttctatttcaaaatggccatgcctcaccccatgcttggaatgtccttcctttgtttctaatcctctttaattcttcttagcccagagggctcagctcaagtctttttttttttttttgagagtcttgccaccacgcctggctaattctttctttctttctctctctctctctctttctttctttctttctttctttctttttgtattttagtagagatggggtttcaccatgttggccaggatggtctcgatctcctgacctcatgatccacccacctcagcctcccaaagtgctggtattataggcctaagccaccacccaggccaagtcttagatttcccatggaccatcttataggtctacagatgacatggcttttcatctctatactccttccaccagttttattacttcttgatttcacatgatctggctgaatgaatcacctattttatttgtgagagaatatgagacggagagagagaaaatatgatcaagagtatggcagagtgctgtacacatgataaaatgagagaagtgattcaaaaaagaatctgtgagtcactgattctaatctatatagacaaaaaataagtcatcaaaaggggaagggaaatctctacataagaattctaactaataaatgaaactgacagaaatagaaaatttccatgtaaaaccaacatggtaatattcaattcggtaaagaatcatcactaggtactcaaaccataatgtgaaagaatgttagggaataggaatattcacacaatcgcttaaggatcacacaatgaattatttattaattacaaggaaaaattgtgcctttgtaaaggataaaggttttctgtgaaaaccaccttgcttaagtgataaaacagtataactgaagagggaacaaactgacttcagaatataccccctgatgtgatgcacagaggaagacacaactttgtccttgcaattctcctgcctaacgtgtctaatctgaatataatcacaaagaaagagtcagaaatacaaatttggagatatattctacaatacaacttgcattcttcaaaaatgtcactgtcatgcagaaaaggctgtggaatattttggatcttatcagatgcctgcttttgtgtttatgagtgtttacctggtgttcataggtgtcacaatgcccactagtgattcttaaataattcagtaagaaagggagagaaagagagagggagagagtgctcaaatatggaaaaacattatcaatgaatctttaaaaaagtaagactctctgaggctgtgcaagagaaagtgtatgtgtgtttgtgtgtgtgtgtgtatgagacaaagtttggcactgcacttgagagtgtatgaatgtgagagtgtgagggagagaataagagaatttgtgagggagtatgagaaagacaaagactgtgaagaagaaaggaggtacagagaagagaaattgttttgtctctaattaaactgataattcccacagggcaggaagccttgctttgtggtcccagcacagaaactggggcgaaggcttcaaagctgtgtcagtgccaggctgggtgcacagcacctaatatctcaggacccattggttctagaacagccccgaggtccaccaggtccctcttgcatcactgacctgttcgcatgcagcccacagccaccagccaccactcaggaactcgaggcagcatcaaggccagatggtctccctgttgtaggccacaggtctgtgtgaagacgttggctacacggcgggttaggtctcccatctctctgaagctccactttacttcatccccttggccattcacccaccaaaaagctggatttggacctctcttgccctcctggtcaagaccatatattatgtgttattttctgcttcaaagaaaaagggcacttagtaaactaatccacagccatagtcacgttccaatgtgaacacagcttaaggactgagatcccattttaaaacatttatacagccaggcgcagtggctcatgcttgtaattccagtactttaggaggcggaggcaggttgatcatgaggtcaggagttcgagaccagcctgaccaacatggtgaaaccctgtctctactaaaaatttaaaaattagctgggcatggtggtgcatgcctgtaatctcagctattcaggaggctgaggtaggagaattgcttgaacccaggaggcagaggttgcagtgagccaagattgcaccattgcactccagcctggatgacacagtgagactccgtctcaaaaaaaaaaaacaaaaaaaaaaaaaacaaaaaacttatagcatcaggagaggtttaggggtggagcgggacttctggcctactgtagccaccctgcctcaagccacataagaccataaacagcctttatgcttcctattgaagatttaaaactccattccaccacatgcctgccttaattccatatggactgtgcattcttctctgtgccttagtttctcctcaataaaatgctgacaataattattacctagaaagtagcaaagtttaaataagttatttacataaagcatgtaagagtgcctgtcacatagtaaatgctcaataaatattattattatcacaataaaacaaaacaaaagaggcttacttaattgctaaatttttgaaaaaaatttttttaattaagttactcttagaggtgagggcagtaacaaagcagactaggaagctccaggcccttttttgcctcatagaaacagcaagattctacctacagaaacaacagatggactgaaatagcttcatgggaggtctagaaaccagccaaggatctgcagaaaaccaaacaaatgcccccagtcatgaaaaagccatactcaattcccacttacacaggcaggggaacaacacacactggggccagtctgacgggtcaggggccatgggagggagagcattaggacaaatagctaatgcatgcggggtttaaaacctagatgaccagttgataggtgcagaaaaccaccatgacacgcatatacctacataacaaacctacatgttctgcacttgtatcccggaacttaaagtaaaataaaaataaataaataaaagctaaatatagagccaggcgaggtggcacacacctgtggtcccagctacttgggaggctgaggcaggaggatagcctgagcccagtttcaggctacagtgattgtgccactgcattccagcctgggagacagaatgagaccctgtctcaaaaaagaaaaaaaaaaagtttaactatggaaagtgattaacatgttaattggtatgactgcagtagtatatgtacaagaagacatcatgttgtacaccttaaatacgtatgattaaaaatttaaaaaggaaaaaaatgaaaaagccatactcaaaatggtagaaaattttgtgattttttttttttttttttggtcaccattgcccccatctctttctggtgtggtgcggtgcagtcaagaggaagccccccaactcccacctcttctctcaggactgaaggaaaggagtgaaacttgtttacaatgttctggcttgtccaagggttgcggagggactggcttctgtcttgcctgacttgcaggtcagatagaaaccatggcataatttgaatatgatgttgggggtctctgaaagcagtggtgggtaacaggctgtgcaaaaacatcagacctgcaggcacgtaggggaaagagaaatacaataaaacatgtaagaccctgaagagaagcaaggaagagacttttagggaaattaagaaattaaaacagccatttatacgggaaaattagcgaggtggggcgggatgcacacacagaggccaaggaaagataaatgctagaaaaggcctgagaaggcctaaagccttcacactatgaagattagtgaaggtctacccctgcatgcagctgctcttcaagactgagagaggggggctgcttttttcaaatgcctaactttcaacataaaaacataaagcacacaaaggagcaggaaaacatggctcattcaagggagcaaaataaatctccagaaacaaaccctaaataaacacaggattcagctactaggcaaagattttaaatcaattgtcttaaatatgctcaaagagctaaaggaaaccacagatccacacctaaaggaaattagaaaaactatatatgaacaaaataacaataccaacaaaaagatagaaactatatattaaaaaagaacccggccaggcacggtggctcatgcctgtaaacccagcactttgggaggccgaggctaccggatcacttgaggtcaggagtttgagaccagcctggccaacacggcaaaaccccatctctattaaaagtacaaaagataagccaggcatagttgcatgcacctgtaatcccagctactcaggaggctgaggcaggagaattgcttgaacccaggaggtggagattgcagtgagctgagatcgtgccactgcgctccagcctgggagactaagcaaaactctgtctcaaaaaaaaaaaaaagaaagaaccaaacaatatttggagctgaaaaatatagtaactaaataaacatagtaactaaattgaaaattcactagggg

SEQ ID NO: 97546 - DNA, 90380 bp, Homo sapiens
  misc_feature (1)...(90380): n = A,T,C or G
gcttagggcctcactgggaccttctaacgttcacataggctttgaaatttacaaaatacagtatcatacattacacatcatatattatcggcttccacttctcccaacaaccctagaaggtgggcattatttaagttaaaaaggtgtcacaaaaggaagtgggtcacctgtccagacaggttctcacagggaggtaatctgtaagagaggaaattggtatggaaagtggaggagactctaaagaggggaaaacatgttgaaagagaattcccaaagggaaaccctgtctacacattctggctcagacactccatggtagtgaccttaggaagtttttaagcttttcggtgcctcagcctcctcctctgtaaaatgataatgacacctacctcaaataaagtgcttagcccagcctcgcactaaggtggctgtacaggtatgtttatcaaagcaggttcataaaagcgaaaaacctgcaaacatcccatgagtctaacaatttgtttaaacaaattaagatacacacataccatggaataatatcattcactaagaatgacaatgtgggctgggtgaggtggcttatgccagtaatccccacactttgagaggctgaggcaggaggattgcttgaacctaggagttcgagaccagcctgggcaacatagcaagacccagtctgtaccaaaaaacaaaaagaaaaaatacagccgagcatggtggcacacaaatgtaaccctagttactcgggaggttgaggtgggaggatggcttgagcccagaagttcgaggctgcagtgagctatgatcatgccactgtaatccaacctggctgacagagcaagaccctgtatccaaagaagaatgtggatgtttacagaccagaagataatttgtgacatataccgggtgaaagtagctgcaattcagtaggtgtagtgttatgccatttttgttaattttgtaaaaataacatgcttatacatagagtcatcatttgcttaatgatattgactttgtacagttttattatggtgtgcacttacatgtagccactaggatataaaatgtccaaggatatacaccgaaatatgtctctagatagggttcgttttcgaattctttcacaatgaacttgtgttgtaaagaaataacagagggctgggcgcagtggctcatgcctgtaatcctagcactttgggaggccgaggcaggcagatcccctgaggtcaggagtttgagaccagcctggtcaacagggcaaaaccctgtctctactaaaaataaaaaaaaaattagctgggtgtggtggcacatacctgtaatcccagctactcgagaggctgaggcaagagaatcgcttgaacccaggaggcggaggttgcagtgagccaagatcgtgccactgcactccagcatgggtgacagagcgagactcccactcacgaaagaaataatagaagtgtaaaatgtttacaaagcaggaactggagctgtggtatctgcctggatccttgagggcatttggctggtgccaagttcatgtgcaggtcacttggagaaccaataatccaaccaaaggactaagaggttttgggagctttaaatcacgttgtggagaagtcaataatcaccccctatccctcccctgctcctccagtgcaaacttctgtgattacgtctctctcctgagcaaacatagccaggtgcctgctcccaggggccttcctggatttcatgaggcccatcctctcctgattcctatttgttcctcaggcaggctacaactctgctgatcaggctgggccttgataaccagtcatcaagctctggtcatgttcctgagaagccacctggccatcttgatcggatgtggtgttcaccaatcccagcctcccagtgggacactggtcatctttgaaggaatgcttccccctcagtcagctcatcatgtttctggtgtggtgagtcactctggtttcaaccctgaacgtaatcttatttccaggtcatcggggcactacccagtcactccctgatttgtagtaatagtaaataaaagctaccggggattggtgcttatgtaccggacaccatgctaggtgtggggtttgagcctcacaacaaactgtgaagcaggtatttttatccctattttacagaaaagttagagaggttgacttgcccaggaatatgcagcaggtaagcctgggcccttaaactaagacactgtctctgcaatccacaggtcttcttacctgcattttatatgtcccgaaattaagtcgaagttattcactgaagttatgttattcatttacattcatgaagttagcaagtgggaggggctaaaatctgaatatttccctgacaccctcccctttttcccacttgtgctctatcctcactctccccccacccacttgtattctaagctgcagtaaacacttcaactcttgacagttctaagaacctgtaataatgtgccgtcttgccctggggcctttggacagactgttctctcccatgcatttggctagcacagcctaatctagacacgacctcctccaggaagccacacctgaccaccttagtccaagcaccctcttaggagctttcttggttcactcttgcctgtatcgcatggcactgaggttgctgtcttcttttcttgctccttcgcctgcaaagccaaaggccaaagcaaggactgcgtcttgctgatgattcggtcctcagcagccagcaccttcgccggcacagggtaggtactcagtaggcatttgttaagtgcatgcttggctctaagagctgcattctgcttttttggaggatgcagcttgggtgtactaagtgggaggctgcaagtgatgacggaaatgtggtttcctgcagacctgggcaaaggccctggggtcattgggggctcagggtgctgatgttaaaagaccatggtgtccttcttgttgaaccaaactctcaggctactgtttcctcactcctcgtcagagacaaatgtgttctgagtgactggagtcatagctcagagcaccaggagctggtttagggtggggcgaggggccgtggccttggggctctcgtttctaaaggcccagggctcagggctggggggaggggtgaggagtggcaggtcgtgtccccgggaggctgcagtcactgggggagagacaatggggctcagcatctgctcctccctgggagaagggacccttcagtgaaaagccagggagagcagggaagtgtgggaggaattgatgaggagaaggggtggagccaaggagatgcagccgggaggaaggaagggaagggaaggaagggaagagggaggggagaggatccaggctttccttcctcccggtgacctggtcctgagccgcagcttcccttgcattgttccctgagtttgctctcggggcccaccgagacctcacgtttctcccccctggctgcagccccagtccgagggcccggcatccagcaggtgctcaatacttacttgggaaaatgacaaatgtgaccaactttgctttgggaactttcccccgtcttctccccactcctccggagaacccgaggacagagcaggtcttgggagcacgcccgggcgccccatgaataattgacccttcctggcggcactgcccggctctgtccgagggctccggacccgccctgcgttgcagtcgagaaacggctcggagtggcgggtgttctggaggttggaggcctggtgtccggcctgcgccggagctggagggcggcgaggctgtgccaaaccccgcggcccctcagggagccgagagggacctgacggccgcgctgccagcgaccacgcctcggcgccccccagcagtgcgccccggggccgaggcccaggccctgggctcggggaccccgccagcccgccgatcccagcagctgccctgagccccttctccacccgggccctggcgctcggagcccgcgccgctccctcgagtcaggccgtccagggctctgctaacagctgtttaaaggcttttgctgttcagtgctctgcggggatgtttgttccaggcccatctgcctactttaaaaatacataagtgaagcacacacacccagcttgccacctctggctggggaggggcgggctcggcggccctcgctcgcacttgggaaggaaccggcacccaggagccgcacccgtgccccaacacccgcaccggctctcctctccagaggacgcccctggcttcccttggggggggcggggcgcagggcccccgggccccctttgtaccggacagggccgggccccccatttccaagcgaggtctgcctcttccccgcttcagttaatctttgttccccttttctgctgagaggagaaaaaaaaaagagagagagagaaagaaagaaaagaaggaaaaaaggcgtgacttgattttcaaacgaaactcccacagcaaacaaaacccttttagagaaataagaaaggaggaagaaggaagaaaagagggaagaaaaaaacaggagaaagaaaacccttcaggctttcaattcgagtgggagagttgaaccgaaagaaagagaaagaaaggaagaaaaatcctctgcggtagaaagagaaaagaaaacttgggctgacaagagggaggtgttgggggtggaaggaagtgagaaaacaaaagagagataaaagggctgcttttctgtctctctcttcctctgcgagctggcttaggaggagctgttttgcatcccttcacgtcagccctgcctcattcccttcttccagggagggagagagcgcgagcgagagagcgagcgagaggaggggggagagagagaaagagaggagccggagggagggcggcaggagcaggcggcgggcgcgcgtggaggcgggcggcgggcgcacagcagcagcccgggcggtgggcagccaggagcccccggcccggcccggcccggcccgccgagggccccagcgcaggagccgcgcccggacccagggtgagtgtcccgcgcggccccccgccccagccccagccccagccccgcagccccgcgctgccggccggcgggggcgcggggggcgcgggggtgggtcgctgcggccgcggccgacccgccccccgcctctccctggggacggccgcgcgcaggcccgcgccgcgctgcaaacatgtcgtcttttcctttcacttccacattccctcatgccggatagctggagggagagagggagagccggggaaagagggagatatggcgtctggggtgggggggagggagaggagggggtagggggnnnnnnnnnnnnnnnnnnnnnnnnnnnnnnnnnnnnnnnnnnnnnnnnnnnnnnnnnnnnnnnnnnnnnnnnnnnnnnnnnnnnnnnnnnnnnnnngagggggagggggaagggagagggagggagcgagcgaaagagggcgagagggaggagagcgcgcgaatgagagagagagagagagagagagagagagaggcaaaaatgaaaggaaagcgtcgcggcggcggcggcggcggcgcgggaggcccgggaggcgacggtggcggaggctctcgggcccgcacgtgggtgtcccggtgctgggtgcgctccccccacacccggcccgggactcaaagtttcaccccctcgccgccccgcccctacggctgcccacaaactttattctcggagcgggtggggttgttgcgcgtcccagccggccgggggtgggggagagctgagcgcgccgctggcggggctgggggcgtccccgagggccactggccgccgcacgctgggcgccgcgggatctccgccgggacagcgtcggggcgccgcgggccggggacccaggaccggcgctcgctgtctgggggcgtgggggtgggggtggcgggcggggtccctacggcccgtcttgagcctcccgcggctcagccccccttcctcctcgtcgccctctctccgtcttctcgcggtcattttcctaattggatggagctgtggggcgtgagcaccagcgtcagatcggggccctcaggctaccaggtgggcgcgcgggctcggggaccgacggggcagccccagcctccccaccctaggcgcacagatcccgcagatccggcccttgggccaccgcccccttcaccgcggacttgctaactagtgcgtatcgggtttttttccaacttgccttttaagatgacttttatgggcgctgcaactgcttccctccagtctaagctgtagtttggaaagatttaagaggccagggaggtgcttgtgtggattttaaccaacctgaaagggtcattcatgtatctctaggatttgcgagacggttagggcaaggcgtagcagtatccggggtgccttttcttttttcttgatatggagtcttgctctgtcgcccaggctggagtgcagtggcgcgatctcggctcactgcagcctccgtctcccgggttcaagcgattctcctgcctcaacctccccaatagctgggactacaggcgcacgccaccacgcccgtttaatttttaattatttttaggagagacggggtttcaccatattggccaggctggtctcaaactcctgacctcgtgatccgcccgccccggcctcccaaagtgctgggatcacaaggactcttcgaggtactcgtcctactgggtctgagggaggcctgccgggcaatccagtgagggaccaacgtcatggcccacccttgagctgcaggccgagtgcccacctgcaaagggcaccctgagcacctttcttgctgtgcaaaatggaaactcccggccggtatcgacctgcagtgtacataactagtccctgtgggcatctgggaaattcacaaaactcccccacaggtgtgcggagaaggactttgtgctcttgggggtcactcagccagctttgaagctgccctctcagtcctgcatttgtacacgtgtaagtaaaaccagtcaaagttcatttctgccaagtagagggctgggggtctgtgtccctattgcatcttcaccagggggcctagagaaccaatggggccacgtgggagaagggaagaagaaaaccgttcttaactcgttagataagagacagtgtattcctaatgtgatcaaagccgatggggctatctggttttgacttctgaaaacctagagtggccattcctttctcatttgttttaaagagaatgttattttctatactttctcattggttttattagctgaccctcaggccagggtaactgtgctgggtacctgccagtctcggagcagaacctctgatcggtcatctgtagctccagagaggtgcccacctggtgccccagtgaccttctggagctggctttcctgcatgagggccgtggggatagagctgctttcttttgggtagggggaattggatgtttgggtcacattttcttcctccagcctggcctggttgcctgtgtcttggtggagggggctgcagtgagttgaagtgggacgcgggctcacttgcttgtcttctcagagctgatacctgggtgagtcctcagcccacggtgtgtggtcagcgggccatttttccagggcttgggtcatttccattccaaccaggcatttcctaccagggagacttattttaggctcactgtctagagacaaggagacagacaaggtctggaatggtttttgagttggaggaagggagactaatgggaccaccagagattttgcacttctattttaggtttgccttgtggcccagagatatttctagcagagttgtgtttggaaagaagcacaacttctttctagaagggagtaaataaataaataaaggaggagtccagcgcatcttggaggagacaagtgaagtcagctccctggccccaccagtgctgatgcttggcgcaggctcataatctggcttgctgacccctcccataccctcgttcctcaggcctagccagggcctagcccgcggcaggactcattatgttgaaataaggaatctgtgaatgtgctgggcctgctgttaatggtgcttgctcccagccctttgacttcaaagctggaagaaggccttagagattgtctgaaagcaactgaggcaggaagaaagctctgtacccaggattacacagtaagtggcagagccagcactcaacctgagctttcagagcctgttcccagtgctgtttctacaaggccactgtctctgctactgctggggatcccgaatcaagctcacttcaaagaatgtagctatgagagcatgaaaccgtgcgctcacgccgcacacgagttgggtaaatggagcgcctcattttccagatgtgttacagaaactgtgctggaggatgtgactggccagtgagacaactagggggaactgggtgattcaggctgtttcaacactgacttcttcaaagtccaacaatcagagaagcagtttagtcatcgggattttctcacatcacaccattttttgatctggaatgctttcttcatactttgacttgtatgtgatttatttaggattggtcaggagagaagagaaggartgtaaggacccaagacctgaactgatttccatctgtgggttaaatgtactagaacgtttgtgagggtagacgtctttgctttgttcattgcggagcccctgtgcctagaatagggtctgatctatagtgggccctcagtagatacttgctgaatgaatgtactggacattagggaagatttgcctgccagaaggaacccatgaatgacacaggcagggacagggaggtgattgatgggagctgcagagttgtgctgtgagtcattgcttcaaacaagctccagacaggtgaggcaggagggggctgggaagagaggatcctgaatggggtggagcccctgggtggagacttgtgcaaaacaataggtttttttagattttttttttctttttttgagacggagtctcactctttcaccaggctggagtgcagtggcgcgatctcagctcactgcaaccttcgcctcctggcttcaagcgattctcctgcctcagcctcctgagtagctgggactacaggcatgcgccactacacccagcctaatttttatatttttagtagagacggggtttcaccaggttggccaggatggtctcgatctcttcacctcgtgatctgcccgcctcggcctcccaaagtgctgggattacaggcgtgagccactgcacccggcctaaaacaataggttttgaattggactcagaatatagggagaataataataatcatgtgtcttargccagaattatgctacgtgctttgtgtatttgtctctcttagttcttgcaggtgctggctcttgcattcttatcctcatttggcagaggagttaaataacttgtccaagggcacagagctggtatctaaacccaggctgtctaacttcaaactttgcctctcaggaacgatgatgtggtcatatgtctctgcccatgccaaagagttgggcgttcagcactttggggttccttggaaggacagcagcagaaaaactaaagaagaaattgtgggtctgcagcagagggaggctggtcagggagtgtgcctgaagagggttcacccagtgaggcctataagggaatgcttattttaggggcctaactgttcctcaagcagagtggctgttgtgagattagggctattttgcacttgataaagatgtaggagatctttttatgggcaaagattgcttttcaggttaaagtttagttggcatatatttgaaactagtgggaattttaaaactaagaaatgtcctttttggccttgataccaccagaggctgtttgccacatgtgtaaacattacctgcctgctccaggatgctggcccagcctgttccagaccacagcagctcctcattcattggcagtctgtgatgtgctagacactgtgcaggtcccgtcctcgtgaagcttgcagtctccctgggaggcaggcattaaactaataattacacaaatactctttaattacagtggttataaatgcttcaaaggaaaaagtacagaggcatagaagccagtaatcatggagagggggaggggaggctttcctgaagaaaggacatttaaatagccacctgcagtgtggatgaagaggctttaaccagggtggtacagttcattaaccttgatgtgaaccttgccactccatatgtggtccatggaccagcatcagcgttacctggtagtgagttagagatgcagagccctgggctcctcagcaaacctactggatctgcattttaattcacatgcatggtaatgtctgtaaagcactgatggactcaaaagtactgaaatgacaggttctcagctttgctgggagctcattgggtgacgctgggaaagtcaccctggggtgacttctctgatgtttggctttttccagtttgtgctgtctacctgcttgttgagggtgacccacccctgtgttgctgttgatggagaccctgcagactctagtccatgctctggtctgacttctgtaagcactgaagatgggctgaaccatcagagcttttgataaggatcagaataattccctaaaagtgtgtggagctgcacacagagattgtcttaaggtgaccctgggaggatttggcctgaagcaagagaaaaactggcaagggtcaaaagggctttggggaggaaaggtgtaacgtttctgccaaaagcggaacctaaaacggggagagagaggcacctgctcaatagttccatgcatgggaacataatacttttaagaattgcctcagagttttatccctgagaccttcacatcactgtagagaagaccagacggttgaaatcaggggtcctggactcttgcagtgtgtgggtgggcttcaagggtcaggggtacttgaaactgtgcagaaggttacatgtgtgcacttttctgggaagaggagccgtagctttcactggcctcaagggagattgcggctctaagaatttgtcaaatgtcttactggactaacctcacccaactctcttgttatacagcacatgcgatatgccaggcataattgtaarcactttatacatactgttagctcatttaggttgaatacctttctggaggtcacagatctagtaagcctcagagccaggattagaacccaggcactggggtcccagagtcgctggttgcaaagcctaccctagtaacagggcaagcaggactaggggcragctcttttttggtagcacagatgaagaggctcacccccacccccactttacaagtaagcatctccccagttgttcatgtaaaacatagaaagcattttcccaaggaagcaccttgtgaatagctccaggttgccaggctagcccatgaaagcctgtatcactgttgggcccaactcatgcttgtttgcaaagaaagtaattagaaaacaaaactgctgccgcaccaaaggctaaattaaaaattctagaattggaaagaaggcacttgaagaattgcacccttaaatcagggaggtaaggtggcaacaggaaattggggtagattctgaaagggagggattaaaggatgttacagccaaagcacagccaaatatatgttgaatcagcagcttcaaaaggtaaaacaactgttttttattacctactaattaatgtgtatggctcacagacctgacccttcccccatccctagtgcctaccccaagtacagaggccttttgtcttttctctcattcattttgtgttgtttgaatttttatccagtatgtattatctttattatatacatgtagtatatatatatgtatagtacatatgtgtatatatatgtatatgtgtatatatgtatatagtatacgtgtgtgtgtgtgtgtgtatatatatatatacatatatatatatgtatatatatatacatgaagtaaaagaactattagaagtgggttggaggccgggcacagtggctcatgcctgtaatcacaggactttgggaggcccaggcaggaggattgcttgagcccaggagtttgagaacagcctgggcaacatagtgagaccctgtctctacaaaaaagttttataaatcagtcggtggcacgtgtagctgtagtcccagctacttaagagactgaggtgggaggatcgcttgagcccaggaggttgaggctgcagtgagctatgatggcctcagtgtactccagcctgaaaaccctgtctcaaaaaaaaaaagaaaagaagtgggttggtctctttcgcaatcaccattgtaaaggattttctgatattaaatacatatgctctattgtgtgtttatttctgggagaactaagaaaactgttggaaatgtgaggatttttagtgtagtcggaagctgagaataagtgatcatattgcgacccaactattttccctttcttctttccctgcccccagcatgttatatatatggaatcgaaatgaagttagaatggtcactacagaaagcaggaatgtccaccctccgcatttaaatgggaaactataacttttgtgataactcttggttatgtgtgtttttgtcttctggatggtacctgaaatgccatcccggaccccatcccgttctcggtgggactgcaaggatatgggcttccagactgggaagactgtcctgcatgtgtttggtaaaagacaacggctaaaacctggggcacatcagaatgtcctcgcaaggaccaagtccaagctggccccttgagaagcatcaggtaccctttggaagctggtagtgctggtcagtttaatctcactctgtgatgtccgatcctcgggccctgggctcacaagccatcgcttcccatcgtggctccattctgtagctgcaaatcacaagactgtagacttgccattacccagaagcaggtcacctctgaaattcagaactcttcctgtcctcccactacacagcactccttgaagcagccctgcccacccctgccccaacctgggaaatctgtgcccacttccctggtccattccccatgtgcccaccatcagccccactgcttgttcctctgtgtcctgccctggcttcctccctaggtctgggcaccccacatcctcctatgccttaattctctacctacagctacagtcacacctctctctccctccccaaccccaacctgtgtcacttctctttaccctaggatttcacaaagaagagtccactctgtccccacttcctctctccccctcttctccttgccagctcaacaacagtggagcgtttcagcccagcccactctcactccagctggctctcctagaggtccctggccacctactcatgcccagtggcccatcttgtgtgacttcctcttacctgactgcccggtggcccatcttgtgacttcctcttacctgacttctccatagcagttattgtcatgaatagtcttctccaccttgggtctggctcatcactctgggtccttttcctacctctctcatctgtttttttgtaccattctttcctgttgctatgctttggtgccttggccacagttcattgctacttgcttacctaccatgactgtggtttcagcctgtataggactcttggcctatgatccctgtcctcatgtctcctgtagacagcctagggctggatttccttttgtttttaatctagtctgatatctgtgctctttaaccagagagttcaagccatttgcatttgttatggttttggaaatagatggatttcttttttttgagacagggtctcactctgtcacctcggctggagtgcagtggcagatctcagctcactgcaacctccgcctcctaggctcaagtgatcctcccacctccgcctcccaagtagctgggaccacaggcatgcaccaccacagctggctaatttttattttttttattttttgtagagatggggtttttccatgttgcccaggctggtcttgaaccctgagctcaggctatccacttgcctcagcctcccatagcgctgggattacagtgtgagccaccgcacctggccaaaacaggatgcagatttcttyctaccatcgtatttggtgttttctatgtgttctttttctgattcttctgttcattcttttgaattgattgaaagatttttttctttccttcagtccgttttttctctactgctttgaaactcatatactctttttaaaaattttttatttttagagaaaggatcttgctgtgtcacccaggtgggagtgtagtggcaggatcatagcttactgtaaccttgatttactgggctcaagtaattctctctcctcagcctcttgagtagttggccttgaatttgaacttctgttttttattgttgttggttttttgtttttttttttttttttttgagacggagtctcactctgttgctcaggctggagtgcaatggtgcaatctcggctcactgcaccctctgcctcctgggttcaagtaattctcctgcctcagcctcccaaatagctgggattacaggcatgtgccaccatgcctggctaatctttgtattttagtagagatggggtttcaccatgttgcccaggctggtcttgaactcctgacctcacgtgatccacccatctcggcctcccaaagtgctgggattacaggcgtgagccactgcgcccggcctagcctcctgagtagttgggactacaggcatggaaccaccactcctggctggttttattttttagaggcagttctggctatgttgcccaggctggtctcgaactcctggcctcaacccatgctcctgccacggcctcccagagtgttgggattacaggtgtgagccaccgtgcctggcctgaaaggcagactgtgtaatgttcagttggtgtctatatatttttttcaaacaatgtaaagaccttagaatgctttatataaagtcaccactgtccctccccacattccattgtcatacaatggtttatgtttctgtctttaatcccacaaattggactctaattataatgttatatacacttaatcctttgtttttattttccacatatttaccttttactcacattttccctttcatctcaggtcttctttctgggatcagaacatcatgtggcaaaggtcttttagtcataagctttcagtgtccgtttggctgaaatcttatttcatccttattcttttttttcttcttcttcttttttttagcctagaatatatataataatggcttcatccttactcttaaaagatagttttgctgggtataaaacattagcctgaccattattttctcagtatttacaagcgtcattccactgtcttcaggctttcattgttgatattaagaagctgggggctgggcgtggtggctcacgcccgtaaccccagcactttgggaggctgaggcaggtggatcatgaggtcaagagattgcgacaatcctggccaacatggtgaaaccctgtttctactaaaaatacaaaaatgagctaagtgtggtggcgtgtgcctgtagtcccagctactcgggaggctgaggcatgagaatcgcttgaacccgggaggtagaggttgcagtgagctgagatggcgctactgcattccagcctggcaacagagggagactccatctcaaaagaaaaaaaaaaagaaaaagaagttggtagcccaagtattgttcccttagataaattcttctctgtggttgttttgagtgwgcatttttttttttttttttttttttttgtagtcttgctctgtctcccaggctggagtgcagtggcacaatcttggctcactgcaagctccgccccccgggttcacaccattcccctggactacaggcaaccgccaccacacctggctgattttttgtatttttagtagagacggggtttcaccgtgttagccaggatagtctcgatcccctgaccttgtgatccacccgcctcggcctcccaaagtgctgggattacaggcgtgagcctccatgcctggccaactttttcatttttaatctttttttattccgggtgttttcagggtaatttttttttccatgaacagagcaatgaaggggtaatttcttgttttctaggtcactaattctctctttagttatctctaatccctgtttagcccttcactgaggtatttttaatatcaatattaactcatagatttaatatatctaatgtgttttactccattgcagttgttatttttgatgctcatccattgagcttgtaatgtgaatgattatttttttttatttctgggtttctattttattatttttcaaatatgctcggtcttttaaaaaacaatctcttactccttgtgttttttaattcctcactttatttctttaatcatattaaacacgtttattttgtattctgtatccaataaatctaatatctaaagtatttgcaattatagttgtattgtttgatgcttctgctgacttccactcatgagggtgtgttccttaggtgttctgtgatttttgctttttgtttgtttatttatttagttattcatttgagatggagtttcattcttgttgcccaggctggagtgcagtggcacaatctcggcttgctgcaacctccacctcccccgggttcaagtgattctcctggctcagtctcctgaggagctgggattacaggtgtgtccaccaccatgcctggctaagttttgtatttgtagtagagatggggtttcaccatgttggccaggctggtctcggacttctgacctcaagtgatctgcccaccttggcctcccaaagtactggtattacaggtgtgaccactgtgcctggccaggtgttgtgtgatttttgattgcaagcttatgcttattaggattctatctgtgagaattctttgaggtataggatgagagtcccttctcagggaggatgtgtgtttccttctgctaggtacctgaagggcctacagatggattcatttctctataattcttagcttgcagttttgacaaccagaacctaaacccacataagagcctgccaatgaccacagattctcagaggaaccttttttttaaaactccacccacagctaacactaagattacttccttcctgaatacatatcaccagacgctctcctttgtcccattgtcgctatattgccaaatgccttctctcgatttttggtcaaagtcctaatcatttcaggtccaattaaaaactcagtatctcttgagccttccccacaccatatgttgcaaaattatctggtctttccacattcacagcgttcacaggccactgttgcattacctattagtctgtgagtgtacacgttcggaccccacactggattctgagctttttgaaagcccagagctgtatcatttatttctggagccccagttcctggctcactgttgtgcagagtagttgtttcatagatatttattgatcaaatagaatttatggcaaaaccagtacttctcttctttttgaatagtaataaaaaaaaaaaaaatcacaagcccaagcacccccggtcttggacaaagccagtttacctctttggatctcagtatccttagctgtaaaatgaaaggatgctctgaggtctctacttgttctaagacactgacatccgatgcagctgtgtggctgtcagtcacagtaccatggatcaactcttgactcacaaattgaatgaagggatgggagggctgtggtaagaaagagtgtaattctgaggtaactgggcatgagttggaagagaggaaggagaagggacttcaagatgggttaatataaaataaagatggcagaaccaggcatgatggtgtgttcctgtaatcccagctacactagaggctgaggtgggaggatcagttgtacccgggagtttgaatccagtctgggaaacatagtgagaccctatctcttaaaaaaaaaaaaaaaaaaagatggcatttaaaaaattatgacctggtttaactagatggccatctaaaaaacgaacacattaaaacaaaataaatttcagttgggttaaagatggtaaatatttttaaaaatgaacttggagaaagtactttctaagaatgacttaaaacccagaagtcataagagaaaaaattaatatatttgaccctatgcaagtaaagaatttcttcttggcagaatccatcataaaatcaaaggagtctcccagttctcaaaattgggaaagcatttttgcaacatatatcatggagctcatttccatttccttaatatctaaagagttcctacaagtcattaagaaaaagaccatcaactgaatttttttttttttttttttgagatggagttttgctcttgttgcccaggctgaagtacaatggcgcgatcttgcctcaccgcagcctctgtcttccaggttcaagcgattctcctgcctcagcctcctgagtagctgggattacaggcatgcaccactaccccagctaattttgtacttttagtagagatggggtttctccatgttggtcaagctggtcttgaactcttgacctcaggtgatccacccgcctcagcctcccaaagtgctgggattacaggcatgagccactgcgcctggcccatcaaccaaatttttaaagcaggctaaaaacacagacagttcacagaaaaggttctgaaccatatgagaatgtgagagcccactagcaataagagaaacacaagttttctgtggagatgtgttggtggggaacagatactctcatagttgttgatagaggtgtaaatcagtacaacttttatggaggaaattctggcaatagttattaaaattaaaagtgcacgggcaatttctcttttggaaatttctcttaacagataaattgtacatgtgtgaaatgatgcatttttcaagatagttaattgcatcattgcttgtaaaaggaaaagagaaaggaaacagccagaatgtccgtcactagagaactggtaaataaattatccagccaccatacaatgcaattctttttttttttttttttgagacggggtcttgctcttgtcatccaggctggagtgcaatggcgcagtcacagcccgctgcagcctcgacctcccaggcttaagcgatcctcccacctcagcttcccaagtatctgggaacacaggcgcatgcccgtaaatactgagaaaacccacccagctaatttttaaattttttgtagagacaaggtctcactatattgcccaggctggtctcgaactcctggactcaagcaatccccccttcagcctcccaaagtgttgggattacaggcgtgagtcaccgcgcccaatgccatacgatgcaattctgtgcagttgtaataaagaatggacacgccctatgtaccaatgtacactatgtaccaactaagacattttaagtgagagagagggatagaatgcctgcttatgcagtagctccgcaaggatatctaggaggctggtaacagtggtttcccacagtcggggctgacttttcatggtgtatctttttctgtattttgaatcttgtaccttgtgcacatactacctaataattttttttaaagaaggaaaaaaggatgggtagaaagaaaggagggtaggcggaggtggggaagaagtctttcacctttgctctgcattttcacatagacgatttcagttaatactctccagaaactggtgcaaggttatcatttttagaccgagaaactgaagctcagaagtctgaaatgacttgcccaagttcatggagagagttagccttggaacctggcattgaattcagtcctgactccagagccattggactcatctctgtcagttttcttttcttgctttcttatatttattttatttttttgagacaggtctcactctgtcacccacgctagaatgcagtggtacgatcatagctcactgcagcctcaaactcctgggctcaagtgatcctcctgcctcggcctcccaagtagctgggactacaggcatgtaccatcatgcctggctcatttttaaattttttgtagaggtggggtctgtgctggtctcaagctaacggcctcagtgattcttccaccttggcttcccaaggattataggcgtgggccactgtgcctggcctcttgttttttttaaccaacatttcattggtcaaggacaaatggccatacmccatagcctagacccatctctgcaaagggagtgactgtaaagaaacttccactcctgcctctgcagctggcttgtgcctacggggcaaaagctcaggcagtaggtggtaaaggcaagcccagagcccagccagccacatcagacacttcgaggaggattacggattggctctgcagtcctgcctttgaagttcccagcttttatcagaatgtctgaaccttagcgttatttcaagggagcttttctttctgtctgtaaactggcctcaggtaggtgccagctgctgccaggtgctgagggagcatttcctggctccctaagctggtgcattcactttgttttatggcagggaactttttaggggtaaaggcacttggtacttggaagattctgggagaataactttttaaaaatatttttctattcagaagtgccattggatagcatgtctttaattaaagggagggagaggtgcatttttattatttgtttcccagaaccacctgtgctgtttttcaaagtagggtattgactgcttcctccttgctgatgagaaatgctgtatggagaacaaagctgaaagtgttggccatatataatacaaggctgtaatttacaggctatagcttcaccaggggaagaatttgatgtctttaagagatacaaaatcatccagctccggctgtccttgtgtgtggtgccatatttattttctaacttggagtcatcattctttaagaaagaagcagggtccttttgggctgaggaatgctctcgggggtaggaagttttcgggatctgtgggcctgagctggcatgtccaacatcctgtcactatactgcttggcatcttgcaagggatgcatcctaatgacccaycctgtccacttttgtttggttacttggtgaaggtgggagtgtcttgaacagcatggtgctgttcccctgkaaagtttatactcatcagtgcccagttgtttgcagaattcgagaatggatgggaagcacccaggaaacggttcccaaatggatgcattttgatatctgaaatagactttaaagcttttggcttttgatcataaagggaccggcaacattgagacacctccccactgctcctcaggttttcctggtgcttgaataattaaggccatgccctatggaatctccttccttgggctccagggcatctctcttagcaaaggctagcttctcactcacagtgtgctgtgagcgctctggacgtcctacccagcattctgctccatcatcttcttgtgttctgtctcccccagaaaaacttctgtgtaacatcagctgtgttcttttgcttcaattacagagcttgttagaatttctcttccaaatccctgttttggggcttttcttttcttttttcttttttttttttttttgaaatggagtcttgctctgtcacccagactggaggacagtggcgtgatctcgactcactgcaacctccgcctcccggattcaagcagttcacctgcctcagcttcctgaatagctgggatcacaggcgtgtgccaccacacccagctactttttgtatttttagtagagccggggtttcaccatgttggcaggctggtcttgaactcctgacttcaggtgatccgcctaccgtggcctcccaaagtgctgagattacaggcgtgagccaccgcgcccagctggggttttcctaccgtggttgtaaaaattcatttcttgtcgccacctagattaacaaatctcagattaagaactggccttttttcgcctcctctttgaattcactgtctaaagaaacggccattgccctttccgtaaaccaggacagaggtcatgtctgctttgcctttttgcaccttggcccctgcctgcccctcacctccccactcagctacagtgactggaagggcccacacaggaaagctgggccctgggtcttcatggacgttgctggaggatgtgtctccctgctggtggctctcagtcttcctgtgctcagtagggccttctggaggattctaatttccctgtcctggaaaccaccttgaaaatattcttaaatattcttaggtggatttaagatgtctctgtctagtggttttttgtttgtttgtttgttttttaatccatcttagatttgaatgcccaaggaatgaacagtctcttggatcttgtatctcttccttttgttttttagaaaatagcttttattgatttttttttcttgctacaaagaggttgatgattattgcagaaaatttagggactataagtaggcaaaaaagataaaaaccacctataattattaatattttagtatattgtatagcccccccagaatatttttcaatttcaaaagatgagatcatactgtttgtaccatcttattactttttctttctttttttttttttttttttttgcttttactttacaacatgtgattaaaatttccatcaggttaagcagcctccgtcaagtcactttaaagggttgtatagttcttttgaacagatggactatcatttatttaaccaatctcctacatttagcttgtttcctctgtttctgtcttgtaaagaatgctgtggtaaacatccttgggtatatttgcccacagacttggttatttccttgggatacatctccagaagagaatcactgggccaaggacacattctaaaggctgttcgtctagatgggtaaattgcccccagacacattgtatcatatttggattctgtttagccaaatactaactcccattcttttaaacatggttgtgagtctttcagacctctgtttcctaatgtttctcacgggtcatacaggttggctgagagtaaatggcaaggaarggcctgagagactccgggcacagctgacctaggaaagggagtctgtcatcctggcccrtcgctttacaatgggagtgcgagggctgggcccagagaccctgtcttgcctcccatgaccccaggaagctgcaggcctgtggctccccagggtaaccttctctggtgccagccgttagggtgcccgggacagagagctggctttgaggattccagagtctgtcagagaacttaggctggtctttcttccaagagaatgctcctaaacaaacatcctgccctaatccagagactaggttggtgcttattggggggcggtgagtgggggagccgaggatttcctgtgsaggcctcagactctagcccaggagtccaggccaaggaagtgcctctgcccagactttcagccccttgaagcccagttcttcgtcatcacttggtgtggggaacagagggaagtttgatggaattactgaggaagtagcatttacgtggtctaaatcggaccttcctgttcccactgctgaccggctcttcctccttttccgctgtcttcctcctgcgtgacagcgcattcttcatggggcctctggggcccttcctgtgggctgagcttctttcttcccttttctctcctgccgggacctagactggtgcccaccttcaggactgggcacatccaggcacctcacagccccttccctcctccagctctgctaccaacgcccctgcacccttccgtccaggcagggctgtcccagctgaggcccaagcccagcccaccctttcttctcagttctgccaagaaggccatgggggctggtggaggcccgaactgcctccccgcccccggggagacacagcatgccagctgctgccgggatgggttacaaaaaacaaaaacacaaaccccagccccttgagatgagggacgtttcggtttctgtgaacctgacgcctcatgtgtgttggaaatgagaggcgcagtttgggagaaggaggctgcatgtttcccctggggtgggctttgtttaaattttaatatgctcttcctttttctcaaagtgccagcaatggctcccagctcctttgtcattttagccccgttatctgtctggggatgagatctcttatctgcccggtcctccctctcctccctgaatggcgggtcccccacccgcctccccgcaacttgtgacagtgttacagatctcattctgcaaccttagattcagatgaaacttgtcactttgcttctttaatcaattaagatttggggaaagcaggggtccatttgtgatagtgttggacccaccaagggcatgagtagtgggcaactttggagtcctgtgagagagggtgtggcacccccccccccttagcagcctgggggacgtcagctccaagggtgagggtttcagccctgggttccttgctatggagtcaaacgtttctccagtgtgtgttcagacttctgacctggacccgccttagccttggggagctctctcaactgcgtcctttgttggatggaaactgcattagacacagaaacacagagctgctcttttccccacaggcaggtgcagacctgaaagagccccgctgaagcggctcagaggcaaggggaggacctcatccttaagtcacaggactcaggattagaggacctacagctttcagcctcggctcaccatctcctagccctgatgacccacagcctccccaagccttggtttcacagcctgtraaatgggttcatgagcctacttttcatagctacactgtgtgtttgtatataacccatggctatcactattacctgcggaccgcggtgctrtgaagtcaggagacaggcctgcaccatcctgaatcctctgttctctgaaaaatcgccctttgttctctcttacttccttcattcaatcagcaaacatttaccaactacctaccatgtgttaaactctgtcatattaaggtgaatggcatggtctctctccccagtgagcccccagtccagaaggggtactagatattggatatagacacaaaagcacaggaagttagctcttcgaatgtgctgggggcagggggctgtagggaagactgcttggtggaggtggtgtctagctgagtcctagcagacaaaggcggcatgggggaccaggcgtggtggctcacacctgtaatcccagcactttgggaggctgaggcaggcggatcacctgaggtcagaagttcaagaccaggtgaacatagcaaaacccgtctctactaaaaatacaaaaattagccgggcatggtggcgcatgcctgtaagtcccakctacttgggaggctgaggcaggagaatcgcttgaaccagggaggcagaggttgcagtgagctgagatccagccactgtacttcaggctgggttacagagcgagactctgtctcaaaaaacaaaacaaggctgggtacagtggctcacgcctgtaatcccagaactttgggtggccgaggcgagcgaatcacgaggtcaggagttcaagaccagcctgaccaatatagtgaaaccccatctctactaaaaatacaaaaattagccgggtgtggtggtgcatgcctgtaatcccagctactcaggaggctgaggcaggagaatcgcttgaacctgggaggcagaggttgcagtgagccgagattgcgccactgcactccagcctgggggacagagtgagactctgtctcaaaaaaacaaaacaaaacaaaaaggaggcatgggggactcaaacatgcaaaggcagcaagggacacacttgaggagtccgagggggattgtgggtgagatggtagaagatgaggctgcaggtataggtagggaccaactgagaatgtgtcaaaaggctcgggcttcatcctgaggcctgggaggccactagtgggttctgagcaaagaaacactmtggcggatcactctggcataagccgggagacttggggcttgtgttgttaaatccctatggggaaatccctttggaaatgttgacctgagagacgagaaacccctcagaggaatacatatggcacttttacttgaattccttttcatttcgcctagaatttctgctttgcaccagctgtttacatataatttacaaaagtacattaatgggcttgattgtgtttcttaaaactcactgagaagtaaccccaagtaaaatttttccactggggcatgttcttaatacatatttatagttactgaatccatttgagaatgtagaaagctcttttgaaatgttgcgggagtacatgacatcttcaggtagggttttccccagtcctggcaaggggaagagaaggagaattaatgtctgtcaagtagctgctataggccggacactgatctagattctttgaattcagtgacccactgagaaatagcattcctctccccattttacrgacagggaaactgaggcttatgaaggtggctgctttcccaaggcctcgcacctataaggagtggtagtgggatttgaacccagatgcgatgagtccaaagctcacactccatccattgaaccactctgccacccagctcctaagacctaccagaaaagtaaagcaggagctacagaggtrggtgagccactggasagcctggtggcttctagataaaaatcagagctaaaacaccagctcatttccattctccttgcacaagttcttctgctggctgacaaactggaagccagcccttctttgggtagcastcttccaaagagtgatagctgcaagttcttggctacattctgagttggaggttcagcccactgcatggagcagcaggtaggaagttggtgcctgtaggtggcatcaaattgaacataaacacacttgcaggtgaaccaggcatggtggctcatgcctgtaatccctgtgactcaggtggctgaggcaggaagatctcttgagcccaagagttcacggctgcagtgaaccatgatcacaccactgcacaccagcctgggtgacagagtgagaccccaactctattaaaagcaaaataaaacaaaacaatgcttgaccaggcatggtggctcacacctgtaatcccagcactttgggaggccaaggcaggtggatcattgagctcagaagttcgagaccagcctaggcagcatggcaaaacccggtctctaccaaaaatacaaaaaaattagctggacatagtggcatacacctgtagtcccagctactcgggargctaagataggcagatcacttgagcctgggaggtggaggttgcagtgagccgagatcgtgccactgcactgcagtctgggtgacagagtgagaccttcaaaaaaaaaaaagcatgcttgaaggtggcaacccagaacacccagccatggagtagggagsgggcaaggaccaggtttatagagaaaggatgtctgtggctcttttccctggccacatgatgcaaccctycttcccaccccttacctaagccatgcccaggcggcgagcattcccagaaaacaagatgctccactggggcactgggcaccccagtatctctgcccatcactgcagttcttttggcccatgccttatttcattggccatcttaacacattccccccagaaaagggcaccccggtcaggatgctcttcccctgactttctaggagtgtcttcctycctctgactcctatggacccggaccccaccagactatgttgggggtgggagggtcattggatgccagttgagacagctgatggccccccacctgtgcttcttcctcccatctggtccagaggattcagatccatgagaatgggtggcagagaaagagaggaggaagaccccggtgcaagatgactcccagtaatggcagtagatgtgtggggaagggagcgcaggtggctgcaaggccgtggcgcctgggcagtgcattcacctgcttgtgaaatgatgggtcccccaggaactactctgtctgtggcttccttgccatgccccctcttcctctcatactttatcatctctgctgcctctccctccacctccatccttgctttcttctgagggtgggcaggtaggtctccctgctagatcaggctgctacatctccctggagtttttggccacctcctctcctgagctgccggtgttggggtgggtggcaggaaccgatagaacatccaaggtgaacatcggccaccctttccattagcaagggcctgcaccgggtatttggccagagttcctctgaattcacttggtctctggcagttgacctygggttgaaaatgcagttttttgagtgggctttagagatcatgctgaggaagaaagaaaatagcgtgcayggatgtgttgctgtggttggatttcactggctgtttttcatatacctgtcttttccctgtgagagaaaacagccatgacagtaagcaggggaagctcatttgagagtaggggacgtggagggatgagggcagttctccggggcacccctgaaaatgaatttcctcctccagagccagggtgaccgggtccctcacagggccaccgtctgcaggcatcaacactcttttgggtctaaatccaattattcctcaagttcttcttggtggcttccttcactctctggccagggggagttttgcagaaatactgttctaacagcagagcatgtctgtgaccaaaccttgggcaaatacatatttaaagaaatcttattattaaaatagtcaaccttatggtttatgtagacaatctgataaacacagacaagggtaaagacagtacaaattgctccataatctcacaagctggaaattaccaacaccatttagtacttttgtgtatttcctcacagcctttttcattgcatatatgtaaatacactgtattttaaacatggttacaagcacattgaactttatatcatttttctttttcatttgacataacattatggcaaacaaaaactttaaaaaagcacatgggctttacaagtgagcatatgctttgcaaacatttctgtcagctaccagtaaccaactgcaaaaactcatattctrcccaaaacagaaattgtgccagtcggggagtcctttgatcaccatgcagtaaacctcgccaaaatattgtaaatttaaacaaactaaaacccaaccacttgaaaaaatttaaagcacttaaattgctattggttcaaggaagaaataaagaatgtactgacaaatatttagaaagcattgaaaactagaatgccacatacccaaacctatgggagacagctggcactattctcatagccttaaatgcttttattattaaaaagggagagagaaaaggcaaataaactaagcattcagcctgagtgcttaggraaaaaaaagaataaaaacagcccctaaggaaaatgagaggggaaaaaaatagtaaagataaaggcagaaatcaatgaattaagaaacrgaaacacagtgaaatyagcaaacgtatccaagagctgattctgtttttaaacaaacagtaaagtagcctaacccctggcaattctatttgagaaataaaagggagaaatgagaaaaaaaacaaaacaacaacaacaamaamaaaaaaaaaaaagggaatgagaaaggggacattgcaatagatacagaggagattttaaaataatagaaaygtatgcacaatcataggcataatttcaaaatctcaattaaatgcatgcttttctgaaaatatatatgttgctaattgagaaaaaattttcaatccttatcgaagcattgcccctctacccaccaaagacactggtcccaagtgtttttgctagttaattattttgaatttgataatactgataatgctaagctgttccacagcttagcaaaagatggagagctctccagttcattctacaaagcaaaataagcctgatattaaacatggcaaagagactattttgaagcatgaaaatgctgggtaggaaatagaattcaataatatattaaacaagtcatccaccataacccagtggggcaggaggaaagaatagtcaatattaggaaagcttaatatagtaactacgtcatgctaatgcattaaaaaagtaaaaccgtattgtttccaatatgtgctggggaaaaatgattaaattgaacaaccatgtctacctaatcaatacagcaaaaaaaaggaacagaagggtgcattcttagcataataaaaaatatttcaaaccaataaccaattctgtaattaacttaaacactagaggcattcttgtggaaaccagtaacaaaataaggaggtctgccatcaccatcactatttaacattgcttttaacactctagtcaacatgataatactgaaacagaaacatataaatattataaagaaagagtaaaagtattaaataacagtaagtacaatttaccctctgccaaatcttaggctagaggtttatttccaaagtttagaaccaatagcaaaagtcatcaaaaaattcaacagatttgactaccttaaaaaattgtaacttctttttcttcttctgttttttttttggagacagagtcttgctctgtcgcccaggctggagtgcaatggcgagatctcagctcactgcaatgtccaactccccgggttcaaagcgatttctcctggcctcagcctnnnnnnnnnnnnnnnnnnnnggcgagcgctggcgtggcgcgtctttgtctggtctcggcctgtctcctggcccttgctgttgttgtggctcacgcggtcgtctgtcggtggtgagcggtttgtgtctgtcctggcttttttgcgctcgtccttgtctgttcccgcaccggtgtccggcttgtctcctgtactgcgtcggggcggcgtgtggggctgtttcgtgtggcccgcttttattctctccccggcgaggtcgttagatagttcttactcctctctccgggtttctctatgtcgcggtatatttactgctcttcgctctctgttttcgtatttgaacctctatattttattctatcttaattcttaattttgcgcttcaattgatctcgcgtcctcatccccccaagtatctgggatcactagcgggttcaccaacccggctaattcttgtatttttagtagagacgggtttcaccatgttggtcaggcttgtctcaatctcctgaccttaaatgatccacctgcctcggcctcctcaaagtgctaggattatagacgtgagccatatgcccagccattgatattttaattctaccaagatcctatatatagattcgtttttaaaaatcaagatttaaatttgaaggccttgctcatgcctgtaatactagcactttgggaggacgaggcaggctgatcacttgaggccaggagttcaaaaccagcctgaccaacatggcaaaaccctgtctctactaaaaatacaaaaattagctggatgtggtggtgtgtgcctatagtcccagctgctcggaaggctgaggcatgagaatcacttgaacctgggaggttgcagttagccgagattgtgccactgtactctagccttggtgatggagtgagacactgtctcgaaaaaaaaaaaaaaaagatttaaatttgaagacaatatgcacagacgatataattagcaaacaaatgcccgacctaaagaaaatgccaaatggtgagctccatgaggctaggaaccaggtcagttctgcgtaacagatactaaattgagttaatatttgttgactctattgaattaatatttgttgaagaaattaatgaatgcaatacaagttttgaaagtataccatttttaactttttaaattagaagagtttttaaaagattttattatgaaagaatttcaactattgagaaaaattgaaagtatataacagtaaatacccatacaccaatggctgagatataatagatgttaacatttgccatatttgcttcatctgcacaggtatatatattttttcctgaaccattttgaagaaagttacagagcacacatcatttctcccttcaatagttccgcatacaaatcctctgtcacccagaacttagcaatctgaatgcagggtatgggaagctgctgcactgtgctccaagggtgtctctgcagattgtcccagtctctgagaaggtatttaggagtcaccaacatgacctgctgatatgtaagagaaaagaaaacatgcatttattgtggatcatgccctgtgctgggagtttaccaatggcctcctgtttaaatcctttttacaattctgcccatattacaggaagttgaggttcagagaggttaagtaacttgccccagttgacacagtgtcattattcaccaagtcccttctgacaccatcaaattacctgacatttgcctcttccctttatcttctctgtgcgtgaatgcatggaggtgatttgttgggcagtgtggacagacgggaagcaatctcaatgtcctccagtgcaagaattggcaggcaaatggggatgtgtgtgaacggtgtgactatgaacatgggtgatcgattacggacatgcaagatggaaaattgsttgtggcatccagataagggaaaacaagtaggacaccagattgtatacactgtgatcaaaaccatgtgaaaaacacatgcatgaagaggactgggaagaaatacacaagaagtggttgcattagggtgagaaggagtattcatgtttttctcatccgtctttttcaaaccttttgtaatgggtggttttattaattttataatggaaaatgttaatttaaaagcaagttatttacagtttagtaagctcatggcagggaaaggctgtgctctgtttattgctcttactttttcccaacgcctactcccatgcctggcaattatagagataataaatgtgggtgtggaatgagtgcccactgggaaacctctcagaggactttgacccaggaacatatttgcacagggtttccctcagctggagaaggtttctctgggagagcaccagccaggtgtgtgtcatgggatatatttacagggtggtgagctctcctggtccaacctaaaaggtcccagcaaggtgtaggggcccttctggccatttgacatcaccagggcagttagtgctgatacaaaccacagagaatgaacaaactccaactcaaacgggaatggattttatgtcattctgggactttcaaacttgataatagaccaagcatggtggctcacacatgtaatcctagcactttgggaagccaaggtgggaggatcgcttgcggccaggagattgagaccagcctgggaaaggtagcaagacccagtctctacaaaaaaattttttgttctgttttgtttttgagacagagtctcaactctgtcgtctaggctggagtgcagtggtttgatcttggctcactacaacctccacctccgggttccagtgattctcctgcctcagcctcccgagtagctgggattacaggcacatgccaccatgcccggctaatttttctatttttagtagagatggggtttcaccatgttggccaggctggtctcaaactcctgaccttaggtgatccgcccacctcggcctcccaaagtgctgggattacaggcgtgacccaccgtgcctggccaaaaaactttttagtaattaaaaagatcaagcttgataatcacaatcatatgagcagttattaagtgccagcctaagtgcatttacagacattccttatttaattttcacaacagccattagcattagctatcggccgggcacagtggctcacacctgtaatcccaacactttgggaggctgaggcggatggatcgcctgaggtcaggagttcgagaccagcctggccaacatggtgaaaccccgtctctactaaaaatacaaaattagccggatgtggtggtgcatgcctgtgatcccagctatttgggaggctgaggcaggaaaatcactggaacctgggaggcagaggttgcagtgagccaatatcacgccattgcattccggcctgggcaacaagagcaaaactccatctcaaaaaaaaaaaaaaaaaaaaaaaagaaagaattagctatcagctccattttatagatgaggaaactgaggcacagaggaaggagggatgggtttcaaggcyggtcttggttttgccaagaacttgacttycagcaaatcgtaagccttctgggctttcatttccttgtctctgaacgaaacagctggcaggagttgaatgcttatcatgtgccaggccctggccgaacactctgaacatgtgcgcacagagtgtgtgttaaccagtgggggagggggcaccaagcaggcccatctgggtgggaatatgaagccaccttcccaacagggcagtcacatatgcccagtaggaaagagctgtatctgtgctgcagagagggtcatttcaaattaaaaaaaaaaaaattggctgggcgcggtggctcacgcctgtaatcccagctctttgggaggccgaggcaggcagatcatgaggtcaggagatcaagaccatcctggctaacacggtgaaaccccgtctctacttaaaaaaatacaaaaaattagccgggcatggtggcgcgcgcctgtagtcccagctacttgggaggctgaggcaggagaatggcgtgaacccgggaggcggagcttgcagtgagccgagatcccgccactgcactccagcctgggcgacagagcgagactccgtctcaaaaaaaaagaaaaaaaaaaaaatgcttaatggattgtttggtaacaaatggataccaacaaatacaaaatggccatttctttttctttctttaaagaaacatttgaattggaggcttaggctcatctcaagaggttgtggacccgacagttggtggtgatgggttttgttcataaatgagaataatagttgtgagtttaatccaacacattgattgaagtgaatgaaaaagaacacataagctgtgtgaatatagtgactaatcatagactctcgggattgaaatgtaccctggggggatccaggatgcagcatcacccgggagcttattattaatggaracgaagtatctctcacagcaccctagacctgctgaagcagaatctgcattttagcaagatccccgggtgattcctcagcacatttgagaagcagcgctctcatttgtcctgtctcctttgaggaaatcggaagactagagaggttaagtgaggacacacaggaagttctaaaaaactgtaactctggtctctcaacaccaggtctttgcacagcacttgccccatgggagaaacccggttggttttgtttttgcttgttttgcattcccaagaccaattcttgtgagccactggtcatagcccatctctcttgttttcatgcagcaggggcatcttcagtggccacgtcatctctcactctctgctggggagcttgttaaaatgcagttgcctgggtccagccccaaatccactggatctgggtgggtgggaaccaagtgcctgcaccttaaaataccctcaggtattcctaggtgccagtgttgttacggccagcttgggccagctatgaactgttacagtggctttttattctgaaattaaacctgcagatacttgggctagtatcgactaaagcccattttcatctgaaggaagccatccagctactaacattatattgtgtactgagtattgactgtgaatttctgtttttttgagacggagtctcgctgtcgcccaggctggagtgcagtggcgcgatctcagctcactgcaacctctggctcccaggttcaagcaattctcttgccctcagcctcccaagtagctgggattagaggcgcctgccaccacgcctagctaatttttgtatttttagtagagacagagttttgccatattggccaggctggtctcgagctcccaacctcaggtgatcctccgcctcggtctcccaaagtgctgggattataggcgtgagccactgtgtccagcctactgtgaattgctcattaatagaacgttctctttcatcctcatccccatggaactccgcagattaaatgtaggtgaatgatcatccccgggcagacaagagtattatggactattcctaagagacgggagagtcagatttgatgaagtcggaaaaataaatggccccctatgactcacaattaacacctgtgtctttggggctgggcacggctgactcatgcactacatatcacacacacatttgagaggcataggcaggagtatcacttgagatcaggaattcgagaccagcccggccaacatggcgaaacgccccctccacttaaaagacgagtactacatcgaaatggtgnnnnnnnnnnnnnnnnnnnncccaaagtgctgggattataggcgtgagccactgtgtccagccactgtgaatttctcattaacagaacgttctctttcaacctcagctccatggaactcagcagatcacatgtggttgaatgtaaattccaggacatttaaatgtattattttctatttttaagagagaggagaggcagattggatgaacttggaaaattaaatggcccccaaaaagtaacaattaagaatgtgtgtttggggctgggcacggtggctcatgcctgcaatcacagcactttgggaggcctaggcaggaggatcacttgaggtcaggagttcgagaccagcctggccaacatggcaaaaccccatctccactaaaaatacaaaaattagctggacatggtggtgggcacctgtaatcccaggtacttgggaggctgaggcaggagaattgcttgaacccaggaggcagaggttgcagtgagctgagattgtgctactgcactccagcctgggcaagagtgagattccatctcaaaaaaaaaaaaaaaagaatgtgtgtttggcctgtatagtcttagctactcaggaggctaaagcaagaggattccttgagtccaggagttcaaggccagcatggacaacatagcaagaacttgtttctaaaaaaagaaaaaaaaagtgtgtgtttgaaatttgaggctctgtggctagaattttcacttaagaggaaatatatatctgcatttaaaattctttaatttataaacattcttgtgtattcttaggccagtgccccacaaaagtatgggccatgcaccagtgctgttctgcacaatgttaaccaagcaagaggaggagctaaacatagaaaatgggattggtgtttagaaacttctgtagtttgacattggcaggatgacatccaaatgggcgattggtggcttcatctcgaacagcgtgtgggccagggtgagcactgttgaccccacgtggcaggactcaggactaaactgcttgttgatgttagatctgagagggattaaggattaagatgaatcaaactgacctttcaccacagagtttgagaagcactggggatgttaaaggtggggaaagtttgcagcgggaggtgtgctttttaagcttaggaagtggaaagcaggagaagagttggacaggcagaagtcttctcgctcccacttcaccctcgagatcccaacaggccagttcaggcagaaaggggttggctcctaggctagccggctactccacgttgagccttctgccttgtcccatatgttcctttttcctgtttttttagagacaggttctcactctgttgcccaggctggagtgcagtgtctgttcacaggcatgatcatagctcactgcagccttgacctcctgggcctgagcratcctcccaactcagcctcccaagtagctgggaccataggcattcgctaccatgcccagcttgtcccatagacttggtttgactctggtcacagagcctggggagaaactccttgattcaaggcagagcaaggtggtttaagagatggccttctgagtcctgcctggcctgggtatggaaacgtgggcgctaccagctgtgcaagcttggcccactgactttctttctttgcccctcagagtttagaaaatgggaatggctggatgcggtggctcatgcctgtaatcccagcacttctgaaggccgaggcaggcagatcacttgaggtcaggagttcaagaccagcttggctaacatggtgaaaccctgtctttactaaaagtacaaaaattagctgggcgtggtagcagctgtagtcccagctactcgggaggctgaggtgggagaatcgcttgaacccaggaggcagaggttgcagtgagccgagatcgcatcattgtactccagcctgggtgacagagtgagactctgtctcaaaaaaaaagaaaagaaaagaaaagaaaagaaaacaggtgaacgacagtcactcctggaggggttcttctgccagatagaaacaagatatcacatgcaagaggctctacacatggtctgcactcaggaaagggaggaattctttgtgctgttttgtctatgttatttgaaaaagtggattgcattgtgggtccccagaagttgccagctgtccttcctgtttccaaattcctgtgtgtgtgtgtgtgtgtgtgtgtgtgtgtgtgtgtgtgtgtattctgtgcctgtggtggtggtggccatggtgtcggcagcagcagggttgtcaggaaacaaccatcggtttcctgctgattaactcagttcctggagggccctccctagcagcaggggaagcctggcagcttggctgagcctcctccggcctctgcctcacccgccagctcttctcaccccttctgagaggcccgcctgctctcctgctaccctagagcccaggacacccttgcaggccttctgagccttctttgttctggccgtgggtggggcacccggctccacctgcctcaggttttgcctgcaggtgcatttcctttgcacacctggcrcctgttggggacttagacctcttccacatcgccccaaggtcgggctgaagagatttggatcttctgagttgcaagctcccagaaacgatgctgttaggaccctctgttcactcagagaaagaggcttgatggccggrgccccagggcttccctgctggtagaaggggtgtctggagggcctctgccttccgtcatcagaaggaggttctagcaaggtaaagaggcccgtatagtactgggattttggatcccttgagtgaaggaccaggcagagaaggggagcactgctggaggatgtcgggggctgggccaggctgggcacaggcacatggccatggtgattgaccgcatttgcctcaccacttcacgtggggacctggcaaccacacaatggccctggggcatggtgtggrggctgagacatgaggcaatggtcttggtctcaaacaccccagcttccggctgctgggcgtcactgacttgctgtggcttcctggcctggctcagcattggccgtccggctcctgcagcagtgacatctccactctggacccatgagcccatcagctcttggtggacaggtttgcacagttgcccctgctgcctgtgcagtgagctggctgcggaaggcaggactcccagggctaggagggtattagcaggctggctttcgggcctcagcaccatcgtgcttcttatgtgccgggacaggatcaggaccatgttgtgcctaacatccggcagaccctggtagcttcttaaatgatgacactttccagcactcacatatctcatctgagttaggccgggctctctagctggggcgggaagccccgcacttcctaatacctggtggctgagtcaacaacatggggacgtgtatttggatagcaaacagcgatcagcagcggagccagcctgctgccttcctgcacccgccttctagcaaaaatgtcctctggaaaggtcagccaggactggctacataattttcaggaccaggtgtaaaatgaaaatgcaggtctcatgtttaaaagtcagtaaaatttaaagaacagcagagcacgaaaccaaatgtgagcccttccttctacacgtggggccccaggcagtggcaccattgcatgcccccaaggcagcctggagtcagcrtttcccagccttgtgaagtcctcatgcttccaagggtggcaggattgggtcctctttggtagaagagctgcttggcatcctgagacgcactcgccccatccggccccacaagcagctttctcaagagctggagtgacttccacttcgaagcgcaagcacttcaccttctcctttttgttcttctctaccctgtttccttctttctttgtgaactcagaaagctttgagactcccctcccgttcctcctttcttcccctccactcttgccgcccgccccccaccccctccgcctctgtttctctctccctctttcccttgcttttatctgggggaacccctttcacaggtttgctgtataacatttctcttccattcacttggcgcygttcgattttaatgttcctttgaatgacaccaggcgagtgctccttgggtttccgaagcctctctctgaagtggctggagccagcgtcttccccaccgagggacgtcccttcagtggcctctggctctgtccagatggtctctccccattgggagcctggaatgaattctcattgtgagcattcatcactcaccacctcctccccacattcagctgtcagtcctactggccgcagtggaaagaaagcctgctccattatttctagtgacagacctggccatcattcccaaggtctgtggctcccatgcaggcctcgagctgggggtggggcagggcatgggaaagggttaaatagataagcccaagacacagtcctggcccccctcatcctcttcacacaggaaccagaagggtcttcagcaacatgcatgggatcgtgttacttctggcttcccatgcctgagaatggcatccagacatggccttcaaggctctgtctgcctcggtgaccccatctccagccactgttcccagttcacatcggggaattctccggccctcctagagaggcagcccaggttgctaaagaggcacttcaagcacatttcaaagaacgcaagaattctggagaggtggagagcaggagaatagcacaagcaagagccagctccagggtcaggctggagatgggaggtcaggcatggtggggaggacgggaagtggggctgggttcaaagcctggctcagcttggaggacctggcaggggctcggggtgggggtggagtgtctcaatcctggtgcacactggagttattcgaagggcttttaaaaattatcaaagttgttccaggttcattccccgggtggcccacacgctgtttttaagtttagctctccaacccttcttcctggtyctccccttcccttggaagaaagtccctggtccagcctgggtgttggcactggcatttgccctcccagggccactgggactgggaatccccaggagggctttcgaaagtgtcaggaaccgctccttccactggggcttttctccactgatgggaaggctgccttgctcagtcagccccaggcccctggacagaaggaactaggggagcactaagcataggtgtccctagagagtcagctggaagggacctagttcagaagaggaaactgagtctcagtcaccagcgagtaccaccactggtggtactcagagcttgggtagcagagcttgggcttttcagccttggacaccaccagctaggatggagtgagggctgagctggaatgcttctgaggaaatgatctctgacccaagcatgccacaattatgagagcatcttcagcactcataagcatcgcaggctggatctctttctctgacctttggatgtggggtgccagaatctgtgcttaaagatgagggakgtcgggcttctgccctcaaagaactctggatctcgagggagcagtgggcctaagcatagagtattctaatacggtcgctaggcttccagagctgtaagagacaggcttgagcagggagagacgaattccccgagggaggccttgatgaggaggtgaagaggcagtgagggtctggtgtctactcccctttaaccacaggcctggccttccagccagggtgctgtaccaaagtgagtgctggggccgctaagtggtgcccaggtactgatttcccctcgacccgcagtcggctgggctgggtgggtctgtggatggtttggaccagccttgcccgattaccccagtgtacggtccaaatatgattttctatgtgtgccatgcagatcaggagcactgtagcaggcccctctctctatcaccagtgcatcactttcatcatggagcaggttgggaaacaagccaaaggctggccccacagacacaaagaataagtcacaactcacccacgtggtgtgtttcctcctaactctttagtttgaaattttcaaacttgacagaaaagttaagaaccttcgtccagattcactcattgttgccattttgccacgttttctttatctcactctctttcacgtggttttgctgagtcatttgaaagtgagttgcagacagcccaccgttaagtacgtcagcaggtatctttcaggagtgtggacttccccatttgcaaccacggtgccatcatcacacctaagaaattaccactgtccaataatatccaatctacaacccattcatatttccccagttgaactccaaaaatgttttcgtatggctgttttcctgatccaaaaatcttcatgcattacatttgggtgttgcgtttctttaccttcttttaatctagaacagcctccctgctctgtgtgtgtgtgtgtgtgtgtgtgtgtgtgtgtgagacattggctttgaagagtccaggaaggccagctgtgttacacaatagatttgtgtaatcgaatatgttcaggttaagtttgcatagtttcaaaactcacctgataattgcttcattgtgtccaggaaagtcctaaggcagagaggctatctctttggctgtctgtccctgtgtgtgttgtggggcatcctgtccagccacccagaaaaagcaatggctttggtaacatgacatgttatgtataaaatgcttcctgccaggtgaggtggctcacgcctataatcccatcactttgggaggccagagggggtggatcacttgaggccagaagttcaagaccagcctggccaacatagtgaaaccccatctctactaaaaatacaaaaattagccaggcgtggtggcaggcgcctgtaaccccagctactcgggaggctgaggcaggagaatcgcttgaacccaggaggtggaggttgcagtgagctgagattgtgccactgcactccagcctggatggcagagcgagactgtctcaaaaaaaaaaaaaaagtgcttctgatgtgtacagatgatttcacctgatgatttcactggcagggcagatgttctcttcatttcgtgggtgggattctgagaggttgaggccatgcccaggtccactatcttaggcaaaagtggaccagatccctgccttgtgacccaccgtggggctttctgcagtgacagctgggagtcttgccccacgactggatgaggtggtctcacctcatttcactcctggatccaatacgtgcttggctgagtgctcaaccgagtattgaatgtaatctaatacagtccaatccatcttgatgactgcaagtcatgattaggagccctcggtgctgagctcaggtatggaggtgtccaagctgcttgccccacccctaatggccataaactgtcactgggtcattttcagcctgcaccctagccagccaccatcatagcctccagcagcgagtggcacctctttcacctccttgggtttcctctgcatctgccgtggtctgggaaactggataaccgtgcttgttagaactgagtccaaagcctccaagcaaggggcgctgtcccataaagaaaaaagtgcctgggacaccaaagtcccctcttcgagtcacccacatctgtttcattctggactctcaactttttcatatgctctgcagttctctagtcttttgggggaaatttgaggtggccagagaagagatctctggacaagtgtaatcttgctatcacatattaggaaagaccataatgtacagcagaggtgcctggtgaggaaacagtcagcatgccagtgagaaccagagcctgggggcactttgtgcatggtggccatactgctggatgaccatgccagcttgggctgtggctgggtgaggtcacccaggcctcaggcctgtgcactgtggccactgcctcctctgcacgtagatcataccgcctttgttgaggaagtcgtgtctgaggatctggtccccagctctaggcaacagcagaaaccctggtacccagatcccccagtctccagggaggtgtccttagtgctccggatggggttgttaaagccacatgtgaacactccgcagattttccctgcaaggtacaagccctccagcctcttccacccaaatgtgtcaccttgggcagcagctccctgaattctgttctttcttgaaggaatttctgttctcatcagttcataagcacagtgccccttctgtttcttggcttaatgctccgggagttcacagtgatcccgatttgacttcacagtgactcctttaccaagccttttttgcttgtttgcttgcttttaattttgttttttatcagagtaatatatgcatctttttttacatcaaacaatactgatgggcttctagtgctaaagcagcaggccccgccccacctcgctccccaactccagccctccagccagttaaccatttgcaaactgcttacttcctccttcctgttatttacgtccatgttctgaaataatatgttactccagtgatttcttgatttatcaatttcggacattatcttttgcctccatattgttgcaagtgaggacttatctctccaccaccctatcattcctcctcctcctctcttagttttatcattaggtcgcaattttgggttaagcccacagtataaatactattcactgctaaacatggcactgaactacgattacttctttaaaacaagagttcattattgtttcttttgttctcactgcgttacttttctctgtgcttctgattcctcctaatacaccaacagattaggaaaacatctattggatgtttatctattggttcactgatcaattctgttttttttttctagacacctaggtatcttgccagttaaattcttttcttttctctttgtttgtctgtttggttggtttttagagatagggtctcactctgtcacccaagctagaatgcagcggcatgatcacagctccaacatctgggctcaagtgatcttcccacctcagcctccagagtagctaagactaccagcatgcaccaacatgcctggctaatttttttattttttgtagaggtgaggtctcactatattgcttaggctggtgtcaaactcccaggctcaagcgatcctcctcccttgggctcttaaaagtgctgggattataggtatgagccactgggcctggccaccagtgaaattctttatatctttttcaaagcaaatgaaaattttgttcactttaatatattaaaataactccatgccacctcctctgaaagagcttccctgaacctccagcctctctaagtctgcccctcctctgttcttgttctaacgcagcctttacacaccaaattaaaattgcctgttttcttgcctgttgctctcacaacaccataagttcttaagggcaggaccgagtcttgtgcactgctatctccctaggaatgcacaggagctggatggcacatggtaggtgctcaacaaatatttgtgggatttgcctttgtcaaatggaagcacaacagtgattttataggctgctggtggctaggttaaatatctgccccatgcctctttgtttttgatttttttttttttttttttttttgagatagagtttcgctctgttgcccaggcttgagtgcagtggcatgatctcagctcactgcaaccactgcatcccgggttcaagtgattctcctgcctcagcctcccaggtagctgggattacaggcgcccactaccacgtctggcttatttttgtatttttagtagagatggggtttcaccatgtgggccaggctggcttgaactcctgacctcaggtgatccacccgcctcagccttccaaagtgctgggattacaggcgagagccaccgtgcccggcccctgtgcctctttgtattttccatgcccccccttctctccagcctccttgttgggttcggaggccctcctggggcctgttccagcgaaataacagccttttccagataaagatggaaaggaagggttttctttccctgatccattgtgtctcccccccaccccctccaggcagcattaggttggccccaagcacctcagggctccggactggtccttgtcgctttataatcccagcccacaccactgagctccacacagactgagcgctcagtagatgagtaaggttgagactcgctcaatcaatcaatcaataaaccaatcagtcttcctccactcagcctctctgctccccggcgtttctcattatctagcgtttggatgatcagaaggaaaaaggagctgctgcgtaaaggtgaccccatttcaggtytcgtcatgactcgctaggtactgagagacagcaggagaagggaagacaaagaagggggacagggaacactcacctgtgatcgcagagggacattttgggagacacacggtcactagactgagggctgtgtgtgggcatttgccggcacgatctggtgtgtaacagaggcccaaccaggaaggacaggaaatctaaatccaggttagggcacgtatattgcacccagcctttgggtcttggctaactcaggaaggtgctggtcggcggtgacccgtgatgtgagaacacgcctcaacgtccaaagaggccctccctcgtgagtgacatagacccaacagctggtggcctgtaaaaagagccaacccacccgcttaccctcctggagtgagggcccagcctgagcaggcggcgggcttctttggagcagtccctcgaggggacagcccatcccagggctgactcagaatgcccttcaccccacaccccaccggrgaccgagcacctcctgtgtgcaggcagccggagaactgggtggacacggcccaggcagggtgagttgccacggctttcacctccagccagggcagctgcctcactgagaaccccctcatctgccccgctacctggttaagggcccgagggctctcatagaggagacctgcgggcacccagggggccgagctgcctttggagactgagccttgtgcacagcatcacaggccagggctctctcccttggctcacccaggaccctatgggaggaggccacagccaggcggccagggcagggagcagccgaccctgtaataaagctgatggctgccggcctgtggcgcccctggagagggagcaactccccttgggggtgtaacctgtttcggggaagcctttacagcagctctttgatgtttctccagtggaactgaatttattttttgtacttttaggaattaacttgcagtgctcagcctctccctccccagaaaggagagaaggagaaaagaagaaagggtttgcattgtcaccgtgattggcaccgcctgtgaatgaggggtcactgcttcaggctgctccttttcaagcaggcctttctcccctgcacgctgcattcacgctagaacattctttctttcaaagcttctgtctttctctcccccgccctttgtgtctctgccttccttcccttcacttttgcctttcattctgagccctcaccacctcccttaggcttcactctctttccctcttttttcccctttttcttcttctattcagttcctttttttttcccctcttgcctctctctctcccttttaaatttcttttttctttttctttttgaatagtgcttctgttttcaagggaagagaccagtagggaagtgggtttatttgagagagggagaatatgttttttctccattgctctaaatgtgtaaaacaacaacaacaaacaacaaaaacctgttgaagacactgttttcttttaggctcctgctttaaagagggaagggtgtttgggggtctccaccagccgtagggacctgttcgtcacacaggaggagtcctgagtgggtcagcagggataggtgactgaaggcgtgaggtgggactggcaggatctagacatggccttggcatccttcccttctgcctggcccaatatggggctcaagatgagggtgaaggcagaggcggatgtggtcccacgggcctccccactctggcggagcgtggtgtcgccattccctgccaaggcggggctaggtggcgtccgtgtgaacatgacacaggggctgagtgtgaggaagggggccggtccacacgacacaagctggaccgacagctgagctkgataaccctcaccaaataaggggcccgccaccttgggtttggcagcctgtgttgacacatcctttgtgacagggacacatgtgtcccacgcatcagagggatttcaaaatgtcacctgggagctatagagaattttcactcaggttttcctaaattatccaaacagaacagtttggttttttccctgtaggcctctttatttttctttaaacctgtggaaacgaacctcctctgagagccgacatatgcttgtcaatcaggcatgtgcgtgtgcctggttagcacatttactttacctgttaaagcagtggctcctctcctgtgtgcatgggtcagtggatagcaccgcagcaaggccagcactttctacatccccaggggccaccagtcrctgtggtctgaggagtaaaggtggccctgcctactcttgaggtgtgtttatacctgtgtaggccaaacccccgcactgtgtcacacctccacattacaatcactgctccctcccccagagtgcctttcttctgttagtctgcctgctgaactcctacacaacctacaaaaccttgctcaggtgtcacctccccctttgactcccccacataagacttaatcacatctccctttatccatctcctgggagttgtatgtcatagctgtcaactcactaaggtaatcatccatttactgtggctgctggagggcggagactgttgtcttcatctctctagctcctaggagaatggtgtgctgtccatgtttgccaggcagaaaagccttgcaaaacmtcagtcactctacagtgacctcagagcttgagcctggtcaactggaacagcagaaagaaggaagctggaaatggcggatggcttcaaggacgtgagccatggagaggttagacagtgacggctgacaggtttgccgtctgggaactgttgcggacctgggtaagggtgcagctctagtgaggtcaacactgaggtgagcgcagaagccatgagagatggtttctctgagggagtccactcaggccaaggcctgagcccaggggccgctgggatgcaggaggccagggagtggtggtggtgcgtggcctgtgagctcagagagggttgtgtggctgctgccagatgaggaggaggcccagctcaaagctcctgtgtttggcaaagggctgccaccttccagaggacagctgagctctggtggaggggacagatatcatagagtagagcttgaggaggtgatggaggacatagatctggccccagtttagggggtggagagaaaacaagaaatyggacattgccagggttgcagcgggctgtggtgcatgaaagctttgagctggaggccagagagggaagagacgcgaggtagcaggggccaggtctcttctggaggacctaccgcatgtctcggcacatttctgccctgtagaaggggcacgtcgggcagcgggcctggaagaccctgggtacctcctcaaagcacagaaaaagggacctggtcacactctgggtcccccagggccacagagaaagcttgtggggctcccgtccagccagggttcccaggggccccaggaaaaggcatggtctctggggggacacagggctctctgcagaaggaagctacctctgggagggagccctgagatgtcagtggcctgggctatgtgagatgagggctccaggcccaggtgtgctggcacaagccatcaggcctggaggtgtggccggcaggaccctcccaaggcagaaccctgtgtgcccttcctcctgcgtacccagctcagtgcccagyccatagtaggcgcttcatgaatgtttgctgaagtgtgaattgcatgttgttagcagatgtagagtggaaacagtacagctcacagccaagtgctgtgtaaattgtaaagccttatgcaaaggggagtcctatccctgccccrcagagcccagggcctcagggaaggggccatatcctccccaagaagactagaggagggtggaggagggcggagggacgagtcagtgccaggtatggagggcggcaggagaaggaagggctagtgaccaagccagacacccagacgggtggggacaatgagcccactcatcagtagtgaccagacccaggtagaggaagagtgtcagttggatgtggaaatgagggaggtggatctgaagccccgtgatatggtgctgagcccctactatgtgcaagttgggtgctaacacccacttcccaggaggagggtctggggctccaaaggggttggggaaaaggctgtcctccctctgagtctgggtgaccaagacaagatgagctgtggtgtgggtaaaggtagcagggagtctgcttatctagggacgtttgggatttatgctccaggaaagggatcaagatggctttggggcaggcaccatagagatttgagcctgggcccaggggaggaggccaccattgctcttcctggccccacctgcttctcagcatactgctggcaacccggaagctgccagggcaggcctgcaaggccatcaggtttttccagtttgggcaagaacgtctccttacgcccatgaagatgcccacgcacagccacgctggcctagagatgaaagaggttctgggggtgggtggggacaggacgagggtccgagtttgtgaacaagctttrcaggcatgtttccagggycccagtttcccaggtggcagggcacctagcagtcgattctcccctaagaactggcatcaaggagtccagctcctcccgtaactaacgtgtggcccaggcgagctgctgagtgctaataatagcagcaaacaccacaagcgtgccaggttctgctttcagcactttacatattttaactggtgaggcaggtgctcttggtaccaccccactttagtaaggagaaagagtcatgccattgggaagtagcagaggatgcaaactcaggccttcaactctagagtctggatctaaaccggtgcttcaaaacctggtggggttttttaaagtccatttctacgcctcacagactaatactttatcaacctggctcaaatatcacagcattttcacattgctatacaagtttcttttctttttcttttttctttttttttttttgagacagagtcttgctctgtcgccaggctggggtgtagtggtgcgatctcagctcaccgcaacctccaactcccgggttcaaatgattctcctgcctcagcctccgagtagctgggactacaggcatgcaccaccgcaccgggctgatttttgtattttttctagtagaggcggcatttcaccatgttggccaggctggtcttgaactcctgacctcaaatgatccacccatttcggcctcccaaaatgctgggattacaggcatgagccactgcacccagccaagtttctaaggctacgcttatgtatttggaagcagtcccagagctcgagggtcgtgctgtgaggagcaatgttctaaagctattaaccgttctgtgcctcagtttccatatttgtaaaacagggtgatggcaccagtaccagccataggctgcagtcaggattaaatgacacactgtgctgaaagttggcccaggttggcactgtcactctcagggcagccagccagtctgtgaacgtcggttttgccattaggaataagagcccacacaggtgctgcccattcagatgccagtgcagaacctggcagggagcatcccatgacttcatgcctgggaaagctttgtaaactgyagagggctgtagctgtgtgagcaggcctgctcattctcttgcccagcctgtctttctgagtcccaggagatcttgtgtttccttcttcactttggcacccagagctgggggcatttggaggagagaacccacggggttcccaggggcaggccctgagtgcttcagagccaggacgaagccctggcatcagcacagggaggagggtgacttgcytcctggctgtgcacrtgtgagtgcgtgtgggcttcacacaagaagcttctgggcgttttggtttcaggggtcggggccagcacggggcagggtgggggtcccattcttggacccagcccttccctctgacccatctgagctgcgtttgtttgctgaggagtgggtcattccagctggcaggagtgtgatcccagaaagagattatctacactctggtgaggagagttggatcttgtacttcgtttaggaatgtggtcttctgagctacctggatgagttgtaaaatttcagaaaagaggtagcatctgtgacgagacttctagaagcccacagaagatgccttcccgcctctccagggtcctcctcaggttctggggcccaagggaccctcacagccccacaggcactggggttgagattgcccatttcctggcaacccaggggctcccgtgtggaccaaggacttgagctagaaccttccgtgggaccgggtccattcccagcatctctgtccttccttacacttgatctcattactttttccaagtgttcgtcctctccccactccttcatgggatttagatatttttagtgatagtgagaacatgtcaaatgtttaggggccctgggtgactcatattgtatgtgtacatatattgtggtgtaaaggcttaaactgaccatttatcagaagccagcccccagttccaggyatatcccattgcattaccttattgaatcttcyctaccatcctgtggggaaggcagctgttatccccattttgcagttgagaaaacagaggccctgagagatgaagcaacttgcccaaagcagtacagcgaggaggtggccaggccaattctagagcttccaattgctgaggggccccaccctacctccatggcctggccggaggggcctcaaccccacagtcagtcgcaccgcaggcagaggggacggaaaccctcacaccactagtcacagccagccattcgcttgttttataatcatcccctctactaaagtcactttcgcccttgggtcacacacatgcatttgaattccagcatctgggacacatggcccagagcctaccaccctgcagacagggcttccaagctcctacaggtcatcctctgtgatccggattgaagaggaaactagttcctgctctgggctgagctgaccacgttgggtaccctcccctgtgacatccatggtcctgccctcgagaccctcttccgtctctccttcccaggccccactgccctctggttctcctcccgcctctcctctaccctgcagccaacaggctgccttggcctcctcctttgtgagctcctagtaatgagcagacccaggagctcctggctgggatgcccatcatgtggctcccgccttctctgaacttcttatctgaggcgagcatctccctccgcagctcaactgcagggtccagtgtgggtacccaggcttccaccccttgcataggtcctacccctcagctcactgcatgaaagtatcattgttaggtgactgaggaaggcatggctttgcgcgctgctcctgcctgcctctgatgatagcctgtgtggacggccgcatgtgtctgatgtctgcgtgtgtacgctatcagctgatacgttgcaccagctgtccctccccccaggagatacatgaaggcattacgtgaatgagagaggcattctttactcctcctggcataaatccgtactcgagctgggtgtgtgggtgactgcaaaataaatgttgattacagtagtggcttcgggaggcagctgctgccaggggctctgctggcatggaggcccagggaggagtcataacactgccatgagaacggagagggcttgtgcccaggccatactcttcacctgccctcagacctcagcaccttccctacctcctgcgcttctgtccgctttcccttcccttctccgtcccatgcttccagcctgggcaggccctcctctctggctgggtctatgggggaaggggtcttcctaatcagcttctcccttctctaggcctccctggacccctccacccaacctttgggtaataaacaccacagatcatcctcatttgtctaacgggctcagttaaaccccctaacaactccaggaagtgagaaccattatctcatgccacagatgaggagactgaggcacacacagaccaaggtgtgagtggtggggccagactgcagtctgaccctgcggcccatgccctgagtttattgcctcccaaagtgtccatttatatggaagaacattcctgataccttaagtttgttttttttttttaagcacatttatttactgcttatttcctatgtgatattttccactactattttgtggttcttaatcttgtctctagccaaattgtgaggtcctgagactggggatctttgtgcctcaccagcacccagcaccagcctggccggatgataggaacaataataatagcaattgcacaggctggggcaccgtggctcacgcctgtaatcccagcactttgggaggccgaggtgggcggatcacttgaggtcaggagttggagaccaacctggccaacatggtgaaaccccatctctactaaaaatacaaaaattagccgggtgtggtgacacatgcctgtagtcccagctacttgggaggctgaggcaggagaatcgcttgaacccgagaggcggaggttgcagtgagccaagatcgtgccgctgcactccagcctgggcgacacagccagactccgtctcaaaaaaaaaaaaaaaaaattagcggtcactcccagtaactgggtccttactatgcatcagcccttatgaaacacatcatttcccttatctcctttatcttaaaagcacaggcagactaggcgcagtggttcacgcctgcaatcccagcactttgggaggctgaggcgggcggatcgcctgaggtcaggagttcaagaccagcctggccaacatggcaaaacctgcctctactaaaaatacaaaaattagctgggtgtggtggtgggtgcctgtaatcccaattatttgggaggctgaggcaggagaatcgcttgaactggggaggcagaggttgcagtgagctgagatggcgccactgcactccagccttggcgacagagtgagactttgtctcaaaataataataataattaattaattaataaaagcagaggcatttaggttagacccaactccacttattctctggtgtacctggtaaccgtgggtgaatcactcaactcctgtgccttggtttcctcctctgtaaatacgttttgttgtcaagattctgtgctgtataaaaatgatctcaacaggcacaactccaggctgaaaggaagggctcagtgattagacccttctcctgtcactatacagacaaggaaaccaaatcccagggaggttgagacacttgcctgagggtgtacagctcctaagtggcagagctgggggtggaggacaggtctgctggactgagaaccatgtatccctcccttctaccacctgcagaggaaggggctgtccttccccatttcctccccacctctgctgcttctcatctccccctcctcggaccttgctcctggggcccaggaggtgctgagccagccttttagtggaggactaccaataccatggcccctccctggcctgatccctggcgcagcaacgcttctcacctgcagccagacactcacacagctcgagggctcctgaagacctagggcccctttcttcatccccatgtgacttttttttgtcgcaggggacttgatcccattttccaccagtgcatctcttctcttggtcactttgagatgctggggccacagccatcatcggtttgcttcattttctgcagtcaatctccattcccagatctttgtttctcctgtcatttctgatcactcgagattaaaaacagcaatggagaagccaggaggaggctgagctaaggaggactcggagtgatgtgacctcagtcctcccaggaacacaggaagaagaggagtaaatggggaagaatgtgattataatcagctccaatcctgcctttatctcttactggctctgtgacgtagacaaatcacagcttctctaagactcagtttgctcatctgtaaaatgaaaattaaaacgtctatcttgggcctggttcggtggctcacgcctgtaatcccagcactttgggaggccgaggtgggcagatcatctgaggtcaggagttcgagaccagcctggccaacatggtgaaaccccatttctactaaaaatacaaaaaaactagccaggcgtgttggcgcatgcctgtaattccagctacttgggaggctgaggcaggggaatcgcttgaaccggggaggcggaggttgcggtgagctgagatggcgccactgcaccccagcctgggcgacagagagagactctgcctcaaaaaataataattattaaaataaaataaaataaaatgtctatctccctgggacagcctgtcccttgtgcctggtccataatatgagctcagtaaatgatggctgaaaagaaattagaaagaggtggcaacctttcattctgccttaaactcggggcacagacacatgggtgggaaagcccatgaattttgctttctttactcagaggcaatttagaaacatagaagagtgtattttggggaattggtgaatctcaccatcctgtttggagtgagggagctgggcaccctgagcatttgctgggtgcctcagcctggggccaggccctgtgtctcattcacacaaggcaaggtagggcctgaagaggcagcatggggtggtgaatggttgggtttccctggacagcagtgaattcctttttttttttttcttttgagacacggtctcactctgtcacccgggctggagtacagtggtgtgatcacggctcactgcaacctcgacctcccagactcaagccatcctcccactcagccccccaagtagctggtactacaggcacgtgccatcatggcctgttaatattttgtagaaatggggtttcacaatgttgcccagggtggtctcgaactcctgagctcaaatgatcctccctccttggcctcccaaagtgctgggattaygggtgtgagcccctgcgccagtcagcagtgaattcctgcctggagctggtcatgggggatttctgcactggcttaccccctgctctaggtcctgcccttgcttcatcctgatgtgggtgccggcttctcccctaccctgacctcagagaagcagggccaggctctctgggatgcctcctcccagggagcccccccaacacacacttcccacccgtgtgttttcctcctcccttccctaggtgaggtcaatagagaagcttccctgtggcaggcaggggtccgttctggggtttgtctcctccctcctggccactgtggggagtctgacccttagagatgacccgagagagagaaggccgggactgatctggagaagccctggctgatggaatggggtttctttttccctcctttcttccttcttttcttttttatttttaagcaaaagataaataaatgtcaccctgagatgacaagagaacattgaaggagataaaaggagagtaaaagggagcgagagagcagaggcaaaggacagagggggatttggactgtacactgcgatgaggggagagatgaaagagggaagaaagagatgagatgggaaggcaggaccgagtggcagagcggaggatggggttgccacggaaaccgaaggaggggaggaatggagggagaggaagatgggatggagaaggcggagggcttggtgcaggaggggtctgaggcgagkcttggtgaggaggaagggaagccatgaggggctcccaggtgtgaattaggccccggtgtgggaaaacaggttggcaggggaggaagacaagacccagaaagcccatccctgagagctgaggtggagagggctgggtctcggccctgggcccacccagctggggcctgctctatcctgcctgcaggggactgcctcagtttccacgtctgtataatggaaatggtaccccccatcccagaggactgccccgatggctagaaatggtgtgctttcatcccaggccctgatgaagttcaagcgcagtgaatggtcctattgttacttcctttgattcttatctttgtccccttgaacttgtgagctgaagttttgtctgcttttcccgttacacgaagctggtgatctctgggtccaggatagtgtacttgtttgggggacagatgtgcttctttgcttctggacttggaggaaagatatggagccctctggaaacatgaggcctgctgcccctccccctcggaacaggaactggccataaagctcagggaaaagaggcgggcagggtctatctggctgctgtccaaagctggkctcggcaaggggcctcttttttctttgcccttgaatatgggtattctcgaaagggcaacaattyattctatctgtgtactctgctagggatgcagtggtgagcaaacaggcaaggtctctgcccttggagaatgtaatctaactgggatgccagaatctaactgggatggtagctattaggcaagtaattctataaataaataaatcattaacaaatcatttaaagttacaataaggtccaggaaggaaaagtatgaaatttgagattgcacaggacctggggtctagacctggtcagggtggggcagggggtccgggcaagcttcctgaggaagtgwtacctgggctgaaagctgaagggagaggaatgaggaagagcattccaggtaggggaaagcatgtgtgaagaggccgtgtgcaggtgaggtctattaaagaacatcgatgaagtccacgtggcttcacatggagggaggggacagcagcacgttgtggacttgtcatggaggcagggaccaaccagacaagttctggaggcccttggtgagatgtttgggcttgattgcaagagcaatgggaggtgactgggatgtggagcaggtgggatgtcgtgaccgattggtacaagcataaggcttgcttcagtcttctctcttttgactgactattagcatgctagggcaagggacagctgcgtggcagaactcttgagagctcaaaacatttcctgcaggtgggttgaatggtggaaattccttgccccgtacaatctcctgtgcacaccttcatggtccccagacggtagaaggcaaacagyctggtgggagagcctgagctggggggtgacccccatgtttgacatggatagaaggaaacacraggagtcaagagctccacaggcacggtggcccacgcctgtaatcccagcactttgggaggccgaggcaggtggatcacctgaggtcaggagttcaagaccagcctgggaaacatggtgaaaccccgtctctactaaaaaaatacaaaaattagccaggcatagtggtgcacacctgtaatcctagctatctgggaggctgaggcaggagaatcgcttgaaccaggaggtggaggttgcagtgggccaagatcacaccactacattccagcctgggcaacagagcaagactccatcttaaaaaaaaaaaaggccagatgcagtggttcacacctgtaatcccagcactttgggaggccgaggcgggtggatcacctgaggtcggaagttcaagaccagcctgaccaacatggagaaaccccgtctctactaaagatacaaaaaaaattagccaggccgtggtggcgcatgcctgtaatcccagctactcaggaggctgaggcaggagaatcaattgaatccagaaggcggaggttgcggtgagccgagatcataccattgcactccagcctaggcaacaagagcgaaactccgtctcaaaaaaaaaagagctccagattagtcctsactgaggggtaggggccttggggtcttggtttccatatctgtaaaatgatggcattggacaggagggtccccaaagttcctttcagccctgccggtgaagattccaagacccacagccaaagtggctgaagcacagggtcttcagcaaggccaccatcctgccatgggagagccaagcatccctcccttgcagtaaagaagcacgcatgcgtttactgggcatgtgagctgcgaggtgggaggatcaggcccatggcttctgggatcctggtgtcttcagatcataggcggcacattactcctgtacttagcatcaaagagaagctaccatgtgctttttatgcagctctgcaggcagctcagcatttgcccacagtaatttgtgcagcagacgccctgttagtttaggcaggctcatttctataagaaccagaggcccacccaactcacttcagggctaaggggggttgattgccagcgagggttccccaggctaggggcaggggctgggcaccatccagaatcccggtgccttctgggatcagcattcccttgggctctcctcagacacccaccccgccacccccacttgcccaagctctctgcccctttgtgttctggcctcactctaccccatggcgctcctttgtgtgttctttgcacatctgctcctgtggctgatggactgaggcttaatgcagagccatgtttccaagagaggaaactttggcccaagttctttcaggggatggggagggccaggccataggtctgggcccagcttctgtatgaactgccctagatggtgggggtatgctatgcttggaggcccagggctggaagtggggcagctgccattaggcgaaggtgaggaagaaggcacctggggtggggaggggcctcccacttgattcaccaggcaaggccaggtcaccgagagtatgcgtcaactcttgctaattaacttcgaggccgggcacggtggctcacacctataatcccagcacttcgggaggccaagctgggtggatcacttgagcccaggagtttgagaccagcctgggtaacacggtgaaacaccatgtctactaaaaaatccaaaaatgagccaggcgtggtggcgcgctcctgtagtcccagctactcgggtggctgaggcacgagaatcgcttgaagccagaaggtggaggttgcagtgagctgagatcatgccactgcactccagcctgggttacagagcaagactaaataataataataataataataataataataataataataatttggagaatcagaatcacttaagaagcctctagaaaatcccatgtccaggccctgaacccagagattctggtttaactggtctagagtgagaccccggtattggcattctgatcaaacgataccagttctggaactctgtggacccagggtctctgtcttcacaagagtttgtgtctgagaagtcacatcaaaatagttcatgcctcgacatgggggcttcacccctcatatccttgggttttagggtactgtgacctcttagaggagggagatcctcacacaggggccaccctgtggcagtcagrcccacctcagccctcagcttatagaagcagaggcgtggctcccaggtcaggtgtaggtgcacccgggcctggggaatggatcaagagagcgagggttgtcagagcaggccctgtgggaggggctctctcacctgggagggcgtcaggtgagaaagcactcagagctcctgggcctgagctcctggggactctgccattagcaggggaaggcaaggaagaaggcacttggggtggggagggccctctggcttgattcaccggacaaggtcaggtcactgagagtgtgcatctgctcttgctaactaatttggagaggcccttccctatgctgcctggacaccaccccaaggaggaggcaggactgtcctgggagtgaggtgctcagagaagagcaaagccttggtagaactctcaggcaagagtttcactctccatctcacttaccgcattcagtcttggtcccttggcgactgtcagtttccttctcttcccttttctgtacgctggtgtctttctctagagacactcccgtgctgggccccctctgttcctctgcagtcactgtcctgtgggtggcctggctgtcaggggagatgatccacagtgtgattattgtatcagtcagggttctagagtaagaaatagaaccartaggagacactatatatttatatatatatatatatacacacatatacacacacacgtacacagagaggtctcttttaaggaattggctcctgtgattgtgggggctggcaagtccaaaatctgcagggcagacccgggggctggaaactcagcaagattcataagttacagtctcaaggcagaattctttctctgggaagcctcaatgtttgcccttaaggccttcaactgattgatgcccacccacattatggagggtcatctgcttttcttaaagtcaaccgattgtaaatgtgagtcacatctacaggataccttcatagcaacatctagcttagccaagcacacagccgggcaccatagcttagccaagatgacgcatatgatttaccacgacagtgatggtctcaggctgagagagggtcctcatcctgtcctcatgtacttcaagggaagcagtgcttgcactaaatcctcaaagatgatgggaaattcacccagttcgagggaagggcagtcctggcaggggaatcagcctgtgcagaggccccaaggtaggaaacatcggtgagttgggggcagaggggcagtggagcctgcctgggagccatcttgggcagcaaatgaaggcatgggcagtgcatcccgcctaccaaaaggctgtgggggctgcggggccggagacctgcattctagcccttgctcccccaccgtctcactgtgtgaccttggaccattcccttcccctccctgggcctcagtttcctcatctgttaacagggccgggtatggtgcgcatcacgggggtttgtgggttggtggccctgtgtcaggggcccagccactctgactcccagaggtggggctcagtgaatctgtccacagagaaaggggaagcaaggcagagacaggatcgcaggaggaagagactctcgaacttcccctgcccctcccccgtgccggcggcagctccctgggcctctggctcctgaggcctgtgggctgggcagaagtgagactgtggcaaggggccccgaggcacaggccttccagctctcgcttcctcttcccttctgcgcatgtgagtagagtttcccttgaagcctcctgcgaggaggacaacaggggaaaccaagaggctggtttccttaggcggtgaaatcccgtgcatgtttttcacagcgggtgtacaggcctggaacttcctcttctcctcccacctggttacctgtcccgcccactccagcttcagcctctccagccccagggccctggactccaaggggcaaaaggcccagagccacatcctggagggcttgaatgccagacccagggtcaggagccccctccccgctcttgctctgttgggtcctgaactgcctccacggaagccagtcctcagtcctgtccccaccccaccccacccccatactgcagcccccgcctcccagagatccgggtgcttcatgtggactgagcttacgcaagtcaactccccaagggtgagaactttaatttgccccttctatctacccacaagcaagcacctaataggtttagtaaatgtgcattaaatcagtggctcaagcctggcacagtggcttaggcctgtcatcccagcactttgggaggccaaggtgagaagatcgcttgaccccagaagttcaagaccagcctgggcaacttagcaagactccacctctacaaaaacaatgtaaaattagacaggtgtggtggcacatgcctttagtcccacctacttgggaggctgaggcaggaggattgcctgagcccaggagtttgaggctgcagtgagctatgatggcaccactgcactccagcctggacaayagaggaaggcccatctcttaaaaaaataaaaagtcaggccgggcgcagtagctcacgcctgtaatcccagcactctgggaggacgaggcaggtggatcacctgaggtcaggagttcgagaccagcctggccaacatggtgaacaccttgtctctattaaaaatataaaaaattagccgagcatggtggtgggcgcctgtaatcccagctactttggaggctgaggyaggagaattgcttgaacccaggaggcagaggttgcagtgatccagtattgctccaccgcactccagactgagcaacagagcaagacactgtctcaaaaaataaataaataaataaaaagtcagaggttcagctgcagggctggagactgcagtctctgagcaacctggtgattcaaggccaagatgaggagccaacaggcaagcctgccttccaggataagttcgaggcactgctgaggctgtgtcagggagtatgggctcactggaccctcaggaaatagtcatcaaattacattgatcacgggtggttggtgatgtcccaagcctggcctggcagaagccccagacctctgtctattggttgtttttgtttgtttgcttgcttgctttttctttatttctatacttttttttgttttgttttttgagacagggtttcacgcctgtcacccaggctagagtgcagtggcgtgatctcagctcactgcaaccttcgcctcctgggctcaagcgattctcctgcctcagcctcccaaatatctggggctacaggcatgccaccacacttagctaatttttgcatttttttttgcagagatgagagctcatcacgttacccaggctggtcacaaactcctgagctcaagtgatccgcctgcctcagcctcccaaagtgctgagattactggtgtgagcctccgcgcccgcccttcagttggtgtttgagatctccctggtggtgggaactagtcaaagagtgtccaggtggccacaaggtcctgttggttcttccttcaaaatggctcctgtcgtgcgagaccaggttttgggtgtcttcacccactctctgccctgagatctgtgtcccaagggacaccagccaccctgatcccacccgaccctcctctgctcctagagtgatggggtccccatgagaggaaaggagcactgttgtgagcagtgtgggatgagaggaggtgctgtcacagcttggggaagggaccctggtaaccagcaggtaggtcaatagttcccgttccaagtaggctcttgtgcccattttacagatcaggaaatggagacaggtggaggagccaggcgacttgcccagcctttacaggacccayggggcaaagccgtaggtgaagtcacagttagagattccagagctctgaggagacggcgtccctgcttgggtggggaaggtcccctgctggcccccagacgatgagtctttgttccctccccaggggctggcctggccctcaggcctgggaggtggaggtgccgagccctgggaaatagggcagtcctgggcttccggtgtcactgcacgcccctccccctcccgcctttgtttcttggcctccacagcctcattctctctccctccccctcactcaggctcctcctctgcccccccttccctgtctcttcatttcttctctccctctccctttctctctctctctctctgatatgtcctcccttcccccactcccagcacaactacaatcaggcagctcatctgtgtctatttccccgcctttcacattgactttctccccaccctggggaccgagggcatcctggtgggaggccacgccacatcccagccagtggtcgcccctcatcttgccagcctggggcagtctgagctcccctttctcctggacatggggggagcttttgttctgagtccttagcacaagtggtgggagaggccctgctctaagaagggaggggccccagtggggccccaggcggatgacagaggggccttgggttgggtggggaggcagccctggcacacaggtgacgcacacctggcaggctctcttcctgccctggatggccctgtgccaggacataaacagaagggtttagcctgggagatggaacagagcgggtgaggagacacgaggcacaatgctggcccaggaggagggagaacagagtgataccgggcctccccactcctcatttccgtgtgcgataggcaggcagaacacacatgcgaaacgcaggtaaattagattccctcctcagcagagccccttctgcatacacacacgcacgcacgcgcacacacacacagcctgcctggccgccccagtgaacaagacaacatggacacggggcctgcccccataagcctcrcaaagagagcattacagggtggtgtgtgttctactcagccaagtctccaggccagtgtaaaagaaagcgtggggccaactgcccaggtgggcagtggctcaatgaagacttctagtagaaggagagaccccagttcccccagccggctggggccctggaccagccagccaggaagcagcccgagccttcatgttgcagtttgcccaggtcgtgcctacgtgcccctgctggcctgtggtgacccaggacagctcctgagaactgaggagccrggctcgggtgtgacctccgcgggtgcatagctgcaggagcacagatgggacccagctgtggggccacacgggcctggctgcagacccaactcccccttcattgatggggcacttgggagtgtgttattcaagcctggatttcctggggcgtgaggtggggagcgcactaccccacccctgccccccgggttgttcctagtattaaatggctgactggggacctcgtgagtgtctgtaatgagaagctgtaggtcttccgtggtgtttgtcgtcagttgttggcagctctctgtgcccctgccctgcccccacttaggcacaaaccctcaggaacaaggactctgggttagtccctttctacagccaagcacaggctcctgacacagacgcaccttctcaagtccaaactacctgttcatatgggaaggggtttgcttcaggtgtcctggtgtgactataaggagtggccccttgtagaaaggggcccggtgtggacggtcagctccatggttacccttgctgtagggaaccacacttcagctcccacaggcagttcgctggctgacgtttttgccctctcctcacctctaaagcagtgttaactgtttccttatgcccgcgcccttgaggttggcgggagggggctgattcctggtattaggctgcaggggaaaggagagggaagggaactaacgacactgacatcctcatctcactgtcccatgagtcaggagcctcttcccccccatagagatgagaatcacctgatgtcacacggctagtagacggcagagcctggattgaactcagcatccagggccaagggggaagcactggcttggccattgatgctcagttcctccttcttgctggtcctgcctttggggaagtttacaaaaactgctgaacacatcatttgcccaaaccccacaacagacaggagggttgccgctgggtgctgtgtcagacggactgtcgcgacaggaggcagccatgctcctcagcgtgctctgcaaaactgacagtggctggagggcactgggggtggctgtggtgggccccaaggggcaggacccctgcctcattcaccttgctgtctccaggcacaagccctaacccatagcagggatttagcggctatttattgtacaaatgaatgaatgagttctctagtggttgtcctcagaatcacttaagctttgctgaatttggggcccaagaatggaaacatctcttggctctgtggcttttttcagaaaagccttctcccagagatctgggcagataataatggttctttttttcttcctttgagacagagtctcactgtgacacccaggctggaatgcaatggtgcgatctctgctcactgcaacttccgcctcctgggttcaagtgattctcctgcctcagactcccaagcagctgggattacaggcacccaccaccacgcccggctaatttttgtatttttagtagagatgaggtttcaccatgttggccaggctggtctcgaactcctgacctcaagtgatctgcccgcctcagcctcacaaagtgctgggattacaggtgtgagccaccatgcccctgccaacagtgattctttacagttggttagggccttataatgaaccaagctgcttcacctgtgttaggaccgtgggccctcacaacccttccatgggtgagtgttttcatccccgtttttcagatagggaaactgagccactggcatgactttgcttagtcacttgcaagtgactgagctggcactcgaggtcctcgctgactgcatttcccagcagctggacattggggtggggtgtggtggtttggaagcacgtttagcccctgcggcctattccagatgcaccctgaccccccaggccgaggtttccttctatctgatcccttccacgagagcctcactctaagcttaatagtttaatctttggtgtccgtttcaaggaggctaaattcctgtctggggtatttttagccgtcctcaggaaggggaagctccgctgggcgctggggggagggggacgccttgcccggagccggtttcctgaggaagggccgccgaccgtgtgcctgaccgtggccctgggagaggctggtagttggtccgttgggagccctgggagcaaagcaggcgagagtcgccccagtaatgccatcccctctcctcagatgtgccaggtgttgaaccagggcaaggggtataggcccaggaggaggtcgccactgcctggcgtgctgcagtccttggaagcctggagagggcacgagggcaggccaggagagccgggatggctccaggagcaggtggacctcgagccacgcctcggaggctggtgggaggagcaggggtcagcagggttgggaaaaggctgccccaggtgggaagacccatgggtgaaaagaccgggctccacagacggctcacggagcaggtgcctccatatgtggctggagcccccagcgagggaagaggccgctgtgctgggggtttgtacctgggcacgtgggcacattggcactatttagaagatcatgttagaggcaggtacagtggctcatgtctataatcctagcatttcggggggctgaggcagraggatcacttcagtgctggaggttgagacaggagtgagccatgattgtgtcacagtagcctgggcaacagagcaagaccccatctctaatcaaaaagaaagaaaaaaacgttagttgagagattgtgaatgtgaacttgggagcctgtttgagcattcaattcggatagtggcctcaaacatgttagctgtcaaggagctcttctttcaaatcagatcggacatggaactccaacgtataaaatcagataaaagtgatatttttatcagtataaatttagatatttaaatgtataacatttagctaatcaagaaaaacaacaactgcttgtgatagatgcagatgtttatcgtcggggctgacaagtgacagccagtgtttgagattggcctcagcacctagtttatttttttatattgtgtttctgccatacgttctcgttcatacagccgagccattaccaataatgacagttaacacctcaccgcacagtcccaaggtctgtgcaaattaattactttggcaacaaagccagtggggctacagtagaatgtgttagaatgtggcacatattacatttgagtaggtgggccttttaaaatcagtttttaaatagtggaatctttattttttgcatttttgaatccgatttttaaggatttttttttttttttttttttgagacagagtgtcactttgctgcccaggctggagtgcagtggcgcgatctcggctcactgcaacctccgcctcccaggttcaagtgattctcctgcctcagcctcctatagctgggattacaggtgccggccaccacgcccagctaattttgtatttttagtagagacaggatttcaccatgttggccaggctggtctcaaactcctgctgacctcaggtgatctgcccatcttggcttcccaaagtgctgggattacagatgtgagccaccatgcccggtctttttaaggaattcttgaaggacctgtrgaacacaatttgagaacaattgaggaaatcccacctccctgttgtacagatgggaagactgaggccagcaagggggcagagcttaccccaggatctcccagggagatggaggagatggtcagatacacagcaggaatcactgctccctataataacaagtgtgccctgttcccaaggccaggagtagaaaagacatcagagccagacacacccaaaatcagccaagcccttgtctgtgctgtgtctgttgtctgtctgtgcaggagtgagccagcaatattaaccttcccttctccacccacagcgatgccctcctagctagccgtcacgggatggagggcttcatggactcagggacacagacggacgccgtggtggtgctgtccttggctcaggccgccgtgcttggcctggtctccgaaaatgagctctttggagctaccataagcgccgaggccttctacccggacctggggcccgagctttcaggggcagccatgggagagcccgagccaccaggccccgacgtctaccagctggcctgcaacgggagggccttggaggagccggcggaggaggaggtgctggaggtggaggcagcctgtgagaagcacacccggcggaagacgcggccacctgtgcggttggtgcccaaggtcaagttcgagaaggtggaggaggaggaacaggaggtctatgaggtttctgtgccaggtgacgacaaggacgcagggccagcagaagcccccgccgaggcggccagtggcggctgcgacgccctggtgcagagcagcgccgtcaagatgatcgacctcagcgccttcagccgcaagccccggacgctccggcatctgccccgaaccccgaggccggagctgaacgtggccccatatgaccctcacttcccggccccggcccgggatggcttccccgagcccagcatggcgctgcctgggccagaggccttgcccacagagtgtgggttcgagccaccccacctggcccccctgagtgaccccgaggcccccagcatggagtccccggagcctgtcaagccggaacagggcttcgtgtggcaggaggccagtgagttcgaggctgacacggcgggttcgaccgtggaacgccacaagaaggcccagctggatcggctggacatcaacgtgcagattgacgactcctatctggtggaggcgggcgaccgccagaagcgctggcagtgccgcatgtgcgagaagtcctacacgtccaagtacaacctggtgacgcacatcctgggccacaacggcatcaagccacactcgtgcccacactgcagcaagctcttcaagcagcccagccacctgcagacgcacctgctgacgcaccagggcacccggccccacaagtgccaggtatgccacaaggccttcacgcagaccagccacctcaagcgccacatgctgctgcactcggaggtcaagccctacagctgccacttctgcggccgcggcttcgcctaccccagcgagctcaaggcccacgaagtgaagcatgagagtggccgctgccatgtctgcgtcgagtgcggcctggacttctccaccctgacccagctcaagcgccacctggcctcccaccagggccccaccctctaccagtgcctcgagtgtgacaagtccttccactaccgcagccagttgcagaaccacatgctcaagcaccagaacgtgcgacccttcgtgtgcactgaatgcggcatggagttcagccagattcaccacctcaagcagcactccctcacccacaaggtaaggccgttcccagggcctgggcatctgcctgcccctcctgccactttttcatccagtactttccaaagtcccagatgggaccatttaggtggtctcctagttttatcgttacgtacttattttgatgagtattagaaatcaattagtattagaaactaattgaaattagttttttaagtagtaaagctttatgcattcaaaaacatgtatttggccaggcacaatggctcatgcctgtaatcccagcgctttgggaggccaaggcaggcagattgcttgagtcctggggtttgagaccagcctgggcaaaataatgagaccccatcgctacaaaaaaatttaaacatggctaggcgtgatggctcatgcctgtaatcccagcactttgcgaggccaaggcgggcagatcacctgaggtcaggagttcaagaccagccttgccaatgtggtgaaaccctgtctctactaaaaatacaaaaattagctgggtgtggtggtggatgcctgtaatcccagctacttgggaggctgaggcaagagaattgcttcaacccgggaggcagaggttgcagtcagccgagaccacaccattgcactccagcctgggcaacaggagcaaaactccatctcaaaaaaaaaaaaaaaaaaaaaatttaaacattagccgggtgtggtggcatacacctatagtcccagctacttggaaggctaaggtgggaggaacacctgagcctgagaggctgaggttgcagtgagctgaaatcacgatactgcacttcagcctgggcaaccagactgagaccctgtctccaaaaaaaaaaaatcatttttataacccctgcaagacccaagraacacagtttgaggatcactgaagtatcttaccctccctattttctagatgggaggacagaggccagagagaggccaggatgcaacagggaggcgtcctggctcagtggtcagaagtacagagggtgtcctttgttccttgtcattacaaaagcaaatcaaaacctgtgacttccctttaagaacaggctaaatatatttaattttcaaagcagagaagatgtaaggaaaaatatttgttatggaaaagtacaggtagttctagaatatggctaaactaggcacagtggctcgggaaggcagaaattgagcagcactttctaatctaccatgtccctaaacccagccttgacccgtactcccctgccctccattccccgccttcagccaccagcctccccgcttttcagccaatatcacctcctctgagaggccctcatatccgggtaggtggaatgaggccccttgggtcccacaatcccactctggtacttggctgccccatggtttccaccgaaatcccaccaactttacccttcaaagctgaatgtacatagagcttcctctccccataacggtggcctatgagtgatactccaggtcaaacttgtgaccctgtctctcacggtagacactatagggagttggggagctgttaataccctgccaggcctagaaaccagcaatttgtaggtttcattgcagaggctcctgcagtcaactgctagtagctgcctaaaatgtaatgtcaagaaagagtctagccaggcatggtgctgcacacctgtagtcccagttactcaggaggctgaggtgggaagtttgcttgaacccaggagtttgaggctatgattgctcctattaatagccactgcactctagcctgggcaacatagcaagacatttttttttttttaagaaaaaaaaaaaggaagaattctgggctggatgcaatggctaacagtaatcccaacactttgggaggctgaggcaggagaatcacttgagcccaggagtttgagaccagcctggctaacatagtgaaaccctggctctactaaaaatattttttaaaaatagctgagtgtggtggtgtgcacctgtagtcccagcttgaacccaggaggcagagattccagtgagccgagatcacaccactgtgctccagcccaggtgacagagcaagactctatctcaaaaaaaagaaaaaaatcaaaaaattagccaggcatggtggcacacacctgtggtccagctacacatgagactgaagcaggaggattgcttgagcccaggaggtcaaggctgcagtgagctgtgattgcgccactgcactccagtctgggcaacagagcaagactctgtctccaaaaagagaaaaggattctgaaactgaatctaggcttggcaataaaaccctatgatggattgttaatgtctgcaaggagtgattgtgcagggtgacagcatatatgctatatatttgccatctttctcctctactgggggacttaaaaatcccaagtccagggcctggcacagtggctcacgcctgtaatcccagcactttaggaggccgaggcgggcagatcacaaggtcaggagttcgaggccaacctggccaacatggtgaagccccgtctctactaaaaatacaaaaattagttgggygtggtggtgggcgcctgtagtcccagctactcgggaggctgaggcaggagaattgcttgaacccgggaggcagaggttgcagtgagccaagaccgtgccgctgtactctagcctgggcaacaaaagcaagactctgtcttaaaaaaaaaaaaaaaatcccaagtccacagagtgttaatactgtgaagaaaagctgaaagcaaaaaccaaaggctaataaaactggaaatgtccctattatcagcctaaatttgtacaatgtgcacatcatgtgtttataaaagaaactcctgaatggcagggccccctggtggtcatacacatctgcgatgtgtcaggagggggtatacagcacaagacacagtccctgctgctaagagacatagacacgggaaccattaagttataatacaaagtttttataccaaacaagcagttaagacagcagctgtgaccacagacacatgtcccactgggttcctactaaattactaactcatcaaaaagaaaacagctcccaacttaaaaaaaatttcttttatttatttatttttactctttttttttttttttttgagacggaggcttactctgtcacccaagctggagtgcagtggtgtgatctcagctcactgcaacctccgcctcctgggtttaagcaattctactgcctcagcctcctgagtagctgggattacaggcgcataccacgctcagctaattattgtatttttagtagagatagggtttcaccatgttggccagcctggtctcgaactcctgaccttgtgatctgcccaccttagcctcccaaagtgctgggattacaggcatgagccaccgtgcccggcctttttcaaattttagagatagggtcttgctatgttgtccacactagtcttgagttcctggcctcaggtgatcctcttgcctcagcctcccaaaatgctgggattacaggtgtgagccaccgtgcccagcccagctcccagcttttatcctaattttcctccatggataataaattggacccctttgcacacaacaccctgtcctgctctgggagtgacctccaaaccgtagaaaagaaagttcacagtccaaaccagtgggttttctcctggaatccatgtctcctgggggtgaatagcccaaagtccatcaatgataagaatcatctgggggccctgttgagaataaaaattcctgggcccatcccaggccccatgaattagaccctccagggagcggcctgcaaggctgtatgttggatgagaactacaggtggctgttatcaccagggaaattaggaaaacactttcaagagatgagtggataggctctgggagtttgagacccttcgaaattctacatagacctaagtgccatttttgggggggtgtccatagcttcaatcatattatcaaaagggtctgaaccaaaaaggccaccaagagacagcatggaggataaaaacacatacacgtgtccttgatctgatgaaatagtccacagacagcgggcagaccctgtgtcttcttggcgacagacccctgccgcctagtgtggtactggcttggagcaggtgcccggtaaatggttgttgaatgaatgaatgaatgagcacacatttgccttagtgcactagtacagaccttatgtacacatccaccctgggggcaggagacagcaggtatctggatcgttacagtaaagcacagcctatttctattactgaaaggcttcctggagtaagtggctctgcccccacattcttcrgtggttttaaacaagtgttacctattttggaataccctcaaaaagagacatttcccagaaagtgtgcctttgtgatgctatggccctgcccctacccggctccccacaaagggtcactgccagaggctgtgcccattgtgtggccctgaccatcaccccccaccccacagggcgtgaaggagttcaagtgcgaggtgtgtggccgggagttcaccctacaggcgaacatgaagcggcacatgctgatccacaccagcgtccggccctaccagtgccacatctgcttcaagacctttgtacagaagcagactctcaagacccacatgattgtacactcgcccgtgaagccattcaaatgcaaggtacccggtcatcaggccccggggctgggacctccccgagggtggtctggaatcagcatgcctgcagcagctgtggcccaccaagcgccagcctggccagtgcgggcaagaggagccccggcygggtgaaacttagcctgggctttgggggttgggagggcaggcggggattcacatcctgaaagctgctgaagttgggtttttctgagagctggggagggagtgaaggtcatggtgcagccacagagaaaggaccccagcctgagggcttagtgcagctagagatccaagccctgggtttctgataagtgcagctcagagaaagtggggcagactcacaggagcagtgacccccaatggatggcttgtgtccctgtctctcgggtgtctggggtcacatggaaaagcataaagagagaactgtccataaagaacaggattctgggccaggcatggtggtgcatgcctgtaatcccagcattttgggaggctgaggtgggtggatcatttgaggtaaggagttcgagaccagcctagccaatgtggtgaaaccccttctctactaaacatacaaaaaattagctgggcgtggtggcacgtgcctgtagtcccagctactcgggagactaaggcaggagaatctcttgaacccaggaggcagaagttgcagtgagccgagatcatgccactgcactccagcctggacaacagagtgagagtctgtctcaaaaaaaaaamaaaaaaaaaaaacaaaagaataggattctggcccagccatagaggtgggagtgggctggggtccggggaaagcaggttccccacaggctcaggacaccgggttgatgtgttctaggtgtgcgggaagtccttcaaccgcatgtacaacctgctgggccacatgcacctgcacgccggcagcaagcccttcaagtgcccctactgctccagcaagtttaatctcaagggcaacctgagccggcacatgaaggtcaagcatggcgtcatggacatcggcctggacagccaaggtgggtgggccaagcgyaatggacagagcaggaatgataccaacatgacgcactcaggagcctcctgcccagttagaggagtggggaggctggccaaggctgagacttcgttggggtgggctcaggtctggaaggggggtaccctggaaggccatgatgacaataacgatgggatatttatgtcttcttcaaaggacttaaatgagatcacgtaaacaatataataaaaatcataactaacatttattgagtgctaactgtgtgccaggcctttattaactcatgtgatcctcaaagcgaggttggctctgtcattgtcatcgttttacagatgcagaaactgaagaacagagaacttagatagctcatgcaagatgacaacacagcaggaggtgacagacactttatttcgttaccgtgagataatatttcaaataagtgtatgggaaagaaagttagaaaggggaaaaaatggcagccggaaagataagggagagccaggtgaggtcccaactccaagtacaccatgggaggtcctaagcaagggacatgcagaggggagatctgagcttcccagcaaccaaggcaaaaaagtgtcaatcagtcacactcttcacaagtgcctgccagagactataacccacatactcatgaaagggccagacagccctgacgttaagatctgggagaaattttaggagaggatcctatgcctcagcagttcgtagaagtttcagaggctgtcagaaaacatcccaagtgttagcggtagcctttccctccagcagtggtcagtacttaaagcatttctgttgggtgacagcaaagctgttagcctctctggcctcatggtggggagggactgctgtggagactccacaggaaggagggagccaacagcgctacagggaggctccttctacagttgggagctatttctggtgctctggctgggcatgatggctcacacctataatcctggcactttgggaggccgaggcaggaggatcccttaaggccaggagtttgataccaaaccaggcaacatagtgagacctggtctctacaaaaatatttttaaattagctgggtgtggtggcgtgtgcctataatctcagctacttgggagtctaaggcaggaagatcacttgagcccaggagttcaaggctgtagtgaactgtgatcggaccacggcactccagcctgcgtggcaaagcaagaccctatcgccaaattataataaagaaattctggtgtgcctctgagtcacaccagctgggaacatgctttggcagtaaccaggtgagctgacttgccacgtgggattatttactggaatgcagkcaggcacgcgggaacagctgcagtagcttaactctggttttggaacagctgaccagtgaatggcctgggttttctggcagaaacaggtatctcagttgttttgttttgtttttcagttgtctattaaggttgcttccagtagacgagaatgaaaccccgtcggctgctcttggtagctccttgctactcaaaatgtggtaggaggatgagcagystcggccccacctgggatcttgctggcctctcagctccacccacacctgctgagtcagactctacacttcaaraagatctctgggccatttgttgcagtcaagtttgagacccactggaccagactagtgcctcagagtctcctggagggcttgttgaaacaaagtgctggccccacccccagagtttctgattcagtagatctggggtggggtctgagacgctgcctttcccacaagttcccagttcttagcaaagcagccgctggttcagggacctcaygttgagaacctttgatccagactgcagagggctggctggcaaatcagctgcatgttgggagtcacctgaggaatgttttaaatgctgatgcctgagtttggacctgaggttcaaatgtaagtgatctggaatgtggcctgggatcaggatttttgtaaagcactttgggtgagtccatgtgcagtagattttgagagctgtattctagtggatctgccctgttgctaacccaccagaaggaaccagagcagaacgtgcccttttggaaataactgggaccatgaagagactgtcagtgttacagctcttttagaatttgttaggctgggcgtactggctcacgcctataatcccaacactttgggaggcaaatcccaaggtgggcagatcacctgaggttgggagttcgagaccagcctggctaacatgatgaaaccccgtctctactaaaaatacaaaaattagctgggcgtgttggcacatgcgtgtaatcccagctactcgggaggctgaggcaggagaatcacttgaacctgggaggcagaggttgcagtgagccgagattgtgtcactgcactccagcctgggtgacagagtgagactttgactcaaaaaaaaaaaaaaaaaagcattcatttagcaggttttccagtttttaccagaaatcgccccacccccatcccaccacccaaacaagattttttaaaaagactgtccctgtacaccttgttcctcggggtggttaaggcacaacctctttctatatgagctcagtcaccagggatgcttagaattcctctattcctggccgtaccagatgacagaaggaagcgattggccctggaatgactgggctccaggtccccacctccctcatacagccttggtctgggaagcccaggcttgatgcgtatgcagaaggaaggcagcatacattctagacagaacgatctagtaactatggggctgtcatttggggaggtggatcaatgtccttataaaaaatgctacagactattctctggggcccacaggacgggaccatagacttaataaacaaaatggggacggtgtacagagatccacaagtagaaattttctcaaggtgctttttttttttttttttttgagacggagtcttgctctttcacccaggctggagtgcagtggcgcgatctcggctcactgcaagctccacctcctgggttcacgccattctcctgcctcagcctcccaagtagctgggactacaggcgcctgccaccacgcccggctaatttttttgtatttttagtagagacggggtttcacggtgttagccaggatggtcttgatctcctgacctcatgatctgcctgccttggcctcccaaagtgctgggattacaggcatgagccactgcgcctggcccccaaggtgctttatttagcttgtttttgaaaccagctgtgtaacatgagggtgtggcactaggactgagggaagaaacagcccaaatctataagatatgggtcaagtgaccttgttttataaagtccggaagactcacagtgggttagatgctacaggcacaagtaacagatacccattcagactggcctaaacaataaggaaatccattaagaaatggctcaagaccaggtgtggtagcgcacacctatcgtcccagctactcgggaggttgagttgggaggatcactttgagtttgaggctgcagtgagccatgattgcaccactgcaccccagccttggcaatagagcaagaccttgtcaaaaaaagaaaagaaatggggccaggcgcagtggctcacgcctgtaatcccagcactttgagaggccraggcaggcggatcacctgagattgggagttcaagaccagcctgaccaacatggagaaaccccgtctctactaaaaatacaaaaaaaattagccgggtatggtggcgcatgcctgtaatctcagctacttgggaggctgaggcaggagaatcgcttgaccccaggaggtggaggttgtgatgagccaagattgcaccattgcactccagcctgggcaacaagagcgaaactcggtctcaaaaaaaaaaaaaaaaagaagagaaaagaaatggttcaaagtctaggccctcttcagagctggctgattcagcttgccaacagtgacatcagggtgaggcttcctctgtccacagcattagctgcgaatatcctcatggtcacaagatggctgccagtggccgtcagggtgtgtgcttccttgttcacatccagtggaagagtgacagcctgctccccttagctctctgacaccaatgagaaggtgctaagaacttactagcaggcctttcctcatgacccattcaacaggattgggtcacgtgcctattcctgaaccactaattgggaagggatgggattactcttagaccagtggttctcaactgagcatgagtttgtcttccaggtgacagttggccatgtttggagacatttatggttgtcacaactggggtgatgctactggcatctcatgggtagaggccagggatgctgtcaaacatcctacaatgcacaggacagcctcacaacaaagaattatggccctaagtgccaaggttgagaaagtctgccttagacctgtcagggctgcccccagcctggggtctgtttcccccaaaacacgcacatctcagcggacagggccagaatgcactttgggggccagccacagcccctgccagcctcccagttcccccagatcctaccctgggcttcccctgtaagagctttataatgagatttcaattttataaaattayaaggggcctcttaggagtttttgcctgacatatctttatgaacctaccctgagtgtttgtccctggagagccaggcccaaggataccaatggctagaaccaacagaaaagcacagctgccggcaggaggcctcaccctcccgcagtgtgaggcagagcagcacagtggctcagaacaacagcatgtgctgggtgacctttggcaagttgattcacctctctaaacctcagccttctgagctgctaaatggggctgttgtgattgctggatgaggcgaggcctgcgaagtggctggcatgcagcaggtgctaatgagtgytgcaaaggtgatgtcacgcaggcagcttcccgtggccagagaaacattgcagagaagggataagtagggcttagtgactttgacgggtcaatggaagaatgacccaaagaaggcttcaaggccaggcctgcagttctccaccacaaaggccctcactgatagcacccactcccccacactcagctttggggcctaggtctggtcacccagctagaagccacaggaccctgaggcgtccgagggtgggaaggctgagaggcagctgagactcctggaggccgtgactgggaagccctctctttagaaaggccatcagcttcctgcgtgggggtgactggctcctcccgagagatggcagccaggtctgactgtgcccctctcttacagaccccatgatggagctgacaggcactgacccttcagagctcgacggccagcaggagatggaggacttcgaggagaacgcctacagctatgcgagcgtggacagcagcgccgaggccagtgtcctcactgaacaggccatgaaagagatggcctactacaaygtgctatagcgcaagctgggccacccctaacgggggccgggggcgagggcatgggggtgagacccatgggctgcaggctgcacctcctgcagccgagaaacaagctactgccccactgttctgagccctccctccccgagtcatttgcaccactagggacctttagaccaaatggagactgtactactggccccggctgtgagccagcacaggcccaggcatcccagcaagggaaggagaacacgcgaggcccagatctgggtctccctggcctgcttccgtggggagtgggagaagtggggccactggggacaggtcacaagggcaccggccctcggggtctctccaggcccagcagagctcttcaggggtcctgacactggaagaagagaccacttgagccatgtctttttcacggccaactcctgcctctaaggatgtctgagctcccctctggccagtactgcccacctctaccttgtccagggccccttccccgccctgtcgacggaccgccaggcagggcactctgccttctacctcccggggtctcccatgcgctcctcaagccaggtgtgcacgtggccctggccctggcctgcaggacagctggggggcacccagcccccagaagacccctgtcctacatccctttctggaagtgagtgtccctacagtggattgcaacacatgtcgtccacttcgaccctagctggagtgcctcaccagggggccccactaggaacaaagccaggacaggccccgcgtcaggcacacactaacaaaaccagaagcatggggcagggcagggcggagtgagggcatcacaggggaccaagaagggctgtccttgggggaggcccaggaccacctgtcggggagggggaccgcagtcatttctcattcctcagtgtccaccttgcgacggggatagccacgagtcagcagcttcccggaaagagcaacgtattttaaaaaggaaagtaaagcccacagagggaaatcaagggtttttttgagcaaagggggtcttctgaaggtaacttattatttttttctttccaactgtgtgtcacctatgaccttttctgatggagatgcattttctttttccaagcgtaagcttcctaatgtgctgtgcgtgcttcctacccacccaccccgagcagcctggccgggcaggactggggctccatggggactgtcaccctggccctggaggtgcagccgctggcagcagcctcagcaggctggggtgggaggcaggagaaggcagagctgggaagccctccacccctgcctggctcctgcagtcgctgacttgctctgtcccatgtcccatcctcggctgtcagggctgctgactctgctcagccaacagctagctccctcgctcgcctgctctcttcccctctgttcccacgccagctcctgcccctggaaccagagatgacaggcccagggcagtgaatagcacattcaggaactctagggcacccggacccccccacccacttgcctcctgaggcctcagtggggaggggcaagcaggggtcttccccaaaggcacagatgaagccactagcttcagcctagaaacccggagaagggaacagcctgcggtgggaggaaccaatctgcagcgcagccacccccaaggctggatccttaagtgaaggaccaagccaggcctcagggtgactgtgatcaggactgaggggtggacaaggtggcccaagtatggcttccagaccccgaagccccacgacctcccaggtgcccgccatgatgaccctcaggtggcagtgaccccgtcactgtataagacattttctcctgctgagcagaaggcatcatcccctgcaactacctcttcccacgtctttctcccctggtaccaaaaagaaccctgtacctctcctcctcctcctccctcctgccagtgcagtggccttggtcttggaaactgaagggagaaggtctggcccccagggtggggctctcctttccctcccccagccccgccgtcagcactggccctctgtgaggttcgatacttgaacgccccctgccctgtgccttggacctgggcaaagctaggaggaggaaacagcacaactcacagtttgagctggggggtggtcttggcaaggctcctgtctgtacccctccctaaccttctcaaaagaggtgcacagcctctcgggtgacttggaaactcctggacaaattccattctaacttattttgacatgtatacaaaccaactgtttagagattccacttgtgcaaagccctactgtgtttttatgttcctgtttaaaagagaagtttacttagcaataattataaataaatgaatattctttagtgaggtgactgcaaatgcttctttccccagctcttggggacctggccctcactcccagcaggaactcccagcaaaacttcccagccccacacagcagggctgcactctcccagggcccgggggaggctgagaccatcctctgcactggaatggccccctgcagggccaggcgcctatagccagctgccccgggcccaagagagtggtgtgggccacggcccctgtattcccaccacttgcagagaaaagctgcttcccctccctacccacccacatggcttcaggaaagaagccagctcccgatgccaggctgggcttcagaggctgcgttctgcagagctgccagccccgtgctggtgacaggcaagaagaggcaggaagccttgagcttcctcccaggggctgggcctgctagagccagcagtccacgtttcttcttatagccctgagagtttcagggcattactcaggaaaagcaagcggggggtcaccagtgtggatggagggctagagcccttccaaagccactcagtctaccgcaatggtcgggtttcaggagccataggagtccccccagtatttaggaaagggactttgtaagatggggttttgagagatggggtctcactctgttactcaggctggagtacagtggtgcagtcatagctcactacagcctcaaactcccgggctcaagtgatcctcccaccttggcctcccaaagtgctgggactataggcatgagccaccacacctggccaggactttataaagattatacaactcttctccaggacattttaacaccaaaaagaagaagctttgcagaacttactatgcagaggacagtccttttgattatatgtagctttagagcaacttttatttttcctttttacatggggctaaaaaacttgcatagagcaattttttttttttttttttttttttttttttttgagacagagtcttgctctgtcacccaggctggagtgcagtggtgcagtctcggctcactgcaacctctgcctcccaggttcaagccattttcctgcctcagcctcccgagtagctgggactgcaggtgcgcatcaccacgcctggctaatttttgtattttgagtagagatggggtttcaccatgttggccaggctggtctcgaactcctggcctcaagtgatccacccacctcagcctcccaaagtacagggattataggcgtgcgccactgtgcccggccgagaacaatttgtcacaagcttacttttctagttttgccaatgcatggtgaaagtgaacccaagcctgggaactgcaggcctagacaatgcagggcccttgttcacacacacccaagcccctccaaactcaggcagccttggaaaggagaagtgtgaggcaggtgtgggtaggacctctttttagtacctagaaaaaggctaagaaagtggcctggagatgtttagaaggttaaaaccaacgaagaaaaaaatcaatgacaacctatcaggaactgattgactctcagaatggagaactggacacagaaactggatcatgctagaaaattccagggaacccacaggcctgtgccctgagtgtccgagaactccgcagtgggcccctgtggaatgcgggctcccagggctgcctggtcccttccctgccgtggcagccccttcctgaggtgctctggtctgccccaggggaacctgccagctctagcagggcctctgcctcagggtcccactacctcctcccctcagggacaaacacagcagacaattttgtgaagagctttttagtagctaaatatggcaccatgtgttccaagggcaatataaattacagtatgcaaaacatactgactggctgaggtaaaacgcactgctcctgcctcacgtcaccatgaggggaaacacacatatgcttttaaaaacatctggcttataaaaaaacatcccctagaaaggcctccagagaggggctgtgaggctcaccctctgccgcgctcaggaggacccgccggctcagccctggcccctccactgcagccatgggtggcgcctccccctactgcctgcccagggctctgtccaggttgctcttgatggtgtcgaggaagtccgtggtgttcaggaagtgctcgttcagcttcacactgcagagagagcaccactcacatcaggggtggctccaggccttgccaaggccatcagccaggcccttccagggaacagcctgagcttgggcatcagaacagccatctcctgccacccagactacaggccagaggccagctatagccccctaccatgaggccaccgagattcggcaggcacccgcagggtctgtcttgccaggtaactgctctcctgagagaagctgggaaaggggtgtgggcagggtcggaaggagctctgagtagccagcctcagggatggggaggaactcactagacctggtctacagaggctggcctgagcagtctctcagggctgtggacatgtcctgccccaggcccccttgcagctaagctgactcatgagggggactttaggaggggtcccctggcttcctcccacatggccccagggtctgcctaccaccccaggccacgcacttgctgaggccgtgaatgcagcccgccaggtccttggtcatggctccactctccaccgtctccacgcacaccttctccagcatctgggcaaacctatggggatggggcagaatgagaccccatctgtgcaagggcaggacccagagcctgtcctgggcagctccggcctctccctccatgctcacctgatgaggtcttggttcccatccagcttcccccggtgctccaggccacgtgtccaggcaaagatgctggcgatggggttggtgctggtgggccggccctggggacgggggttgcagggagatcaagagccgagccagctagtgaggaggctgcccagatacagctgcccgcccctgggctggtgggtcaggctcgtccttccagccctcagcccagtgggctttaggcccctggggtagaggggcattgtgaggccccatgccctgcactcaccttctggtgctcccgatagtggcgggtgacggtcccatgagcggcctcagcctcaatcgtcttcccatcagggcagaccaggacggacgtcatcaggccaagggagccaaagcctggagggtagaaagcctttctctcagggcctcgcctctcctggggccacccagctgagccctgctgccctctacaacccaatattgtagctgccatagttcgtggctctactcagcctcccccagctgcaactgggaggacagggactgttccaggtctcttcaccctcctgtgggtctccagggcccagcacagggctggagggcactggagggtggctatcaccagcacattaacatccatctgtgtcaccagctccaggcgccccacagcctgtggcccacagggcccaagaggccacagagtcctgtggtcccccacagcctgccacccagcctggctcgtgacccggaggcacattcaaggaaaacaataaagctgtggtcagctatttcccaacaatcacttttgcagctactctcttaggccactttcaagctttttgattaatttctgaatgctcccaaatccacatgtcaactccagcaagcttttctattgtcaaggactccagggcttcaaaggcacccccatgacaccaaaataaggattgaagaaagaaaacatggacaacatctacaggaaaatgctttgtctatgaattctaagaattttggctgtaagcaatcccttctccattttacctgcacc

SEQ ID NO: 97547 - DNA, 101996 bp, Homo sapiens
  misc_feature (1)...(101996): n = A,T,C or G
tataatcacatgggtagggaggtctgaattactttgcttgtcaaaggagggtgttgtttataagtggagagccaacacactactttgccctcaagtcaagtgaagagagatctatctgaataaaaataaaataatatctaaaaactcccagttaatgccaagataacatggaatttttcattgttccaagatctgatcgtaaaatgttgttttaggcctcacaagaattaatcctgtcaccttaaatttgagctggaataaagcaatatatttcaattaaaaacatccattttgaactgcctgtgtaaacccatctataggatttgttatcctcaaaacacaacacacaaagaaactaaatagggttttaattgtctttaaagtctgggaactctctcaaaatgcgacaaaataaaatacttcatttctctggcctgtgtagttaaaaagcttctgtaagaattcctaaatggcatggccttttatcccctccatccacaaccacctaccctcttcttcttgtgtgttaccattatatttgtgcttcctatattttatatttcagaagtttctccatgctttataagaaacaagctagtttaaggggttttgtttgtttctgtctctaagtatttcaaacatatctttattatgttagaagcttcttggtttccaggatctctttgaaattaaataaatttgtagaaatggttattttcttactatggtacttatttctaggttctgttttatatttgtctagaattaatcttgaagataattaattaattatattatttgtatgtgtcacatcttaagtcctcacatcctaaaacaacaaaaaaagacattttagcatttagcctggaatttcattctgtaaaaaacagtaattccctttcgttatgtcttattttctactaatatctatatagacacttttcctgttaccctatctaaaaagatatacacatataaatgtcagaatgaacaattccttatatgtcatttaatagatttttcttttttaatttcaattttccctagatccattcagtttttagtgataattagattttaagcattatccttcaggtttgcaagccatattgatctaaatgtgattcatgttgtcagttgcgttttttaaaacttatcagcccatattcacacataattcaagatgtgtgtattttcctaatcttctgcccttttgccctgcataatgtatagtagatctgttaagtacagtagcttatgtcaaggtgaattattgaactaaaagtttgatatatgatctggggaaactactacattttcactgaaggcaaaccgtgaatctcttcagggcaattccagttgattcctttgctgcttatttcaattgtttttttgaaggcatgcactatatcttcatatttgtaaatgcatttgatttttctgtttataaaagtgttacagaacatgttaaagaagactattatgtttctgtatgaaccttaaaatgtgctggtgtacatatatatgacacaattagtataatgcttatgctggctcatacatgatgtgcgttgaggttctcaaaacattttctcccaaatcaataacacacaatcacattcctacattaaaacaaaatagagtgtgtaagacaaaggtaaaaaagaccccctttattcactatcccttatctcttttttttttttttttttttttttttgagacggagtcttgctctgtcgcccaggctggagtgcagtggcgcgatctcggctcactgcaagctccacctcccgggttcacgccattctcctgcctcaacctcgggactacaggtgcccgccaccacgcccggctaattcttttgtatttttagtagagacggggtttcaccgtgttagccaggatggtctcaatctcctgacctcgtgatccgcccgcctcggtctcccaaagtgctgggattacaggcgtgagccagcacgctaggccccctcatctcttttactttctctcatacacacacacacacacacgaaccacacccaactgccatatcccacttcttttacaaatacagttcctttttgtgctttaatatgctttcttctagaatatttgtatgtatttaaatacacatatataactaatgccaaatatatttttgtttactttgttttgactttccatgagttcatacctatacatgtctatactttgcatttgctgtttactctctttctggaatgtttttcctcaaaatatttctgaggcttagttccttacctctcttaggccttatccagacatctccttttattaagacatttcctaattactctattaaaactgaaacttcctctcctatacctatttcctgcctatccttgctcatggcttatctgttttcagagtttttatcaccttataaataacatatattttatgtttttgttgtcatgttctcactagagtacgagattcatctaggcagatttttttttttgtctggtttatttactactatgttctatcactgagaagagtgcctgacacgtggaagtagttgatgtgttaatgaataaatactatggtgactaaaaagtgtgtgttttgtagtcagattacctggattcaatcccagttccaaatctactagtcatgtgatcctgacaacttatttaaattctttggtgtttggtttcctcttcagtagtataaagatagtaataatgtctctcacctgggtggttataaggattaagcaaagttgacacatatgtagggaagtgccaaacaaataatcctcactaaattttatctagtgaatatagtagtgggaatagtgtcagtagtagtaataatatgcaactagctttttcattcaataatgtcatagaaacatttagtcattacatctaggtccacccaaatttctattgctacagactacaccattgtgtggatttattgtaatgaatataacaattttcagattgttagacattgaagctgtttcaatcatttctgtgttatagagaggaagttgtcactgccagtgagcattcttgtgtgagcaatcacttacatttgtgtgcatgcttatgcaactatgcgacgctgtgttatatgtctttggtgaaactcttggtaaaagaatattactattctaacgttttctaattaattccaaaaagttgtagcaatatactttcttaccaccagtaacagaaggtatccattcctcccaggtctcctcaaaatcggatgtttattgattttttttaaaaaagtccctaacctgaagggtcccaattaaaatgttgctttaattagcattttactaacaagtattaatgttgaccaacttttgtaactttcttaaacatttctattgttctctgacctctgtcctcacatgataatttataaaatacaatatataattcttaatttattatttgggatccatcaagcaaacattttctcctagactctcttctgttttctcttctctctaactgcctttgctctacagacttttgaaatgttattcactgaaatgattaagcatttcctttatggcttctagatcaaaagattataaactcttctgtattttctttaaatcattttgttttaagcacttaaatccatttggtagattgtgtgtgtgtgtgtgtgtgtgtgtgtgtgtgtgtgtgcatgcatctttggtttatagccagtagatgctgtaatagaaacctaaatcatttggtgacaatgactttggcaacaggtgactggtagaagcccaaaggaccttgagaagatttttagtagagtctggaaggacagcaaggcaattggtattggaagctatggaaagggaaacctgagctgtatactagacaaagagaaaaactactgcctgcggtaacatagaaaatagaaagaatacctctagtaggcagaataatggactccccaaaatgtttacatcctaatctggggaacctgtgaacatgtcaccctacatggcaaaagggattttgcagatgttactatgcccacaagacatcaagataagattagcctaggttatccagatgagcccaatctaatcacatgagtcttgaagatcagagaaacctttcccatctgggaacggtgaacgcctgtaatgactgtgtaagtgaggtcagggagatgtgatgttgctggctttgaagatggaggaaaggggtcatgagccaagaaacgtgggagacctctatctgctgggaaaggtaaggaaacagattctcccttagagcctccagaaagaaatgcagccctgttagcctcttgaggttagcctcgtgagatccatgtcagacttctgacctatgaaagtataagatatcaaatttgtagctttaaaccactaaagttgtggtaatttgttatggcagcaatagaaaatgaatgtaaactgtttagtaaatatggaggattcaggggtggggaaattattctggattatctaggtgtgcctatctagtcacatgaatccttaaaacagagaacatttcttggttgcaatcaaggagggagatgtgatatagaagaataatcagtgagttgcaacattattgaatgagaagatggaaggaacaggctgcaagccaaaatgtgtgccctgtagaaactgaaaaaggcaaggaaatggattctcccatgcacaccccagaaaggaacacagtcctgctgacatcttgattttaacttgctgcaatatccacatgttctgcagtacacaagagattactggcttattacagccaatttaacagtgaggagacagggcacgctcagagtggttcacctcccatgtcaaaggtcaggggtgaactgagactggaaaacttagattggtcctgttgtcaccctcctcttcctttctttgcaaacacataccatcaagttttaaaaaagaatcgacggctatttttttctattattgtggaaaaatcattacatcatctgaaaagtggcacaatattattcactgatacattcaacaaacgtttactgaacttttctagctgtccattcattagtagtcactggctacaaccatgagtaagagttactctcaaatttatcaggatcaagtaagaaagtggcaaataaacaaagttccatgcggaaggggaaggatatcctaataagtgtaatctcacggaggtacaggctgaaacagaaggggcttctagtcagtcttccctaatgaggagtgttttcctggagaaagcaacttctgagctgagaactgaatgatgagcaagatttcatttacagaacaggttctaacatttttaagaacttcttcctggttaaatcatagagtacaaagaaaaaggtaaaaacaaacaaggaaacaaaaaaccctgaagatataataaggagccagattatgaaggcttttatgaggcatacttgggagtatgggtacctcataagtattttaatagcaaaagtagcataattgttttttaattttaagtataggtattttaataagtattttaacaggaaaagtaacatagttattttttaatttttttaaaatcacctcattgtgtaataggaatagattaatgaagaacaaaacaagaaatcagaatactagttgagatacattgcaataacctatgagagagagaagttataatcttggggatggcagagatgaaaacaggtagataattttaagagatactcaaaggttataatagagagcactttgtgattgttttagttacctataaacactatcaaaaacttagcggtttaatcccacaataaaatttatttttatcactcacaagtttgtggatcaagaattcatccatggttgaaaggaatcctcccatttttgcttccctggtgtcagctgggacagtttgaccaaggccagaaaatgcaacatgactccacaactcacgtgtctgaggtcttggcactggctgtccgctgcacaccttgttcctcctctgtgtaatctctctcttgctccttctctgtgtatgatgtctgatcacccagttcggcccaagcctccctacatggtgacatgtttcaaagagaattaaaatgcacaatttcaggcctcttaaagtctaagctgagaagtcatacaatgccacttctgccttattctctatattaagcaagttacagagcctgccaagatttagggaaagggaaatagactctacctcttgatagaggaaaaacaaagtcacattttaaaagaacataagggtgaaaagttgagaggaaacgaggcatcagaggtgttacttaagcaaccaggttaaggagtgaaggtgtcatttagaggcataaataacataggagaaagaccaatttgaggggaacacaatgcagtaaattttggatatatagatgtaaagatatatacagatatcaatgagatatccaaggcaaggttataaatcaaacacttgtattactacctgctcaatgttttaagtactttgcaaatagtaactatagctgacccttgaacaatacagggttaagagaactgacccctatgcagccgaaaaatccacatataacttttgactccctcaaaacttaaccactgatagcgcactgttctcaagaagtcctatcaataatataatatagtcaattaacacatattttgcatggcaatatatatcgtatattgtattcttacaataaagtaagaggaaaaatgttgtcaatgaagagaaaatatacttactattcattaattagaagtggatcacgatgaaggtctccattttcatcatcttcatgttgaggctgaggaggaggaggaagagaagaggggttgggcttactgtctcaaggtagaagaaaatccacatataactggacccacacagttcaaacccacagcatttaaagctcaactataatttaatcatcataacaacatgataaagaggayatattattattatccttacttcataggtaaagaactaagaatcttgagagctttactaactttcccaaagtcacacagctattaaaagatgtcagcaggattaaaattcaagcagtctagctcatatcccttagttgagccactcttccctgccttcctacagtatctggatgaccatgtttttctagagctcaagagaaatataagatgatttagatatgtataatatttcaatgttttaaccagaaatgagtgaaattacagtgacaaattttaacctaggaaaatatgtagagctctgaaggatttaataacacttatcttttgtccctttttgagctataataccaagaatgataggaacttctgatctcttggcagcaacaaccatacaacatactttctggtgagatatttaagaaatggtcagctattaagtgaagacgctctgctgactcagttttaggaacttttcagtcactgcagacaaaaagtccagaggtggcagagttcagatttttgggctaacttctgtctttcatcgtgccatttacacaatactatgtgttcaaagagcttactgtcctttaaacttcactacatgacaggacattctaggaacaatgaccactctcaaatgttcttgagtactgctaaggcatttaaaaagtgcataaatccttgcttttagtgtaaatttggctcattcctgggaacctgcctttgaactcaatccaaagttccattgatattcatataataccttatgatataaaagagtgggagtgaacttttaaatctcagaaaaatatttactggcttagaccaggaaaaagtaaccaatgaatctatcaatttgcttttttggaaagtgattctggctggtcatatcaaatctataaaactgatttcctaagtctcaataatatctctgtagcaattagacttttctttaaatcagtaattttacaagacwtcgaatacccatcccttttataaaccacttctcaaaatcttagcaagcattctccactcaagttatatgaatcagtttgaaaaaatggaattrtaacacggggktgttagcactagaatgtgaacccaacaatttggatctgtctcaaggtcaaaaactacatccttgatcccaggcagctatcagtgcagattcattattttgcaaagaagaatcagggtcctgtggggagttacgtcccttgtcatcatttgtgaatggaaggaaagattccaaaaagaaatagaaaatataaaacaattaccttaatgtacacatccttttgcctgtgaatcagcaaaattgtatttaggtatagaaagaagcattctttgaaatactgccagcctaaatctgacagtcgagaaaatgctgtagtgttaacatcagctggaatatagcccaaatcttccctcttattcacagttgctgtttttgcctgtaacatccagcagagagaaccctgtgttgaactggtgttcagtagtgaatgtggccaagtacagggccatgtggcaagcactcccaggcttcttaagcccccagtagacatcttcctaggaattccagccaattccctgcttgaattcccaagccaagttactgctgtctctcttctaccattagttcaattttggagcctaatctggggtataagagcaattcagagaaggggaaattctctaaacaaaccaagatcattctcattccaggtttttgaacatgctagtcatttatctgtaacacacttcctttttctatactcagaaaattactatcgtcctgtaagttctaaattaagcatcactttttccacagagatttccctaaactgactgtcatgtgtttccactctgcgtttttctaatttatttaataagaaaaatttactcacacacagaaggataaagaagatggtgttagcattatccaaagacagatgagaaacagagacaaaatgaggcagaaagagttacatmcacacacacacacacacacacacacacacacataatagacccttgagcaacataggtttgaactgcactggtccatatacacaattttttttccaaccaaaagcaggtcaaaaatacagtatctgttcatgcctgtaatctcaggtacttgggaggctgaggcaggaggatcacttgaggccaggagttcaagaccggcctgagaaatatagcaagactcccccaccaaaaaaataaaaacatgaaattattttatttttagctgggactacacatctgtagtcccagctaatctggaggctgaagcaggaggatcatttgagcccaggagttcaaggctgtagtgaattatggtcatgccactgtactcctgcctggrcaacagagcaagactatcaataaataaataaatagataagaaaatgcagtgttcacaggatatgaaacccatgtatagaaagggccaatgttttatawatatatatatatatatatatgtatatgagttatgcagggctgaccctgaaacttccacatataccaagggatgactgttgataggagaattgactcatgcaattttggaggctgacaagtcccatcataggctggtagtctggctcagtccaagtccaaaggcctcagaaccagggaaaggcatggtacaattctcagtcagagaccaaaggcctgggaactgcagaaggccactgttttaagtcctgtagtccaaagatcagagaacctgaatttctgatatccaagggcagaagaagaaaggcaaaagagtacaaatccacattttctctgtgtttttgttctatctaggccctcagctgattggcaggtgtctgttcacttcaggtacaggtggatcttccttaatcagtccactgattcaaatgccaatatcttctggaaacacctttagagacacacccagatataatgctttactggctatctaggcatcgcttaatccagtcaccttgctacctaaaattaaccatcacaaagactataacaaaatgatccacaacctagaattaattaacatttaatttcatttccttccagtgttttcttctgtgtggaggctactttgatctctattcctagtcctatttgcttgcagcactgatgtaagagaaacactatcatgagtttgatttacatacttaaaattcattcttaatacttaaacacacacacacaaactacattaataataatgtagtattgcactgtgtatgtttttcatttacagaaatattataccatttctgttgtaaacaacatatttttgaaatttatgcatgttgatatttatagatatatttcattcttcttaattactatggtatgttacataattcttatgtctttcacatgtgtacactgaatctcactgacagaaaacttcatgaaattatttactttgttcaccactgtttctcccacgtatagtacagtgcccaatattctagtgacaaatagcagatatatcagtccattctcacactgctataaagagctacctgagactcggtaatttatgaagaaaggaggtttaattgactaaaaatttcacaggctatacaggaagcatggctaaggaggcttcagaaaacttacagtcatgacagaaaggcaaaggggaagcaggcacatcttcacatggtgacaggagagagagagaaagagaagggggaagtgctacaaccagatttcatgagaactcactatcacaaaaacagcaagggggaaatctggccccatgctccaatcacctctcaccaggtgcctccccaacaacttggaattacaattcgacatgagatatgggtggggacacacagtcacaccatattagtagaatactatttgaagtttgctcttctatttttcttgaaatgagctttgtgtatataattggaagtctgattattagattgcctcctcttgcttttactaaattttgtagaaattttggtaatttagatctttttggtctttggtaatttagatctttagtctttttggaatttttgaaagccttttaatgtcatataaactgctgatcaactagaggggtgtgtcaaactggctaaaaagtgcctaattaatgcaggagagctcctgaacaggaatcagtccagggtctaacacttaaaggactttaaatatgttatttcttttctctgaacttcagtgttctttaagacatggtgggaggtaataatatttcacctccaggattaaaatgaaatagttcatgtaatgctgttacttgaataactggtatattatatgagtactgaacattggaggttatacagattactattatgattatctaaattctagaatgtggagcaatgctatagattaacatatgctatggaataatctcattatgctatccttaagagactttagaaattcacccttaaaattagcaaagagtagccactaagccctttctataaagttttatagtgcaaagagtgaggctttgggctcagtcaaaccagggtctatggtaccaataactggttagttgcgtaactgaagccaagctatttttacctccatgagtctcagtttctcatctactaatcgtacattctatcctggagagcaacacttccttgctggtttaatgccattatcctctttgtatacacccccagcctatgaagaaggagccctgataagaaaacaaagacaaattagaattcttaaaatacacactgctatgctgatgtgggaagatttttatgagatgaggtaattataacaggtccttataacctcttttgttttccacttctatatttgtcgtggcttatgtggccaggtcagatgttaggatttggaatcacttctcacccatgtatcagaaatagaaactagatgaagtcaaataaagaacatatggggcagaattttcaaggcagcattaagactagtccttgtaaaagggagatgggtcttcaagaacgttatatgactcagctcagcccccacacagtatgctaagcacagatatggggcagatacttgagccataaataaaatgtgtgccttggcttgtagtgtactttgcccatagagactttggaatccagtgatagatagaaagttggaagtttgatcaagttttaagtacttggagttcaggtcttcatcattaaatttccatggatctagtactggtaccaacctcatagagatattacaggatctaaatgaaataacatgtaggaaggattttgcttattttttccacaagttttcattcttaaagatcttgataggagcaaactccaagtaaaatgttaaagtgaacaattttgtatttggcacttgatcatctacctctctcttgatgtttcatcttctcttatgtagttttacagagctaactacaggagttgggtttctcagttgtttgtttcacctttgcaaattgaggctttagctagcctaggagtaatcatgaatctcagcacccatgaacaaataataacatttggcaatcttcttggtatccaaccatctaatcataatatcttatccaaaaatccatcctatgcagtcatagttgagcataaatgcttaaagaaaggctttgcttctttgtctactcactcaggacaagctattatgaatgacaagtatctactaataatatgctctttcatagacatttcattttcagagggggctattgaaaattaaacaggattcaaagcaatgtgtttctgtgtgaaattttgggtatagtctgatgatagtaataaagatatagaaatcactcaagaaataactgtggattgattgaaaaaatgaaaacatgaacaaataaataaaaaatattttggaaatggatgccttaacagaattatttaaaccatttgaagatggtatccctggacctgattgctattttagaaactgaatactctaacctattttatacatatctttgtttttcagcaatgcctggggaagctctggaagcgtaaccacactgggatggtgaaggggaattagtcaatgactttgggtaacacctggaatttgacctgcagactggaatacagcttcctattaaaatgtttcattcttataagtcttgtgtgcatttacggctttaaggaagaaattctctcaggcttaagacataaattaaagccatatagtgtcagtttcaataagagcctctgtttttcaaattttttgactttcacttagaaagacaacactgtactaggaggttactctttttgatcagtctcaacatttttctagctgttctcaactccccttcaaaagtatttcccactagaattacatgaatgttgtgcccccaaggtgaatgcagtgtttggaacaacaaaatattgatttcccattgtgtaacttccatttaatttaaaccaaaatgcaagaaggggaaagggttggtaggagagtacgctgatataaccctttccagtgatccttaaaaacttcacacatttccagtgctgaattttgttgacagacacttatttcaatcacatttggtcttacatatctcttcaaaagtctagtttaaaaaaaaaatctaaaatctttaaaagcctggcttcgccagccaagaattgatatggtgagcattaagccttagttgtttgctcaattcagtctcattcatcatagttggtctaagtcttagggcttactccaaaatagcctctaaacttactggctgctccataaatgcaagaaaaagacagctctctaccacctccagcatcatatgctttgcctttgcaattccattatcgctcctgtctaagggaaattgaaaaccctcttgagtattattctaccattttgcctattctattatcttactcaacattttctgatctgcttttctccccatcccctaggtcaatgctattttcctatgatatttttgtcttgtaaaattattttacaaaatcatagtaaatgtatttaacattggttattttgatatctttttctctgccttgtttatatgagtaattgttgaagttcttgccatctgatttcttttttaggagatatactgagtatttttaccaggttttgtcatttttatcatttaatggataaagtagtcattctttttattattaatttctatatattttatgcatctatttgttaatgcactcctttaaaatttcatttaaataatgaaaaaatagctaccttgtaccaaactgctaagcactttatgtgcatcaataattttatgaggttggttctattatccttattgtatagctttaaaaaactgaggctcatagaagttagataatttgtctaaacttacacaggtaaatatttaaagcagaactgcaaacaataatcttcatttttaagcctgagatttaactttcatacaattctagatttatcatcagttggtcactattttgagacatgaggttagcttgtaggagagaaaaataaattttaaaaaagatactgccttcacaaaacttgcactatacagtaatgaagggaaaaatctacatacaccaaaaacttgaatatctcacatgaatagaatacaccaccgggaaagaaaaagccctttgaacattaagaagctgaaaagatccttgataattcaaaatggtgggtcttgctgttcccctcagctgaactaccttcccttgctcttctaacttcttagcaaacttcaaagctttcctggttaccctgccctaccatgctatctcattttgctaaattctgatagaattccctgcagctcaggcatatttaatatcactgattttactgttgggtatttatcttgtgtattacatggtttgtctctttaacctgatcataatcttcatgagcttactctctgaataacctggctagttgtatattcaaaataaagggcattggtaattgcaattataaacacgtggttcattttggtagagcaatgcttctcaacctgttcargtgatggaaaagcattaaggtcatcatgctgtaaaaggagacgtcaatatatctgattttattaactagatatattatcttaccatacattagttactatcccagaatttatatattgtagataagtaataaaaagcaacaaagattgaaggagaaaaaaactttgaagaggaaatatataaaaattatatgaatgcatgttattcatgtgttttttctgttgtattttgccttgctttgttttttaataaagtggggaaacataaaagccttttaaaaatattggtggccgggcgcggtggctcacacctgtaatcccagcactttgggaggccaaggtgggcggattacaaggtcaggagatggacaccatcctaccatcctggctaacacagtgaaaccccgactctactaaaaaaatacaaaaaactagcctggagtggtggtgggcgcctgtagtcccagctactgaggaggctgaggcaggagaatggcgtgaacccaagaggcagagcttacagtgagccaagattgcaccactgcactccagcctgggccacaggagagactctgtctcaaaaaaaaaataaataaataaattaaataaataaataaataaatataaaaataaaaaaagtaaataaaataaaatattggtgatatwgttgcttatattacttggcttcaagtccttggagttctatgaagccacatttggaaacctctgtcacagtggcaaaatgttgtatttattcttacatcaacttgtaaggtagctaatggctacaggtgttattaattacaaaagaattcggacttgctcagttacttcgataggagcatggtcgcaaaatcagatctaatcaattccagagacaatgctttgaaggtttagcacttcttgttttgatcattgagatatttaatcctatattcttattttcttagaatgctaaagaagcatatagatagatttaagtggtaaacaattttaatgctgttgatatctccctagaaattttttatctttaattacaatagaagggggataagaaggcaccaacatttacttagctccagttatgtgccaggtactctgcataacttaattgacatttattcattccttaacmaatatttttcaacagctggcacattacaaaaaagtgcactcttgtgataagcaaaaatagacatgctccctacattcatgaaaggtacatattccagtgttagacactaaccaaattcataattgtaaacaatgctaggaagaaataatacataattttatcctcaacaatcctttaaagaagtacactgtcccctattcataaattaggaggttaaagagcttgtccaaatctacaaggctagtaaaggtcagcatggctgccaggtatggctcagcaagtgttgcctgaaacccttctgagggcagggggcattattcacatccactataatgtagctgaggcttctagagttttgaagtgtatcacccgcacaatcataagtgtggccttaagtgagagcggaatcagccctcagtttctccatttgtccctaattattgtagtttctcagggtaattaaatttgaaatattttagtttgttcatcraacctacagtatattaaaggtaaaatatgtaggacagcatctaaacaatacccaattgaacgggatacaattctcattcaattaataaaagattgtttgagtgcctggtgtctgtaaaaaagacagtatgaaagatgtttcctggcctcacacttgccagtagaccaggaaaataaatgaaatgagattgaccatcacgccacaatgcacttagaaggcatttcactgcctgtgaagaatttgtttttgcctctcctggcagccatatcagttgtgagatggaagtttggaagatagctagaatgcttcgacgaaaaactttgaatgatctaacctgggcaatggtggatccctgccaatttgagggcataggaatatcatgtgcatcacaatgttcataatggttactccagcagtgtgaaaacccatgaaggaaactccaagactcagggaatccaattagaaagctttcacaaaagatcgacatgaagtgacaagttcttggattatggtggtgaattttttttttaattggaaaagcatgttctatttggaagaaacattgaagtctcctttcctcctggtttgctgtagttgcagctttgtgtggcaagtaacacttagtaaatcttccttacttttttactgtactataaatgaactttcttacatagcttgtttctcagccctttttaattagaatcagaataggagaatgggtatctcaggctgtgagtaatttgatatagaacttttcacctccaggtcagtggtaagtgaaacatatttatatattttaagtgaatttattgctcttgaagggatcccagttgtaatccttgacaccagaacacttattgccagaaagcccacgggcgttgaaaacattgatcagaaagtaacagagagaagrggttcaatttcaaccgtttttcactgtttggcttcccttacaagaccttcttaaattgttttaattaatcctagttatgattctatttttaaaggctgatatctatctgatgacaaattggatatgaatcaataagatgggcttatttcaatttagagtatgagctatcctgttgcttaaaaataattacccatatctgaaaaagcaaggaatttactacggtattcactttgcacyagggggaaaaaggaatgagtgataaaaattgtattacaaatttcagtaataggaatatggcttttacaattagaaaataatagcactgattacattgatcttggcatcaagggaattagaagttactttttctggatgtgtgtgcccatttaacacccctagaaatgaccagaatggattcaaccctgtccaattcctcagcttccaaggcaacacatccatggcaacaactaagcatcattacagtttctcaaatgtgaaaaaaataacaatttcttaactccctttaccccaagcacattttaggcaatgtaaaaatataagaaaaaatttcagttttatcatcattgattatatatatactctgtcagatacaytactagaagatgggcatataataattaataaaacaaattacctgtgtcttagcttgaagtactctgaatgcataacctagaaaaagagcttgcatgcagaccattagggacaggaacccaagggacaggaatgagagagaatgaaacgcaggagggaaagccaaaccaaaaatgaatgcatcggccaccactataggcaaatggtgttccatcctgccagactttctaaggaggcttatgaaatgtatttcagaattgttcacctggaagataaaatggaaatgattttttttttttccgtgggctccggctctcctattgtcaagcgtgacctaatggacgtgaacttccccacactaccaagttgtgtgactggcacagacgtgccatgcagcagcatcagggagtccctgtggaacctaagaaggacactgtcaggttcacctgtgtgagcttggccagaacctacgacagactatatggtgcagctgactggtggaagagatgaggctgagaagacacgaaaggcttatggtacactcttcccttagggtactcaatattcaatgcataccacaaaggcataccttctctgaaagaaagaagttaaagacttgcatccttttagaattattctataaagtagataggcacagattaaatagatgagctttggagtcagataaattgtggtttgaacattcttggtaattcttgctctttgtgcagcctagatcaactcatttagcattttctcatcggtaaaagggagggtggggtatggtaaaatagtttctattccatgcaacaattgtgaatattaaatgagattatgtatagcacctagtccattgttgtgcataggtaccatatyaaaaacaaatttctagaggtgaagatcggcaatctttctattttcttactcccatccatatttatgcatcaaatgatgccatgaagcataacatatttttaatgatatgaggattcctaagatagaaataagccttctcatagtgctgagaactgaaaaaaggaaagctatattttgtctcaagtttatcagagctcaaaatagaaagtgttttaagcttcattttcaattcataatgttcctctaaattctattttctgagagaagccagcagatgatttggtttcctaattgttaaagtaactttttaaaatttgaagaaaaaaaattgatgtttggctaagctgtttcttgaaacatcagtgaccctgaatgcaaggtctttacaagctaagaattccctgaagcttgataggaacgttgagatcttaacctacacaacagaacagcaggatcaggcaagtcactgtgctgagataccacttggggccagattttaatagctgacaattcataatggattgacaaaagcaaaacatcattaacttgaatctacaaagtcgagatttccatatgcaaataggagctggcacatatgtgcctgtgtacaagtctcattgcttgtttagttgtctgtatgtcctttcctttgtctttaagatcccagtggacaagaaccacgtctaataacccactttgcaaaacaacaacaggtgcacagattgaggcctcactaaatattttctatggtaatgatggcagtattgttgattttctctctcgcataagagtaaggcctacagtctaatgtcagcaaccagaagtaataagatagtcatgaatgatacatttgagcaatggaacgtgaaagttacattatatttatgtaacaaggatagactaaactcaccctaagggtgtggtcaccagaaagagcccttactctgattttctatattttactttaagttcataatatcaattcttataaaacatgtttccttcattgcaaggtagataactctttcatatttattctgagaataatagggctgtgaattttactttttagtgtaaatctgcttggttcagtaatatatcatacaagaaattatagcaacagactgccagactgattctggcttacgggaaagtgattttacctctctagtattaagttcttcttgaataattgtaacctatcttatagacttgttgtgcagatcagataagatcaaacaagataatataaagtgctataaaaacttaagctattgttatccctgaaaacgtatcctttggcctgggcttaggtgactttaggaaatagccaattatactatttcccttatgaaaatataatcttggacttattgttcagcatgcctgtgtgaacacactacgaggacccgcagcctcttaagatttctcactctactttctttctccatgttccccagggatctgtctttcttggsttgtctttccttttctgctgtgtatacaaatgctgtgtgttaagatcaaggagtggamacctggtttgcttctccaagttctrtcgctcagtctcataaagattttgctttgggcattgcagctggcattcttttctttctcttccttgctgctgaacggttacacaggaaagaataatgaaggcttaaactctgcgattctgcttcctatctaccttgcatcctcctgttaccaaagggggaacacatgtttttcaagctcaatttttgctgatgaaaattttgttcagtttcacagcttgacttcagaattttcccaagtgatggtaaatttcattcccttgccaaacaaggaaataacctacaagaatgtttggaagaaaaacttagcaatccccctgaagctttagtatcagatgaatagaagaaagaaaacaaaagtgttatgccagcctctctgtcattcaaaatactgatatggtttaaacattgtaaatttggggagaatatttaacgttagtcaatagaaaatattgttactaacttgtaaaccttgaagtatagatatttatagtaatggtagcatttgaactctgaaaagacaaagaagtgaagcttacacatggctcaaggttgaatgcatatttggtgaatcaattacagttggagacaataaactagattttcttcctctcgtacattacattattttgtttagaacattcatttaaaaaatatcttatgaaaacttaacttctcttatttccttgatggctaactaaaacactataattctaagttcttttttattttcttagttcaccatagcccaggtaaaagtcctttctataggtcactttcattaaaggtgtgataaaaataaatgacttgtaacaggtagagaaaacatgaaccaggaggggcaggctgcaatcctatttcccagcagtgctacagaaagcctccatgttcttttgggttttatttctgtgttcaattcccaccaagttacaccgctccccgaccccatccccatcttcctgcctgggtgtcaagggctgacactgaaatagacaaaaggcagaagagaccttccctccctgggaagggttttggaagttagctagtttatttaatccccaggcaaacctgcagtcaagttaatcagaatgagagaaacagcttcctacatacgagctaggactgtgagaaattgtttttcagggtgttttatagccaaaagccttcaagagaatggaagagctctccaaccaggggcacaaatattcaaggagagcttgtttgttttatggttatttttatcccacaataaacagcttaaatttgcagactatactttttgactataaagtgggttatttctcaagatgctggtgctttcccctaacagatggaataaatagaagaaaatgctgagaataaaccactgaaattctgatttattcaatcattaacaaaaagaagtgcaatttcaatggtaatagaatgaaaacccaactgtttctgctttccttctgaaaacttgttttctatggagaatgctgctcttaggcaaacacctatttaaacctcagcaatgtataatcttaacttcaggcagcatggttgtataggtttggtaatttgtaatacctctgcaamtagggataaaatactaactttcaataatataagcagtatctgcagtacaaatactaaaagtgctacattatatcccaggaaagatattttataaaaaagactttgcacttggttttaaatgcttctctaggcagttgctttgcaggcttgttagaggaaacacagtgtatgtacaaccttcggagacatggcactaagtagacaaccagtcagtccagtatgtctttttcaggacacaaataagaaggcaggaaaacaaaagccatttaagtgcaacaataacctcagggaggacacttccgtgttggaaaccacactaaatgcttcttggaaaaattgcttgattataatgaaaccaaataaaatattgttgtaagtctataagaaaagcagaaaacctaaaattaaaaaaaatccatgacataagtatatgtataaaaaaaatccatgatatacacacgtgtgcacgcactcgtgcacatacacagggtatgtaagaacataaaacatttatctgtgtattttgcatatcacaaagaactgtaggatataaagatttcaacatatttgtgcacaaactttttaaagattttgaagtccttgagctggagtttggctctgtcgttaactaatgttgtgacctgggtttactcatattttttaaatcctaagattatttttgcagaatttggtaattagacttctaaatgatctataaggaagttctttccagtttaaaaatactgtaatttcaaggttttccttttttttctgtttgcttgtttgttttcaactaagtatttctttttttcctttaggtttattattaataaaaagaaatcaacacagaattatgtttgcaatatgcaatcacctatatttagctgaagagagatgtttatgacacaaacccttcagtttcctcgtttgttatctttggtttacatcagatgaaaatctccccagtagcaaggtggcagttacaatctatggagcctaaaattaaaatgaaattaagttattttagaagacatctcatttaatagattcttctattcacttattcctctctctcgtcttttatctctaacccagcacaattcttaaaatcttgaataagaacagaacttcatgatagtcttcccaggagttttaacaaagctctgtatagaaacagtctggttgaacattttttaatctatatattctgaaagtggatgtggcttctcctgtcctaatcatgtaagcagactgcaacaacattactgctcaaaccaacgaggtcttttaaaatgtgstgcccgtttcctttttcaatccaccgaatagctgcagttgtttctaaacctctttagttctctatgcacacacagtatcatgcctatctctttgtgcaggtgtatgttttgttgcggtttgtttacaattggcaggggttgattgtaaaagccctgtattatgaataaaccaatgcctgaaatgaagtggaaccttgatttatttgggtaggactgttttccagtactgtaaatcatattttggtgttcatttacctttgcattctttttgagccaccggcactgagactgacgaatgggaatcaaatgaagtgtgctaagtgcttctgctggagggtttcagttccccatttgccggggtgtgatatatctctgcaatacatcatgcaacttattttcctttacttattttatttagcattgtcacaaataatatcaattggccattgcctatgaaccctaaagagtagtaaattaatgaaataagctgcatgtacagaactcatctgtccccaatttgattagagccactttggttgcaccaagccatttactatagatgagcttcatttattaaacaagcagcttcatgagttcttggtaaattgttatgcacagtatttgcagtgattttcatgaaacacttaaagctgactcttttatatctcaatcactaagagtattttatgcctgtgaaataggcattttgagtcatcttgtgactttcatctgactaactccatctgaagtagttgtctatttrtggaaggaggtgtcctttatttttgtttctagggaacacagtaggagcaarggaagggcagaggggcttatttcatrtaagggcttcttgtcgcctgaactatggttgaagttccctcacagaacrgagcagctggtcacagctctgcccaggcatttctgtgtctgcatcttcctgctgtacttgcatatcaagaagcatttcagaccacaggaatgcaggattccaaggcgccaatttaccttggaatttgaaaaggtaggtttcacaaagcgaatggctttttaaaaaacaaccagaatcattcagatagataatgttggtgtttctttgtggctttaacaaacctggggaggccaaacatgttccagaaaagcactgcaaggtaggtaaaagctgtgaatcagaaacagggaaaacataagtgactttggtatgaaacaaggtgacagcttctgggcactggggaaactgcctcaaaaacaggagaaggggtgaggggcacaatgcggggaatgtgtatccagaggctgcagtgagatgtgccgatcacataacttctgtgaagggcagaggaacgaagctgagagacaaagaaatcatggtggatgagataagaacattccggagaagtatctgtgtgagagtaaagcagaataaaaattggaaacatttggaagagcttgtctctttccagagcttaaatgaaggtgggtggtggtgatgtaacgcagaatcgtcctatatgtctttgctaagaacatatgtcctcctcatgaatccactgcagtcaataccgataaaaaaaagtgggaggcaatcatagaaatgcttagtgttaaagttaaaagcatattcaatattcctgttttactaaagaattttatgcatgccagtacctcaaaccctcacatgttttcaaagaaatttagagccccaaaatactagagcttacaaagtggaaatgaagaaatttagatatcccagtcccacagattttgttaatgatgtttcctgagagttactttataattttttcagtatatagttacagttgaaatctaattcrctggtacaagttctttattttaaatgaaaattaaagagtccattgaaacagtctcctaattagagagaatatggaaggaaggaaggaaagaaaaggaaggaaggaaagaaggaaggaaggaagggtgggaaggagataggtgtccaaaccagagtgacctcctcttgaataggggctgggtaaaataaggctgagacctactggrctgcactcccaggaggtcaggcattcttaatcacaggaccctgttgataaagaggatgtggtaaagaagatggccaaatcccaccgaaacccaaaaccaagatgtcaacgaaagtgacctctggtcatcatcactgctcactttatgctaattacaatgcattagcatgcaaaaagacactcccaccagaccatgacagtctacatgccaacatccggaagttaccctgtatggtctaaaagcaggaggaaccctcagttttggaaattgtctgtctctttcccagaaaattcatgaataatccaccccttttttagcatataatcaagaaataactacaaatatactcagtcaatcagcccatactgctgctctgctatggagtagccattcttttgtttctttacttttctaataaacttgctttcactctactctggacttgcctcaaattctttcttgtgggaggaggaaggaaggaagtagggaaggaaggaaggaaagaaggaagggagggagagagggaagggggaaggaagaaagaaaggaaggaaggaaggaaggaaggcaggaaggagaggaaaaaaagactggcagttcctgtatgtatacatcattattattattaagtgattttttttgtgctcattatataacataaaaatatcatggaacatttgagataaaaggagctggaaaatattaaataaaatacatcccactcaacaagtccaaaggtgagtttcacgacaaaaatgatatcttgggcaaagtgttttgaaaacaactgctaccctaaatactactttcatattcacagttgcacactaataagagattctgaggagtcctgcagtaaagaaagtgtctgagtttgttttaacttgcatttcaaaaatatgtttgactagggtaattttttttttcatataacagctattaacagactatgtactagtgctccattgaacatatcttgggaaatgctactctcaacacttcggcataactcactcacaaattctaactcttttagagattatacttaggaaaatgtgtccgtgggtagaactacctctaagaaaagtaaggtttatgaagggaattctaagctctggaatcttcagacatgaccaatgagggaataaaatctcattctgggagttcccaaactccagatgttttattttttctataactgaacttgaaattgaaaagtcaatctttaaaaaacaatagtatcatataaaaaaaacctatagataggatactcatatttagcaatgctctttttaccatttttgaagttgtaaacatgactagaagccaaaaatactgattcctactcaacaacttcctgtgttacctgaattccgcatcttctctatcaatcaaattgctgaaatctcactctaaaattagcaattttattctgattatttctcagcttcatttcccttgatctcttgtgggcatttgacagatcaggcccatttttcaatcccaaattcaaatccattcctctcccatgaagccttctctgattagcttgtcctgttctcactgacatatatctctatctatctatcatctatcatctatctatttatctatctatcaatcatctatcatctatgtatctatcatctatcatctatctatctattttttccccaaaaaattatttaatatttgctggatactgcaattcatgcattatctttttccattttttacttttctattttagactaatttcaaataaatgttttgtttattgaagcctagaactaagtgttcattacaccccgggtttctcacttgttttgaaaataatcarcatcctaaagtcaatctacaagacttcctttagaatttttttttatgttggtctcaatgcaagaatctgcaacaagaaaaaaggtatctaaatttgttgagcataggccaggcacaggggctcacgcctgtaatctaagcactttgggagtctgaggcaggtagattgcttgagctcaggagttagagaccagcctgggcaacatgatgaaaccttgtctctacaaaaaacttaaaaaattaaccgggtgtggtggcatgcacctgtagtcccagctccttgggaggctgaggtgagaggattgcttgagcccaggaggcaggtggtacagtgagctaagaatcatgccattgcactccaacctgtgcaacacagctagatcctgtctcaaaaaaaattaaataaataaaaattattgagcacttatgtgaaaaaccctgtgctagatggatctatgtataagccttatcataccactgtggcattattgtgattcttattaatatcatcatcaccactgccatatcaatataaggaaagtgagttagaaatacattaaataggctgggcacagtggctcacacctgtaatcccggctctttgggaggctgaggcaggcagatcacctgaggtcagaagtttgaaaccagcctgatcaacatggagaaaccccatctctactaaaaatgcaaaaattagccgggcgtggtggtgcatgcctgtaatcccagctactcaggaggctgaggcaggagaatcgcttgaacccaggaggtggaggttgcggtgagctgagatcgcaccactgcactccagcctgggcaacaagagcgaaacttcgtctcaaaaaaaaaaaaaaaaaaaaaaaattaaataattgggttttcataatgccccaggcatggttctaagtatgagtgcaaaagtaatattgtggtttttgcattattggaatttaccgtttgatattggaatacattcttaaataaatgtggttctgttaaacatcattttaatgggcatttctcactttattttttttgctaatcacttattacttgttgtttattttgtgtttattttagatgatggaaatgatgttaaagaaaaagaaaattcgagtgattttcttatttgaggtcaaaatgggtcataaagcagtggagacaactcgcaaaatcaacaacayatttggttcaggaactgctaacaaatgtacagtgcagtggtggttcaagaagttttgcaaaggagaggagagccttgaaaaygaggaaaacagtggctggctataggaagttgacaatgaccaactgagagcaaccatggaagctgatcctcttacaactgcgtgagaagttgccaaggaactcagcgttgagcattctagagtctttcagcatttgaagcaaattgggaaggtgaaaaagctggataagtggatgcctcatgagatgagtgaaaatttaaaaaaaaataaaataaaaaacaaaattgtcattttgaagtgtcatcttctcttactctaagcaacaacaacaaatcatttctcaatcagtttgtgacgttcaatgaaatgtggattttatacgacaactggtgatgaccagctcagtggctagaccaagaagctccaaarcacttcccaaagccaaacttggaccaaaaaaaggtcatgttcgctgtttggtggtctgctgctggtctgatccactattgctttctgactcccggcgaaaccattacatctgagaagtatgctcagcaattcaaagagatgaaccgaaaacttcaacccctgcagtcagcaatggtcaacagaaagggcccaattctccacgacaatgcatgatcgcacattacacaactaaagcttcaaaagttgaactaactgggctacgaagttttgcctcatccaccatattcacctgacctcccgccaaccgactaccacttcttcaatcatctcgacaactttttgcaaggaaaacacttccacaaccagtagaatgcaaaaagtgctttccaagagttcactgaatcctgaagcacggatttttatgctacaggaataaacaaacttatttttcattggtaaaaatgtgttgattgtaatggttcctattttgattaatgaagatgtgtttgagcctagttataatgatttaaaattcacgatccaaaaccgcaattacttttgcatcagcctaatatgaggaagtaatagttgaacagaataattctttcctggaagtctggcattttgcctggggagaaggatcattaaaaacttaaacattttaataaaaccatttaaacaaatgattttgttacaatgtctgatagggtgatacatgctgttgaaatgggaaagttcccttgttccctcacagggctggtgatgggggtgtggctcgcttcttccgtgcctcactgctcaaacctctaggggagcatacagaccggcagctgtggggctctgaccccacggcagtgtctagaggtgagtgtctacagctgaagccccagtgggtgtgtgttacagggtactcttttagtttgctgtctataggcagcttgtgttaaccagctagattagaccctctaccttatcccaaggacagagggctttctgtatcctgggttcttgccttggtgtaccggaagaatcggatcacacgtgggcttggagaatgaatgtaaagttttattgagtggaagtagctctcagccgatgggggagccagaagggagatggttttcccctggagttgggctgctcagtggcccctggctctcctaagacttccccaggccaaactccacctagtcctgctagaggacggcctggcctcctgccggcgtcagtcagtgtgctcttccattggtgtgcttccctcaacatcctctcaatgtccggccacttatctttttccgccgatgtgttcctctcgccatccagcagcttctgtctctgccttgctagggtctcaggtttttataggcccaggatggggttgtggtgggccagarcggtcttggtaaatgcaacatttctgcctgtcctcacctaggtccgtgggggtagagccctagtcagggccctcctctacccaacacttcccttcccccctccatatcatttaaagggaccacgcccttcccttcctggcactcttgtatcactataaaaataaaacagtataaaagcttggaatgcaaagagcagtaaacgctgagctaggatgggaagccaggctctagatcctctgtaatagcccctgttattcatcagtctcaggtacaactgggaggtcacaattcaacccataatgaaagcatctctattactggcatttgaggcctccagtaatcactccttacctacataatctaaggtaactcaagtcatcaacatcaaatctctgttccaatcaagtctacttatcttcacttaaaatgtactcactatgactctgtgccttggctcacgctgttcctttagcatgtgtgcacacgcactcaggcacacattcacacatgctttcttttgactttaatgtaagttcaatttattctataaaacattccctgtttattagagtaagagttacatcttcagttttgtttgtaatttttatcacatgtactgtgattctgaacaatctataaatatgtgttgacagagcagaatttatctgagctccaagccctgaaaaatgataaaaagaaaccaatatgcaaatatttcagaagctgaggaactataacttcgggactagttttttgtcgtgtctgcattgacaatgatttttaaaattaaagtgtaaaatctggaaaaaagtattaaaaatattgaacctactggtcaagaaaaaatattgaggataaatacaaatatgatttgcatggcattagactttggagaatttaataacattaaattcaagatacctttaaatctttgtgtattaatattatttaatttttatatccttcaattccaaaaaagaatataaagaaataaatttgaatgtttattcacattatttcagccattaattataatatacagttgacccttcatatccacaggagattggctcctgaacccctgaggttaccaaaatccgtggatgctcaaatctctgaaataaagtggcatagtatttgcacataacctacgcacatcctattatatactttaaatcatctctagatgacttataatacctaaaacaaggtaaatgctatgtaaataattcttatatggtattgtttcctcatttgtattttttaaattgtattatttttcattgtttttttcccaaatatctttcagcttctgatggttgaatctgagaatgcagaagcagcacatatggaggactgactgtgtatttaaaagtggtggttcagtcatagtgaagagaatgacttctttctaaataaaatgaagcaggtgtattcatcattaaagtgaagaaaacatgtttgagaaaagcaaaatgccaagaattcatatgacatttgcaccatctcaaactaaagctgaagtggccttgccaatattatttattctaaataatcacacagaaaaacaaatggcttctcaataaaaaaatactccttctagttccaacaataatagagtcagaaacaggacttgactaaaactgcagttgcyattcctgctttccacctttttccaactttaaaagatttaaatacaatttgcttgtctttataaacaacagaactaatcaccatccggggtagcaaccagcatgtgttgctaaatttggcagactcaaccagaataaagaatataaagaacagttaatagaatcttaataaagttgctggtgtttataggcattacattagtttgctatggctgccaaaacaaagtactggaaactgttggaaatttaatgactctcagttctcgaggctaaaagtctgaaatcaaaggattggtaggatcggttcctttttagggctgtgagggaaagatctgttctaggtcattctggtttgtagattttcatacttacatgtcattctccctgcatatgtggctgtccctaaatttcccctttttacatggacacaagtcatgttggattgggacccaccttaatgcccttattttagcttgattaattctataaagattctatttctatacaaggtcacatttgtaggtagaggggttaagacttcaacatatgaactggaaggtcacaattcaacctataacaagcacttttctcattttcatttggagcgtaatttaaaattttatttttttgtgtaaattctatgggtaacataaatacctattcggaacaataattaagctgggtcttcaaaactgtatatatttaaaataataaatgaaattcctaacaggttctatggttgttttaatcttgacatatgtaaagttcaaatgagcttggaatcatgatatgactatatattaaaaatgaggaattgaaaagttacctaaacattgctatataagttcatgggcaaagtaggcagctgcctatgatgtgcaggacctgctagtaattcctcatgtctccaaaatctgtatattgtcaatttctggctaatatctaatattccatcaaaagagtccctcacatgaaaatacatatattgaaagtaatgggaggtgaagccaatggttaatcaccaaaattgtattgctacactgtcaccttcaagtacaatgtaccaacacctttcacctgaattgctaaaatagggtcttaactggatgcataccttcattcctttgtttagcaaatatctgtagggcttctgccaagtaccaagcactgtcataaatgtttagggtatctttgtgaaggaaaaatatacctgtccttgcagggtttatctagaaggatatggaaatgtctkttttttttttttttgtctctttccaattcatcatctacaaaatatccagagtgatcatttcaaggagaattctgatcttgtcacttgctacttaaaaccttttcataattttctttgctttagattaaaatcccaaagccctgacatggctctcaaggccctgtgtaatctgcttcctccttgactctgccaccccatgcatataagctttctatcccatccactctgctccaaccacactaccctgctaatctaatggtgatgatgaacaaatctctcctacactcagagcatttgtatatttatttcctttattttaggagctcccttgtttttcaaatgtccatttccaactcatcgttcatatctcagcagaaatatcatttcatggatgcttccctaatgcaccaaaccaagcacagtttccctctgaaacctatttataacttctgatttataataattgtgaataagtatgtgtataatgtctagaataaagattatgtatttttataattttctctttatacttagcacggtactggataaatggaaagaactcaaaacatatatattgaatatamgaggattaaggtagaagggaaaagagagagactaccctgactcttggtaaggcaaaaattaaactggaattaacttgaacagggatggacactaatttaatgggtagaagtttgggccctaggcagaaaactgcaatttactttagtcagcattttccaagtacattcaaaaacaggttcattcgaggaagtgcttctcaaaaacatgatgcaatggtcaaataagtttgtctgcctcttagatagtgcctattagagtctcctattaggagctctaataattcttctaggaaagaaacctgtttaacaaacccccctcttcctstagaaagcctaatagcattgaagagtacctccttggaaatactgttttaaggtataacaagtctgttccactcccttgtctttttaagctatgtagatggaaaatctcawtctgcattttttcttatctcaaaaaaaaaaaaaaacctagaggccttacctttagaggtattatttttacttcccaatcaaaaattagtatgtaaaatcaggagttgtagccccctctttagaatatagtattttcataattttggatacttggtgcatcartatttataaatttgtagtatcataataagtggctgcatactttctacctagaattcctttagcttaattattgtggtatagaccaggagtctccagatatgttgagcctattacttgtgtatttttatatgtaacataaatgtaccactacacttttatatcatttattttttgaaactttccctaaaataaaatctttaaagattgaggtaaaattaatataataagaagtcctaaaattttcttactattattcagaggatcattttgcatccaccttggattacatgcatgtacctcaccttagagataattcttaatactatgactggactagaacttgccagagcatgataagacctaggaataaggaattattccatgcacttgaagctttattgttttcatttaccctgaaaattactcarctaccgtttattggatgtggcttatttaggtgagtagagagaactgaattcggaggctttaaagaagatataggaaggtgaacaaaagatttatctttataaactttgtgtcgggattgaggtgttgcataatttactatcatgatggtattagactgagtcctgtcttttttactttggcttgggaccccaggagggtacagtttcaaaggtacacagttctcctagaagactagactataaagctgtctgatgatttagggcatgaatctaccagaagttcagaaaatagaagttacaaagaaccaattctaaattttattctattgtgttttactcagggacaatcctgaagagtaagttgtttcaatactcagaacactaacaatagtgtctggggcaaatcgacttgtcatattgtacagacaacttagtttgatcctctatcctggcagagactacattcagagaaacccttagaggggattcatcacagattcatatgaaatcgtaagtttgaagctcctgagttccaaagtcatttatcattagataaaagcatcatcatgatttagatgagtagtattgcagaatggttaggaatacaggccttgatggaaaacggaaatggatttggcattaatttccacattaaacaacttaaaggctatatgacctgggataggatatcttagaattaccatgaaatgtaaataactgaacaatcccaagtatcaccttgagtgaagcactcagcacaatgatgctataattagcacataataaatggtacgtagttcttattattatttatattatttttacttctatggaagaaatgagaataatctgtgatccatagtgtttttctatgtaacaggaccctaaatttgctcttgacaacatttcatatatatatccacttgactgtattaaagttagcgaccatatgaaagctgacaactttgattaaggaattttctattggaacttgacttaatcttttagtttgagtggaaaatctggtggtgagtctttttctcttctgcaattctgtcaaacaccgtgatccatggagacagaaaggagaattaagccagggaaatataccataagtaaaaactttatggaattgaacatggaagcaaccatgaaagaactgtaggaaaaaaaaaatggaatcaacactgcaaagccaaatgactcctgaattctgtattggctgaacttgagagtgaaatactttacacaaattaaaattcttaaggagaatgagttataaataacatacctatcaatcttgatttcaaatgatattctagaacatctgagttctaatgcatttgggacaattgtcaaagttctctactggaaagtttgtttaaaatttatctgcaataaattttatgggttttatgtgttatattagtctagtcagctgctaaccctgcaggggcaaggactggaattacatttgtcatgatgaagtaacttggaagtggaaatgatgcatttgtcctttttctccaaagaaaacacggatctttataaagttatttttttcttttacaaaatgggacccaggttccataattttatatgttaaagtagactcattgattgttctttagagaattgggacagtctgtgaaacaggcacagaatggaatagaaatagcttcagtagagatttgatgttctaattcattctctgcagaattacaaatgcccgtgctttctattgtgatacattcccctcaccacacatatctgcaaaaatctgtgcaatatgtttaggaaaataatattcattttcagggtctaagagattcagatttcttaactctttattatccttgaaaaatcaaggctaagatggactcctgaagaaattattttcttaacatagaagtatggctaacggagaacacatgcaaaagtttaagcttttccaaaccagcataacttcccatgcatgcagcaaagactggctatcatcaaacacctttttttgggaacaagttaaaagacagtgcacactcagcttgcaccaccagaactggccatctaaccacggtaagcattggattcattatcctaacataacaccctgaaggcaaaattgtaaggacctatggatcataacaagatggaggtcacaggagagccatttaactctattcctaacataagttatttatgaaaaaaaaagatactattgaattgttttttgcatgaatgctataaaatatttttattaaaaataaaacagcgatagaaaaaaacacaaggagagagaatatcccaaagcaaccaaacacatttaacagagatgaagcccattctatttccctggggtgaaaatgtgtggttaaacatatgagaaggatattttacttggtgtatgttacccatcatagtagcaccagcaggagcagctacagaaaacggcccattagtttttccataataaactcttttttcactggcacacccttgggattccttgacattacttcagtagagttattggtggatggcttcaataattggaactctcacaatctgatattaacattctccccatcactttagtatatgctaaatattaggaaatttgattttcagagcattctttccaaggtatgtgattccaaaagacaaatttataaattcaaaatgctctttatatttttgcattttacatttgcattcctttctcaaagtagcatgtcaagacacctattcaatataactttatcacgttcaaggaaggactaatgaatgagagttaacagctcccagttgcagtctccaatgtgtctaacttatacctaaggcaatagcctctgcacaagggagttctctgaaaatatgtgccctgaagtgtacaagcataaatgagaattggatggaagtcttcactgagcttaaaaattttcagcaattaattgtgccaagcaccaggaagaagacagggttcttaatgataaaaagaaatcatgattgaatctggaagccaggcattttatgcaacatagcagagtaagtttaatcagagaaatatgcagccatttaaggaagaacacagaggaaatgtgatacgagatcaccaaaacactgcttgaaaatttttcttaaagttagtgagagtattagacttcatctgacattatgtcttctctaaatgttataataggactgaacctaaagaggtaaaaatgacccaggcagggaccaacaggtcatttacaccacatctccagattctaagtctaatgttccattactagagtagacatctctctagggaagacatggtagcatatctctaattcacaggattaatttgtatgttattgctcccttttcaaagaccaaaatagaatgaggaggstgtggccagagaaatgacaactattaataatttcctatttcaattttgctatttaacaaaggaaacaactgctgagagaccaggaacttaggaaaaatgtctaactgagggtctaagagaaaaggcaaacaagaaaggaaaatagtgaacgtattaggtacatggaaagatagatgacagtttcccattaaaaatttgttaataaattttacagaatagataagatttctcaagaaaaggaaaatgaaaagagaaagaataaccaggaaaattcaaagtaatatcattcaataaacatttattaaacatttcttatgggccacgcataatactggatactaggtgctacaaagagatgtcaaagttcttgttcttagagaggtattagtggagtgggaacacagaaattaatcaaataattacactataattaaacccaagtcaagtgctctgtgacaagaacatgattctatgaagggttatgagaaaagcttctgaactagcctggtaaatcagagtttcctacacaaactgatatttgagctgaaataaaggacaaataggaatcaggctaaataaatgggccaaagaaaatgatgtctcaacagctagggggaaaaactgtgtgagatggggctttgaaccagagactatattagcacatattaagaagttagggccaggtacaatggctcacacctgtagtcccaacactttgggaggccaaggtgagtggatggctaaagcccaggagtttaagacctgcctaggcaacatggagaaagcccatctctacaaaaaatacaaaaatcagtcaggtatggtggtgctggcctgtggtcccagctactcagaggctgaggctgaaggatagactaagccccaggagaggtcaagagtgcagtgagccatgactgcaccactgcactccagcctgggtgacaagagtgaggccttatctcaaaaaaaaaaaaaaaaaaaaaataggtgtttttagtagtttcattgcattaatgaccccaatttatcacacctttataaatccatgccctttttctagtgctttaccataatgactccacttgccatgtgactttctttggccagtagagcagtaacaaaccagacccaggcagagactcagaaaagcacatccaggctgctactttcttttcctccaccagaagaatctgcatggggctaccctgctgaatgagaaaatgtggagcagagcatttttatcaactcagccccttccagtttacccagccactagccasacacctgggagagcccagccaagatcagccaagcagtctagctcatttataaatggtaagtaaatcctgctaagccctctcttcacatcagcagaattcctcaggtgagtcccagaaggctgcccaattaatccacagatttgtgaactaaataaatatttaatattttaagccactaggatttgtggttatgttaggcagcataaatataatatagataatggagacagtggtaaatgtaaaaatggattgtacagtggtatatgatgtgcacaagatggaataattttcaggctatcacaacaagataaactggcagcttggattaagtgatagtgaagatgacaaaggctaccaaatcaaggcaattggaatttaattctctaagaaatggtgaacttttaaatgccttaaacaaacaaatagtgacatgaaagagcttctgctaatttaggaaaattaaattgaccatgttttcatgaatggcttatagtaggagagtagagggacagaatactagaatgaaaaaaaattggaagaaagaaaaacgattaaatgccaagggaatgtctccaccacatgatagctaattgaacagcctcattcaatgaaaccattctgaggcctatattcaataacatattctcattcttaaaaagttgctaattctagatgtttggagcttaattcaatgctcttttgacagtccaacctcaattagtggtgacttgagaatggaatataatccatggattaaggcaatgttaaattagcttcaagacccttttgcatttagtggtcatgtgaataagaaattaatatgaagatataaacaattcaaagggtatagaatcagttttaatgcccactttgccattgctggcaacaggttactcctttctgactttccaaaatgttctcaattccatccttacaatcataataaaaaccatatccataatatagacaaacacattctgtttcctcggtaagtgtttaatcacccaatgatattcatgggtatgttataaaataggaactgtatagggcagtaaacaatgggctttaatcttatctccatctatctaaagccaatccctccacttttacaaagataccatttcctcttgcttgtttaaggatgtcattccaggaactccttgaattctttgaatatcactccagtaatacttccctcttcttcttatgttaatatttttctctctttctccttttcgttgaaatagatgtacataaatatatagatatgtctaagttcttaagtttacttgctccactttccctgtctcttatccatttattacttagttgtatttgttgaaaaactctgagggaatgacctattcttgtagtttctaattctctcttcccattgtcttttaaatccactcaagtcaagcctttgcctccctcacgccatcaacactactctcttcatgtttaccaccaatcaacagccactctcagcagcaatcctacctccttgatagatcttttctcattttcatttaataccacccaatgccttgatgttcattctttctcactggtttctctttctcaatcttgcttaagcattctattcttctccccagtctcttaaagttgggaagactcccacattgtttttggtctcttcactctctctattcatgcttttggtgatcttgtccaatcacatgaatttaaatataacccatatggcaacaactcacaaatttatatctccagccctagcttttatcctaaataccatatttgtacccctctctagttaactacctacttgaatgtctaatggacatctcaaaatcagtatgccccaaactaagcaacaggtggtttcacctgcaaccttccgcatctcaattgatgaaaactccatccaattgctaagcataaaaaattattattattgtactattatatccaattattatcatgattattactaacycttgactcttacttttctctcataatttgcatacatccagcatatccttctaattggattcacccttttcttctgacattctattctcaatacagtagacagagtgctgcttttagcgtttaagatggatcatatcatttctctgctcaaaaccatcacaatggcttccattttcattttcctccagactaaaaatcaaatttctttaaaagtattaaattgccccttcccctgtacctgaatccagttacctcctgccctcagctagtaatatggtctccttgcttactttctactacagctataagctctccttacttttccttaaatttgatgaccagactatcacctcaaaagatgtgctctcattatgtttttttgcttggaatactctctttccatatatattyatgtgcgtctatgtgaagagaccaccaaacaggctttgtgtgagcaacagcgctgtttatttcacctgggtgcaggtgggctgagtcccaaaagagtcagctaagggagatggggtggggccgttttatcagatttgggtaggtaaaggaaaatcacagtccaaggcgggttgttctctagcgggcaggagtggggggtcacaaggtgctcagtaggggagcttttgagccaggatgagccaggagaaggaacttcacaagataatgtcatcagttaaggcaggaacaggccattttcatttcktatgtggtggaatgtcatcagttaaggcaggaaccagccatctggatgtgtacgtgcaggtcacaagggatatgatggcttagcttgggctcagaggcctgacattcctgtcttcttatattaatatgaaaaataaaatgaagtagtggtaaagtggtgggatggtgaaaatttcgggggatggtatggagagataatgggcaatgtttctcagggctgcttcgagctggattaggggtggcgtgggaacctagagtgggagagattaagctgaaggaagattttgtggtaaggggtgatactgtgggactgttagaagaaacatttgtcatttagaattatttggtgatggcctggatatggttttatatgaattgaaaaactaaacggaataagagaaggagaaaaacagatattaaaggtctaagaattgggaggacccaggacatctaattagagagtgcctaaggagattcagcgtagtcctgccagcaaagattatttatttacttcaagagttaagagtggcagtttggggatagcaccaggagataccagctgtgatggcttggagaaacagtgtaaaccggcagtgtaaacaagcgcagggcatgtatgagtagttgggaatgatgaataggagtatgactagacakaagatagtagggatgacaagttttttggggcacagtccaagttgttctggtgtctggaatgagactggggcttagtaaaaaggagcgtccatacaggagctcaaatgggctgtaccctgtagcattccgaggacaggcctgaattctgagaagggaaagtggtaaaagtattgtccagtcctttttaagttggtggctgagcttggtgaggtgtgtttttaaaagaccattagtccgttctacctttcctgaagactaaggaccgtaagggatataaaggtttcactgaatttccaaaaccttgaaaaaatgcttggctgatttggctaataaaggccggtctgctatcggattgtatagaggtgggaaggccaaactgaggaattatttctgacagaagggaaaaaatgactgcggtggccttcttagaccctgtaggaaaggcctctacccatccagtgaaagcgtctacctagactaagaggtattttagttttatgactcagggcatgtgagtaaagtcaatttgccagtcctgggcagggacaaatccctgagcttgatgtgtaggaaagggaggaggcctgaacaatccctgaggagtagtaaaatagcagatggaacactgagaagtgatttccttgaggatagatttccaggatggaaaggaaatgagaggttctaagagacaggctagcggctcataacctacatggaagaggttatgaaatgatgacagaatagaatgggcctatgaggctggaaggagatattttccttggtctaagaaccatttgccttgtgtggcaagagattgataggtggaagtttcagtggggaagtaggtgggagtgactgatgtgaaggagaaaaactggcagggacagaagttggaaagctggctgcttgtctagccaccttatcagcataagtgttgtctagagcaatggratctgatgycttttgatggcctttgcagtgaatgactccagcttcctttggaagtaaagcggtcttgagcagagtttttattaaagaggcattaatgatggaggacccttgcatagtgaggaaacctctttcagcctgtataacagcatagtggtgcagaatatgaaaggcatagagtcactataaatattgatgcgtagcccttttgcaagagtgagggcttgaattaaggcaactagttcagcttgctgagaggtagtggagtgcgggcagaacggtagcctcaatgatagatgtggaagatactatagcatagcctgactttgctggtgagtggcaattaggcctgatggaactgccatcaataaactaaatgtgatcagggtgaggaacaggaaagaaggaaatatggggaaacggggtgaatgtcaggtggatcagagagatagtcatgagggtcaggtgtggtatccagaataatgtgggaggcccgagtgaagtccgtgccaggaacaatggtaattgtgggagactcaacaaagagtgaatatagctgaaggagcgggggagcagaaagtatgtgtcaggtacgaggaagaaaatagattttggaagttatgagaaatgtagagagtgagttgagcatagtttgtgatttttagggcctctaaaagtattaaagcagtggcagccgctgcacgcagacatgagggctaaaacagtaaggtcaagttgtttggacagaaaggctataaggtgtggtcccagctcttgtgtaagaattctgaccacactaaccatggctaggaaggaaaggagttgttgttttgtaagggattgaggtttgagagattagtcggacacgatcagcagggagagcacgtgtgttttaatgagaattatgctgagataggtaacagatgaggatgaaatttgggcttgactgaagtaatgggggctgtctgtgaagccttgcggcagtacagcccaggtaatatgctgagcctaatgggtgtcagggtcagtccaagtgaaagcgaagagaggctgggatgaagggtgcaaaggaatagtaaagaaagcatgtttgagatccagaatagaataatggattgtagagggaggtattgaggataggagagtatatgggtttggcaccacggggtggataggcaaaacaatttggttgataaggtgcagatcctgaactaacctgtaagccttgtctggttttaggacaggttaaatgggggaattgtaaggagagtttataggctttaaaaggccatgctgtaacaggcaattgataacagactttaatccttttaaagtgtgctgtgggatgggatattggcaatgagcgaggtaagggtgattaggttttaatgggatggtaaggggtgcatgactggtcgctaaggagggagtaggggtgtcttatacttgtgggttaaggtggggagatacaagtggaagatgtgaaggaggctttgaactgggggaaaaggcagcaatgaggtgtggctgtagcccaggaataatcagggaagcagataatttagttaaagtgtctcggcctaataagggaactgggcaggtggggataactaaaaaggagagcttaaaagaatattgtgtaagttggcaccagagttggggagttttaagagctttagaagcttggccatcaatacccacaacagttatggaggcaagggaaacaggcccttgaaaagaaggtaatgtggagtgggtagcttccatattgattaagaaggggacgggcttaccttccactgtgagagttacccgaagctcagcgtccatgatggtttaggggcttccaaggcaattgggcagtgtcagtcttcagccgctaagccaagaagacctgggaaggagtcagtcagagagccttgggccagagttccaggagagagccttgggccagagttccaggggctctggtagtggctgccaggtgagttgacagtccgattttcagtggggtcgcacacagatggggcgcggcttaggaggaatcctgggctgcaggcattccttggcccgggggccagatttccggcacttgtagcaagctcctgggggaggaggttctggaggaacacctggctgctgcagttcaggtgtttggaagttcttgtgtgctggwgatgtggctggggtttgtctcccagtggaggcaaggaattgcaacttttttctattattgtacaccttgaaggtgaggttaattaagtcctgttgtggggtttgagggccggaatttaatatttggagctttatttaaagtcaggagcagattgggtaataaaatgtatattgagaataagaaggccttttgaccttttaggatctagggctataaagcatctcagggttgctgccaaaggagccatgaactgggctgggtttttcatatttgatgaaaaagagcctaaacactaactgatttgggagaggtcagataaagaaaaaggagcattaaccttgactatgtctttagctccagccacctttttaagaggaaattgctgggcaggtgggggagggttagttgaggaacgaaactgtaagccggaccgagtgtgaggaggggaggtgacaaaaggattatagggtggaggagyggaggctgaggaagaattgggacctagctcagcctggggaggaggggagagttcagatgggtctgtagaaaaggaatattagaaagactcagcgacacttggggttggaactgaggrgacaggcgggagggaaagaaggagcatttgggaggaatcacattgggaacagagactaaggagggaatgaagtgtgaaaaatgcctggatgtaaggcacctcagaccatttgtccatttttcaacaaaaattatttaggtcttgtaggatggagaaatcgaaagtgccattttctggccatttagagccattgtcaaatttgtattggggccaagcggtgttgcagaagaaaataaggcatttaggttttaggtcaggtgtgaattgaagaggttttaagttcttgagaacacaggctaagggagaaggaggaatggagggtggaagkttgcccatagtgaaggaggcaagcccagagaaaagagagagtagagacatggagggaagggtttgggggttcttaccctccagaaaagcgggaaaggggtcgggacacggaaataaggggttggggtgtggaaataagggatcagggtgcagagataagaggtcagggcatggaaataagggatcggggtgcagagataagaggtcagggcacagaaataagggattggggcacagagataagaggtcggggcatggaaataagggatccgggtgcagagatgaggttggggtgtggaaataagggatcaggggtttcttgccccccagaaaagcagagaaggggtaggtagagacagagagagaaggggtcagggttcttgcccctccgccagaaaagtgggacttgccgctaagggtgaaggaccaaggcaggcgtccctgcgtggtcagacacctctgaaacgtgggtgataatcagagaggcatccctgcaatgattaaacatcaagggaaggctgccttcctgagttcatgaccggygccagagttatgggtccacggataaaacgtgtctccttggtctctaccagaaaatgaaaggaattgaaattaagagaagggagagattgaagggtggcgccaagattgaaaggagaaagtgattgagggatagtgagagaggttggagaagagagtaagaagaggccccctacccgatttaaaattggtgagatgttccttgggctggcgggtctgaggacccgaggtcataggtggatctttttcacagagcaaagagcaggaggacgggggattgatctcccaagggaggtcccccgatccgaggcacagcaccaaatgtcatgcgtgtccgtgtgaagagaccaccaaacaggctttgtgtgagcaacagggctgtttatttcacctgggtgcaggtgggctgagtccgaaaagagagtcagtgaagggaggtaggggtggggccgttttataagatttgggtaggtaaaggaaaattacagtccaaggcgggttgttctctggcgggcaggagtaggggtcacaaagtgctcagtaggagagcttttgagccaggatgagccaggagaaggaatttcacaagataatgtcatcagataaggcaggaacaggccattttcatttcttttatggtggaatatcatcagttaaggcaggaaccggccatctggatgtgtacatgcagggcacaggggatatgatggcttagcttgggctccgaggcctgacatattcactgctaattccttaattttctttgaatttctgctcaaatgtcacttcaatgatgctgccttaacctcaatatttaatatggcaatctaactccctcctgcaaaccctggcactcctgattcacttttccctatcctactttatttcctttttccgtctaacacttattatctatgaatacactaaataacttatttattatgtttattgtttgttttctgtctccctcttcttgaatgtaaaagcagtgaggtcagaaatctttgctctgttcaataaagtgttcccaagaataaacaaagcatgccacatagaagacactaaataagctatatgttgaatgtatgaatgaatgaatgaataaagtgatgctctgaattatttaaaatggcatgtcccatctctgccacaactaagccctatgtgtgtgctgtgaattatttctgtggctacaattaatgcttttttcttggctcttagaacaatttttgaatgtgaattaagacatccttgtctcattttatcctttttaatttaattgccaaccattacagccacttcatttgcaatatggaggccttgccctcatcaaatataaaatgtaggaataaatgacagtactgagtgacctgttggatgtggggaatgtacagtgatacataggagtcaaaaccttatgagttagataggacagaaatctagttgagtgacttactcagagttacacagtgatcagcaacagaatgggagaatataagatttctgctttctgatgaaggctatcctcactagaacgaacttactgcttatagtctaattcaaaatttcagaggttactgactgacttccagcaagctcagacccctgatgctacaagctctaggttctcctgctcatcacaagtccacgttggacagtctccatggtttgagccctcatcaacatcccctttcgtctctcctgatatattcaaattgaggacacaaggtgtttgagtccttgtatattttagcatatctttataataactagcttggtgtttgcatgcatgcatgtgcacatatacatgtaatgtggaaaaattcaaagaaatgatgaattcaaagagataatgaggaattgtctatggtaaaacatgactaacatcatactgactctttactgaaaagcatacttcaactctgctgttgtaccttttttcttatatctatcctatatgagcgcaagttcttatatgttatttatatttcacctgcattttgttcaagagttgttctatgcttagtgaatcttatatatrtttatatttcacctgtgttttattcaagagttgttctgtgcttagacagttctatgcttagagcctaaccagctagattgcagaatatttcagctttctaagctgacccctgattctcacctaaacacttggttaattggtacagatgcaaaattatgaacagaaagaaaaccttagagtgaatgcaaataaatgaatgaataaacaagattaagtactgggcaatgcwcttcactaaacaatactgaatggatggctaatgtaataaacccaaatggtaaaaggagatgccatttcttacaatagcttcttttcgatactttaggtattcaacatttcaaccacttttaaaccattatctgctctcatgttcacatgaaataaactgcccagtagatatttatttaaaggggaatattgacttctgtcgaggttaagctatttacttgaaagaatggcattcgcagcaacagtgtttgaaacttcttcactgtagtgattctaaatttcccaccacaaatgtaaactagtacagccaccatggaaaacagtgtggagattccttaaagaactaaaactaggaccaccatttgatccagcagtcccactactgggtatctacccagaggaaaaaaaagttattatttgaaaaatatacttgcatgcttattgcaggacaattcacagttgcaaaattgtggaatcaacccaaatgcccatcaatcaacaagtggataaagaaactgtgatatatgtataaacatatatatatatatatatatatatatgatggaatactatgcagccataaaaaggaatgaattaacaacatttgcagtgacctggatgagactggaaactattattctaagtgacataactcaggaatggaaaaccaaatatcgtatgttctcactgatatgtgggagctaagcttatgaggacgcaaaggcataagaatgatacagtggactttggggacttggggggaatagtgggagaggggcgagcaataaaagattacaaatatggtgcagtgtatactcctcagatgatgagtgcaccaaaatctcacaaatcaccactaaagaacttactcatgtaaccaaataccacctgtaccccaataacttatggaaaaataaaataaaataaataaatttcctaccaattatatccaaaggatgtggttctttatgtttacaacttctcaaggaccatgttatttcttttctttatccattttctagtaaagtatcctctgtaacactatttacctcttcccagtttctstcagtgattctgtcttctctttcagaatcttcatttgtgacctatgttagaaaaatacttaaatggatagcccttaacttattcaaaattttaaccaatttatttaaatattgtaactaatttatttaaatattgtatttgtttaaatcatgtcccaaatgtctatacgtctttatttttataaagacaatatatttctgtaagtgaaataacacatatataaatgattttgtagagtaatatcatctttcatgtaaacaaatgcaaagtattttgatagtgataataaggattatattagattttcagattcttttattatactgccttaaccatcatattaactatgatgaattctacagcatagaaatattggaaggatagctgaaaatgtatttttttaatgaagtgtgtgtcagcaaattagaaagagattacccctctcctcctgcaatatggtttgataccagcacgcctgtgttggtgggcttgagataacttaaatagaaaatgagtttattcttcactttttcattgagtcattctgtgactaaagttgggccttagtgtcatttctcttatcttccatttatttatctttaaaatggccataatggcacttttcaataggagtttgtggttggacactaaataaataaataataataaccctttataaacacaatgctataaaaatatagagtgcttaaaaaactcatttttttctaggtagaaagcttacttaactaacgttctatttgaaaagaactctacaaaagacagtccgtttatctgaatgctctctctaacattaacacaattccaggtgtggttttgtttattctttttggtctagcaagtaaaaatgtttttaatttctctaagtgtagatttctaggcaaagatgacagatatttagtgttttgaagaattgtttagttgggtctgaaatacatacttttaaactaaggaaacggtttcagtgaaggagaaatgaagataaaaggtatggtcatctgatgaaataaggtccatgagtgagttagagaatgtgttggtgggtgtggcagagaatgacaatatagaaagcaaaatggaaaaagcaagaatgtgattgttagattgtctcagtacacataacggggcagagtctaggtgaaatttaagggattggtggaggagaaaactaggaaagaccctgacaacaactcaaagacatttcttggtggagtgaaggaaaatgatgtaagggctgtgccttaagtaacttttctctgaaagaggaagaagtaaattaatctgctgtgagaggataaccatgctaggaagaatgctgtttgaacactactgaagaataaaatgactatcaacaggcttatatgaagcagactaagctacctttataatgagaccaatttttaaaatatgtacagaatatattgttttctgatattctgtattccctattattatcagcatttagctatttagttaatatttagatatcccattaatattgtcctttaatatttagatatttttggaaaactggcatgctaaataactaggactgtgggagtaacagtaccctccaccctatgcaggccacattacagtaggagtatggtgtccagttccagatgtcccacttaaaagggccattgacaagctaaaagcaactacagagaacagaatactgagggctctagtcacgccatttgagaaatactttaggaaaaggaagctgttctcctaaaaaaaaaaatcaaagaatcggaaggactcttgatcatctgcttgatttggggagctttcacattctctgggagatgcaacaacgtggaagttttcactgtctttgctgaaatgagcccttctcatgagatccttttttccttctgtctccaggaacaaaggatctgtagttgaggcagctagatggggaatataattatctctttctgtctctaaaactatgatgatgtttagagttagctatgtaacaagtatctctctgttcttcggaacacagagtatcttttgcctagttttcaagatcctaatgttttgcccgacattatatatcccaactttattcttctccgcaatgtagtcaggctaatctccttactccatctatacrtccaacagcagattgttctctttctattttagtctctaatttgggtttctgttgctatataaaaaaccaccccgaaacatggttatagctttttattgagataattttatagattaatttggggtgtcaagtaatgcttttatttttttcctcaagactgaattaggaattcaggcaggattcaattgggatgtttttcagcttcacatggcttcattggagtcactcatttaatagtcgtctttcaatattagaacataaagagtactttctttataatgtctttattgccttttttttatgaatgcatccctctacttaactagtcccccactgatgggtatttagattgtttccgatttattttacttttgccaacattgctgtaattaacatcctttgcagacttatttgagtctctgttggatgaagtgtatgaggggaattgctaattaaaatataagttcatataaatattagtacaaatggataaaccaacaaatgtcaggaccaacttagaagattaacgcttttctattaatatcttctttccatttccattcttatagtgaaatttatcactactattttaatttgtctttctttgagtattagtgagcttgagcatattttatatgtttaatgatcatttgtagtctcttctttgaattgtctcttcatatcatgttttaatttgtattggaatattttattttttgttttctgttacatatgtaggcagtaggatataataaagatataaagtgtttgacaactatagttaataatattcataaataaattccctttcaatttttttataatgtatttttcccatacaaaagtgattaaaatgtttgaagtaaaatctgatatttttcttttgtgacttctgggttttattttrtactccttaatattctcaaatatttgcctttttttagtattttgctgcttcatgttttatgtaaatattcaatgtacctggaatttatctttttgaatgctatgacggagattttatttttcttgggtagatagccagctgatccactgtcatctgtttaacaatgcatcctttctcaacaaacatggaaaatcaaatttactatactttgactctgtactggaccacagctgacttgtctcttccatcacaaataccaagttctttaacttttctagctttagagtatgttttaatatctgggcaaatgtttctgtgttattgtcaattctgggcattcttgcagatccattcctgtaaatgacgcttagaaaacaaatgtttataaatgtgtcatacagagttatagcttcttattgagataattttatagattaacttggggaaaatataaatttttataatatttaatcttcctggcaaaaaatattataacttttattttacattcatataaatgttcttttataatgctaagtttttatacagtattttatatattgttttattctgcaataaaagtttatctcattatagtttcttattgcatttcctctctcgctattgctgttacataagaaagctggcacttttttacattatcaaaaatactttacagtaccaaacttatgcattgatcaaatattgaaccactttaatgacttatctaattgttcttttggcttgtcagatgattaacaaattttctaggtaaccatttatattatgttcaaataataatcatttaggttgtgcctttaaatcataagtattatttattyacttcttattttagtcttagtacattggctagatcctcttgagtaatagaaaataaattttaaccaatttaatacttaggagaatatgtatttttaaaaagagttaaatttcattgccatctgtraatttaaacatgataccaggcactgtaataattaatattgtgtggaatgaaaactaggaatagttggccatttcctaagtgaaacttgtacatccaatgtgcacttggcaatgtttcaggaaatcataagattgagaaaaaaatgcattaacttctttggcaaaataaacgattcccatctgacaactggagattatgattttttgttttgatttttattattttgtgtttgtctttcttggataaaaagaaaagttttaaaggaaaatagaaaaaaatggaaaagtaggcaaagtgagaactgaagctaatgaagaagccacagatagacagcctgaacggatctatgagttgttatcaaataataaaaatggaaaatgtgtaacttgaaggaagagatcacttcttgttttggtattcgtctttaataaccagtagaacgactagcacatagagagtactaataaatattgttaaatgaatgaatgaggaattagtgcaaataaatggactyagtatctatatttaacccacagggcaagtgtgtttacctcctaataattcacacagatacattaaggtctaatgttaagatcttcactacgaatctcagtgaatatgaattagtggctacttctccaactaagacaagtaacgcattagtaactaatgagttactaatgctagttgatgattagggggatttcaaactatctactattggtttaaagttgcttgtaacttataataaacaaatgctgttaattaaaaaatgcatgcatcatgtaaatctcagaatactttctttgaggcaagactatagaatccgttcacatgacaaatttgtgtaaggaaagctactgtctatatcacaccacaggagaagccttttagtcatgactgaaagaaatttaagtgtctaagatctttgcattgaagaacacatttctaagcctcagtaaattgataatgcctaaatacaggcttttgaccaaggaggtttggagcaataaatgcactgatgattcaaccaagctttagggtactcatttcaaatgtaacagtattgtacttccacataaagcagagatagaacatcaaaaaatagtaattactacaaaacttctaacaaactaaaacaaaatcctgtggcaacaaactgtgtaaggagatttcacatgctctgatttgctcacagctgtgggcttctgtcatgcttttcagatggtgcattagttcaaacatcccagattactgaaatgcatattattgatgtgagtaaacttccgtatagtctttttttttttttttgctgaattttgttgtatattggaaaaacatggaaaagagaaaaataagttctacacttagctatgattagctcagtgcctgtgaacatgttattcgtgtagcttaatttctctgggacctaaatgtgaagtgagctgtttatctctaaggctgatcctagcagacctttcttagctaggtaaggccaaatgggagtgggctttgatgkagttgaatgctgaaaattgaacttagttgtgggtaatttcactcacaggtctaaattcattaaattcttagtcaagcartctaaccagaaaacccaaattaaagagaagaatagagtaagacattggttgagacaggaatatggttagaaaaaaagatgagacatttgatttgggccagaaaatcttgtggtttagagtcactctgcttaagaggtcaatttagggcactgtaagcaacatcattttggtgtgtgctggagggctgagtgggagagagttgcaaataaaaatgttatattaattctaaaaacctatggcccccttcactagagttaccatgcacagctgtcaaacctacaattctcagcaatatctggaatgattcaaaatcacaggttgtattggtgtggttcgattgggctgaacagcttaccacttgcttctatggtgagctgcagtgaggtaattacaacagactgggaagggacagtgtataatgacactcactggctttgtctatatgactaagcaacaacaaaacagccctaaaatcgactctagcacagccggctcattttcttggccatatccatagcctgtttagattgtggctacaatctgtttgaaactctgctgggggaaaactatagggaatttytgaatcggcgatgccagggtaatctggttgtgttctgtcaatatggccaccaccctgcttcaaattctgtggcaaaactgttaaactgtggaagactcaagtagggggaacaggcccttggcaagtgatacagattgtgctatttattatgtgtggaggttgctgggagaccagaagattaatagtacatgctcatttggaatcctaatggaagatttctcaatcactctacagtgagaaagatctatacttcctttcacacttgcacacttgggaaataggaaaaaggagatggaggaaacaaaggcatgagtgatagggcatgggttcaatatacgtaaatgtttctacataagttgatataaaacacatgactcctaatgacttctaaaatgctggaatcctgtaagacacacaaaaaatgaatgatctgaacaccatctgtttgtccttttgctacatgtggtaatggtcacttatttgactacctgtggatatggaaatgtgtttgaaatgatgaaggaccctctgctctactataatgacaactaccagtgacatttgtaaccttagcagtgggttagaaactatttatgtccactcccattaagaattttacctctttgacacatccatttggttctgtttgaaaaagaaaatcattagtctgacctaaaaccacaaatgaagaccaacatctctcaagtaatttgcatatgcttaactatttatgagttccctgctgagcatcaaaggtggttatcaatctacctacaccccaaacttctatagaacatttactttctgttaaaagcatgctcagtaccctatgaaatgaagcttgaggtcagaaacatactaagcagtacttccttttccttggggagcattttgacattttctgcaatgaatacaatttatccattcattcaacagatatttcttaagtagctgcaatgtgccaagcatcagccatagtctgattctggaacatgtttaaatcttcaatagattgtattaaaatcaatcttacttactaacgtctattcttttaccagtattcacaatcatttcctcttttttaccataatttaatttgtcatttgttgatagatgggctagatgacaaaatttggctaaatacaatatatggaatatctctactcgaagcacatgtactagtagactattaggcctttaaacctattcaacatagcctgcaagaacagcaagtgaatttgtacttatttttttacttgtatatttatttcaagtttttgtgttttttagttttcatctgatgtaaaacaaaagcagcagttaatacagttgtatttaatataattgcagtgcctacagtggtgaggcagcaatctagaggaaattactgctgatgcaagtaaataagtttttcatagttttattgaaggagttacacttccaacatgcagtgccttatgctttgtttattttacatttttggatgcaaattacgtgctatcttaatctgggagtacatcagaagcagagcattagaatctttgtccaaacaaacaatgctcagcatattttcttgaattatatgggtcaaaaagcaagaagattgtttagaaaatacagaatatcatcaaagaaattttgaaaaaaaatcattttacttctgaccactaataacttctgaaatctttagttgactgaaaagaaaatgtattttaaaacaaaacaaaaatatgtttactgatgcttctttcaattagtctttgctttttagaatgaagaatagagtacaatttgttttttattccaaaaatgcataaagtctattgaattccagctgacactgctaaaggcaatttttttaagttttccattttatgatgaaaatcatatttacattattttgcatcatatttctatgtgcataattatcaaataaactatttaggaattatatgggggaagagtgggagaaaaaaaactaaacctaaaccaccttcctccagttttgtttgtttttctttctctctcttcacatagtgtttataaaatgggcaagtctaggggaactttctaatttgtggatggtggttccaagctgtgcctatacagttttatgactgcttagttccaaaacatataaacacattacccttctacatagcaaaatgcccaggagaatgcaatgcaaaagaaatgaagcagaagaaaatatattgcaccgttttctttttttttttcacatttaatttaaaattgatataaagtggttccagctttgaggagccagtgaatgttttctgctagctgtttccccatttcatctccagtttttcagttgcatttagttggccggcaatccaaccctacacagtttctgagaaaatcttctcaggtattgaaagaagacacaatatttcctctgagagtcagtagttgattttcctattatttattttgaagcaaatggttttcggtctggagtgtgtgtgtgcacatatgtgtgtgtgtgtgtgtgwgagagagagagagagagaaagggagattccccatagtcttaactttgctttgcaaaccaactgttcaacaagacctgcaacattcagccttctgccacatcagctttagaacaaaacatctggaggtcaaattgccttagtgcgtcatacatcttagtatattatatatttctatgtagttggtgcaccactaaaggaaaatcccatgtttgagagattttttttttttggctgaaaagtatgtaaaaatgcatgatactttttgatcaatataaactacatgaggaagattccaggaaagtttttgacacatagtagggttcaactaacataagtcatatctgaaattgaatattaaaaggcctcaaggtatttcaggtttttgaaaaaaatagcaacctatatttctgctcatgtaggggaaaggagttggattcttgtccaaaccacagaagttaacctaacagaatttacactctggtaccaaccctacagggtatgtggccatgagaagagcagcagactggcaggctttgctcctgaatgtgagaagggctaagaggcatgtgcctatcacccttcttctccttgtacaggacaaacaaaacttttttgtttgttttttctgaaactgagtctcactctgtcgcccatgctgcagtgaggtgagtggtgagatttargctcactgcaacctctgcctcctaggctcaagtgatcttcccacctcagcctctcaagtacctgggactactggcaagtgccaccatgtccagctaattttttgtatttttatagaggcagggtctggccatgttgcccagactggtctcaaactcctgagctcaagccatccgcccacctcagcctcccaagtgctgggattacaggcgtgagccaccccgtccagcccaaacaaaatcgttaaaaaggtgatctgctgtcactttctctgcctcgttatctcctacttactcttcaaagcattaaatcatttactctcagagtggcttattcttttgctcccaaaaactcacacatggaaattgttcattccaaaatccacctggaagttgtctgtggccaggaaaagatctgcattaatggcccattttttgagatccatttgaaacatcactttttccttcaaaacagagtctaattcctgtggtttatttaatttcttcctcctttatgttatgaacaattgaaaattgttcataaatctcttattagaattaccctgatgtattataatttatttgtgtacagagtggctgctctgccagaatttaaaatccttaaaagcaagaaccataatttttttcatttttgtaacatgaacatgttatagatatattgaccattttgtaaaggcataataaatatttattgaatgagtgaatgatagatttcaggctagctttagaatatttttgttgtcttcagtgatgcagtatgttccatcatttatactagcatagggatccaaagatgcctatgatttttaggcagatctttttgtcactagcatataggcttcctaaaacaccatttgttatgttgaacctctgcttcaacatgtatgcaactaataacattaagcatctgtaaaacagagtctttagttactcctcttagactatacaatcaagtcaaaacttcttgagatagtgtagcatttttaacatgctttacctttctctaatacattgtaccaaaactcatatattgtcctttagagggtagtgacctttgacatctttgaagtataattactttactgaataatcctaagtagctttaaaaagaaagaaaccattaaggagaaaaaaggcagcaaaaacaaatatttgagattataaattcagattgaaaagatatttgatggcatatattaagttgtttcattgtcaaaaacactaaaatataaattaaaagcagactatcaaactgaaaaataaattgtaacaataattcaagtaaaggttatttccttaagggctaaaagccaaacacttagaactaaatttagaaatagataaagaatataaacaacacacacaccacacacacacacacaaacacacacacacacacatacacagataaatctgaatggccagaaaccagtttaaatgacaagatgatattgatttacctataaacaggatgttattttttcacatgtaaatatggtaaaatttggtttttgttctttaatattttcatttgctttagttttgttttagttgtattaatcagtgtgggctgacatgttgaaacaagcattctcacaaactgttaggaattttaattagtataaatttcttaattagaaaagtctttcatattactttgctctgaaattgaaattctctatattgggccactaaaattaatcaagtaacawtttttttaaaaaacagtagattctcaggtcacatctatgaaacaaccatgtaataaaatagttttctaaagtataaataagcttataggcttaaaaattggaaataacagattcaaaggagagttagaaaagagccataggactaaaaacccagggattaactgaaaattggtcatttaagacagccttacatgtagaagagctggtgactcatgccaggtaaaaatttatagttttcttaaacattgaactatgtgtacaagaagaactaaagcaatctgtgggcattgatgctccaaagcaaagatttcctcttctggaaaatagagtttcaaataatctcagattcattaccaggttgatcaatacctattcaactgttccagccatcaatgaattcaacacattgtgagggaaaccaagggtcaccacatattggaaaacttgaaataaaaagaaagagactgagataaagaaatggggaaaattatgttaaagggaaaaaatgagataatgatgggaaaataactgaacttagaaagataattttacaaacttgccctatggtgtccatgaaaatgtactacccagataacctgctgcaagaagcataattgagtgatggacccaggtaacttctggattcaccatcgagtatacactgtagtcacacgtcccaggactgctaccagtgattgagtgtagtaggtatattaatgcagaccaattgatgcaagacatggggcttccttaacacaactctttggcttaagaattcccatcaggctgcctaaaattttctgagaattacactgctgtctaaaactctacccaatccttctttctttgctctcctttcacaggcatcaaagctgcatcatggtctgaaggctctccctgctttctgtggtcccattccttttaccctttataagcatgtcccacagtaaatcatttgcacatataatcttgctgtttgcttcttgaagaagccctcacatggttctgggaatgttctgagaacacaggtggcaggtattaggacaggctccctctccttcctggaggcaaagtctgcattctgagtggtatacagagcaagaatagtccctggaatatattcgtggctaaagattttaccaggatgaccagggaaaactttctattggaaggaaacatccttgcaagttccatgattctgcaatttgaaaaatataaaggatgtaggggcactgcctacaaagacactggagagggatacttattgctaagttttatttatgtcctgcagaggtataattagaaattgaggactgtaaacaggcagttaaaggccaagtggaagagccagagggcctcctttatagatacatagagctgagcagcagaatgaagctttgatagtttgattaacagagctccagaagyatttaaatgagctggcaaggcaggtgtgttatgataattctaggactctggcgagtaaaatctggggccctgaaatgtgaaatgggaacagaaatatggatgcctatgaggatgttggctatgaagatccccttaacccttagtttttagaggtggtccatcttttcctgagtaagaactagtacttctcctgtattgagagatgtagaggacgcttccctgcaaggcagcagaagcaccctcaagagctaccctcacgttctctcctggccactaggtcaatagctagagttaaatctaggttggggatgtgctgggcctgaaaagtgagaaaasagattatacaccaatagagctgcaagaatttgcatatttcagaagagaaaggtactatggactaaactgttcccttcccaccaccaaattaatatgttgaagccctaacccacagtttgactgtacttggggatagagcttttaggaagccataaagattcagtgagatcataagagtgaagtcctaatgtaataggattgatggccttataagaagaggaagagagataaattgcttataagaagaggaagagagagagatgcctttccatgcttatgcagaccatgtaaatacatacagaaagaaggcggctattgtaaggcaggaagaggcacctcaacagaacccaacagtgctggtattctgatcttaaaattcccaacctgttgaacagtgagaaataaatttctgttgtttaaaccacccaatatatggtattccattatggcagcccaaatagactaatatatcatggaagtatatattcatcccttggaattgaattttgatagtgttaaatcaaaagggctaaaatataaccagatagatgagaattaaaggactcagaagctggaaccagtttgtcagggtgccttttagacacctgaaaaagtgatgaacagtccttgataaagtggaaatgcctgagtttccctggaagatggtaaaacaaataaaaagactgaaagaagtgggcatgctagaataaacacattaggtgatgccagaaaaccctttcaaggattaatgagatagtgcaaaagacataccactctccacaaccaccaggataccaggaccacactacagagaggagccctagaatcaatacattcagtggtggctctcccctccaggccacgtctgacagtgaaagggggtcacagactagggcttgttaacatccatggattggtgaggcccagaaataaaaaaggcaggtggtggcttaaccaacagaagttaacaggtgctaccacaataattgataagtttggaaggaaagaggaaagggcttggytcacagcaaattatggagatggttcatagagcatgatcaccatactgaaaaaataaggagtcacttaatatatataactaggaaaaaagacagtgagcaccagcttagaggcatcactctgaaataacatggtgtcatccttcaggatacagcatatacattaaatcagagacctctgtatgacacagtcttctcagcaggaagaataaatgtgcctgggagccaggagtggaagcagtaatagccccattaatcatcactcccattgacccactggggaattttgagcttctcctcctcctcytcacaatgctgggctctgcacacttgcaaagtcgaggtcccactgaactacaagctatggctgctgccagaagactatggacttctttgtatctgggaaccaacagctgaaaataagagtcatcatcatcctgataggaagaatcaactgtgaacagcaggcaaaggtagggctccatttacacaataagtgaagggagaatgcttccttgtactcccttgcaccattgtaactataatggacacacacagccaccccagcccaaagagtgtgattgccaatctagggttcatacctttcaggatttcaggcttggattgacccacgaggtaagcctgcaagatgtcctgatatgacagatgagagtgaggacaatttcagatggacagtggaaagggaaaaaggtgaatacagktgtggccctgagactacctgcacratggaggctactgttcattctgccaacctccatcttccattcccactcagraagaaagacccacrggaaccgcaagaaagacccacaggagcagcttcttccccacctgtgtatctgtgagacacaggggactgactctggtggcaatgaaaaagcactgctcagatttcctgctgcaagaagcctaatggtttgagcacatcagctcctgcccttgtggatccagtattgggtttgcagcaatgtcacactatccataggctactcccacctagtgaaggagaatatgggggttccaatggaggccaaatcctatgagatgcagttctcctttaaggtgtacttttgtctcagagattcttcattggtctggtcaaaactttcttataactctacagaatttaaggctgtctcccctgttcactttccttccccttctccatcacagataaagacctgcctcactgtctcccacttcatgtgcctccctctactttctccttcataggtgcttccccaacaagtctcttgcgtgtccatatctactctggcatctctttctcaaaagacctaaactaataaacagtctaaatgtaatttttttaaaaaaagaaaatcatagaatagtaagggatattaatattatcttggaaaaaactaagtttttaaattttagaaataatattactgctgaaaaatatagtagacatagaggattgattcagaaaaatcaacactgacaaatatgatttctaaagagcaagaagcaaatagaagtgaatttctgaacactgatgagagttccaaaaatttctgttgaaaaatgtcctactgaattaatgaaacatgatgcacttaggcattttgaagtttcagaacaccacatataaataaaagagtctaaagcttttatagtgacagagcctgtcagcaatgtgaacattaattagaatggtaaaggacttctcaacagcaatagtaggtcctaaaagactatgaaagaatgagttcaaaattctgacaagaaaataatgtttagcctagattttaagcctagccaatctattaattaagtgatttattaagtggcaggaactgtatgaatgaattcatttaatctttataacaaccctatgattagatgctattaatatacccattctgcaggtaaagaaactaaagcaaagagagatttactaattttgctcaaagacacagaactagtaaatagcagagtcaaaaatcaaaccaaaagaaacaaactgaaaccaatgtttttaactatattgcttttatattgtctaaagtgcaaactgtagacattctaagagacacagtcagaaaatttatggtccatgcccttttgattaaaaaattttttgaagatatgatccagaaaagttgaggtaaacataaaattaaacataactcttgtagatagaaaaacagcttcccaaatatatccataccttaattctcagaacgtgtaaatatgttgttttacatggcgtggcaaaagggatgttgcagatgaggttaaggatcttgatatagggagaatattaaggtggacccaatatagtcaaaagcatcgttattagagaatgagtaaggcaggagaaagggaaagattcaacgatgctatgctgctagctttgaagatggaggaaggggccatgaaccaaggaatgcaagtgaccactgaaagctggaaaaggcaagggcacagactctatcctggagccttcagaggaatatggtcytgcccaaattttggaattctgacctccagaactgtgagataataaattgtgttagtttaagcctccaattatgagataatttgctatagcagcaacagaagactaataacaacacaacaaagagtgggaggggaacaggattcctgaaagaagatgattcatctcagaaaggaataaaggaagcctacgatgatgacctcacacaaaccctagaaacaaccatcttgaattagaagagttggacacagccttgtaagtgagtggttgaggtatagaacatgacagcagggaaagagatgcattctggtattactggaaaaacatagctgagatttaacatagaaaagatgagtgtaaataaataaaaaatgaataataakttttagaaaaaatatccagtaaagaaaattcaataacagtgaacagcttgtctttggcagacacaacatacatatcattacaatgtaaatactccttattgatttaattagaaattgcaatataattatatcagaaagatgacggaaggagaagtagggttttactcaaatgataaatccttatctgttattagttaatagataatctctaaaatttgtataayaataaagaacagtaaacacatattgaaagatacagatttgagtaatcactcgaaaaacaaatagctaaaagtarttgctcttaggagtgggtctggagatggggagggagtgaaggggagaatattatattttcatatttgtgttagtattgtttaatattaagttggtatttgattttcaaccacatggaaataaatttaatataaggctttaagtttacaaaaaaagagaaataaaaatgtaaaattaaaacaaatatgtgaatatttaacagattataagcacaaaagcaaagaaaaaaaatacaaaggtgagaccagtaaatctgattctctaaaattttttcattttccaaaaagaccaaacaatatataaaattagaagaaaatgaaaaggaaaatatatttgtaacaaatatgacaaataatgtgtatcattgatgtataaagaaccctttgcaaatcaatacagaaagttcaagcattactatcaaaacactggcaaagtataagtcacagggtaattacaaattatccatcaataaaaacaggtttaacctctgtaatagttaaatgaatatatattagaacataaatcaggtttttttcacttgtgaaaattataatggtaaaattgatcagtagtaggagtttagtgatgtaggaactcttgtaaatgacatgagaaggtaaaatttaatacagtctttctgaaagcaatttggcaatatattcagtcttgaaagtgttccaccctttgaactagtaattccacttctagaaatctgttctgatagaataggcaatggagacagaaatttatgtgctagaacacagtgttgtttatactggtaaaatcataaataatttaaatgttcaacattaggagactgtttcaagagattatggcacacatgttgtgcagccattaaatttcttgtttatgaagattatttggcaacgaaaaaattcaaagatgtgtgtcttcctatttaagattttcttaactgaaccttaaatagaaagacacacatgctatccattccaatgaattcatatgcataaaaaagtgaaaatatcccaagtattaagttctgtgatgtataatggtagcatttaaaattttatattgtatgctttttctcaatttcctacaataaatttgtatataataatgaaagtatctatataataaaaatatataaaataatgaaaaaagagtgaataaatataaatcagtacaaagagtttttttttttaattctttccttgggcttatgctttttgcattggaattcttagaagacagtaatttctctaccagaccctctgctgccctttcagaggataatgggcatcctgccaacctcagcactctgctggccttgccagctcaagcacttgggactgaaaccaaggcctggggagaggaaagaggaagaacttgaccctggctctgaggtgcccagtagcccttcaggcatggggatgtgcacaaaccactgtgaaggaatgctgagtgcaggaaggcgtcaagaccaggaagcaaagctcttttgccttcagagtccagggatggctctttacctgaaattcatggctgcacgcctctcagaagcctctgggctccatcataccttttttccaggtgagtacatgaggcccagagaaaatggacttgctcaaggtgtttcaggaatagattttaggtgggaaggaaaattgtccaagctgggccttcactcaactggatgctgaacctggcagatggaatctgtgatggaaattcatgggaaattcaggtgtgtgagattagggtgggggtggggagggatgtgccttcttcactgctgtgaccctgaacacccatgccttctgcaggccatctctgtgctttcctttaggtctaccaaaataattggcagcgtaaagaaaagaaatagcctcttaaccaatgcacaagatcactcaagtgcaaagttctgatgtayacactttctttagtacttgatttttcccaattccattatctgccagtgcctgccttcactcttcttcctatctaaacttttccccagcgtcactaatttcaaattccttgctaatgttcttaatttattccttgtttttctaccatacatgttaaggtactcttcagacatagatgaataaaattaatttactctaccttttttcttctcgagacactgaaaatattcagaaaagcatatgaaaatgattattttcatacatattttcagacaaaaatgtatcactctttcttcctgtaactttctctctttttctcccatatccccacccatcctgtcccaaatcttttctccgaaaggtagcaaatccttcctttttatctacaagaatgacacattgatatggtctggctctgtgtccccacctcaatctcatcttgaattgtaatccaaattgtaatcccttgtgttgggggagggaccttgtgagaggtgattggatcatggaggtggttccctcatgctgttctcatgatagtgaatgagttctcatgagatctgatggtttttatcaggggctcttccccgttcactctgcacttctctctcttgcctgctgccatgtaagatgtgctgcttccccttccaccatgattgtaagtttccatgattgtaagtttccatgcagaactgtgagtcatttaagcctcttttctttatagattacccagtcgagagtatgtctttaaagcagtatgaaaatggactaacacttacatcttatataggtcacatcctataaggtctaagctgtgaaccatgccaaaccacagtgaggggtgaaggaagggttcacagggaatgtccaggttgggtctaggatttgaccaatggggctgtgaactactccttaaaaagaaatctggcagttaagttatcaatgtgcaaacagacatagctgactacttttccaccaactgggaggcagtgcaccagcatgaactaattcaggagaaggattctccaggtttcaatcaaggctctgccagttagctctgtgcctctgtaacagttacttaactctagagcctcagtgttctcctgtgtgaaatggccccatgtgactcacatcactgttatcacagagtttgaatgaggatcaaaaatacagcccgccacatttagtataatgccttattcattaaataatgaatattagttgttaatatgaattctgttattgtcattatcttactaatctagtggcatttctataaccagattcatatggtcagataggaggtaattatgtcgtccttatgttttctctgattcaaagccagaattcagtaaatcagccagggtgcactgggggtgggatacaactcctggagcattaatacactactagcttgactgagatgagctctgggtgagcctgctggttgaagagagcctgtgagagtttctaatgaggcaactaatataataatcacagaaagcttccccgaagaagaagcattcagggtttgagtgggagctggcaggtgaaatggagaaaggctgttaggaagaggaactagcagggcaaangcatggcgtggaaaggagtcaggcacaaataggaataaaggagtagtgaaattagtgtgcagtgagcaggggaatgggaagctcacaatgaggctgaagacactgacaaaacccaaaccattcagaccccatatgccacactaaagcagccaaaataagacccagtgagtgtgaatgagaagggaagggatttcttctaggatgaggtctgctttcccttctaccttgaattcctatagattttcacagatactctttccctgtgaccaggcatacccagaccagtgttggaaatggacctgagatccatttaaatatgtatmcacacacacacacacacacacacacacacacacaaacacacaaacacacatgtatatatatgaacaaattcaggaggaggattctctagactttcaatcaaggctctgccactaagccctgtgcctctgtaacagttagttaactccagggcctcagtgtttttctgtatgaaatggcctcatgtgactcacatcactattatcacagagtttgaatgaggatcaaaaatacaaccccccccccaaaaaaatatataatattatatattatatattcagaagagattatgaacaggcaaattaagagataacgaacagatttctggctgtggtcctcagtggcacagatgatagctaagttcttgtttataatacctggggagttgaagagtgtaactgaggctcaaaggagctgccactttaatgggacataaagatataaaagagatcaggaaatgtggcatttccaggatgctactttggctccaggaaacctacataaataaataagataaagttacttcctttgttgctaggctacaaacataacaaaataaaacacaacacaaccacagttaccatatgaccctctcacagtgaccatgctcaccccagaagactgaggaatggctgctgtgacaaataattgtacagttgtgccagttcactcccactgtcaaaatctcagattctgcctgttggactggggacatatggaaagactcagaggagtctgaaaggtttagaggcatgtcacacattaaaccctattaaccatttcctattgccctacctccaactccagcttgaaaagtaaaatatacacctgggcaagatccaaatactatgtaggtttagactgcgactgaagcaaagaaactaaactaacagtgatgaaactgagaggaaccagaagtaggngggctcaaaraattgctgtttcaatagccatattcatttatgcaataaatatttattgagaatccactatgtcgtaaactgtattctaaancactgggtgaaaggttaacgaacaacaacaaaaaatctttaagtacctttattttgtattctagttggaaatggtaatgctaattcacagtgtgattttgatctatgatgatggcttttatgataagcagccaagtaaatttcagctgatctgtgtgttcagaaagacctcaaaaatctgttttagcctgtgggatctgcatgctgttgtatgcatattgcaaatgaaccctgctttgataaatgcattaagttggccagatcaatcagcagacagcttagtctacattattgtttgtctcaccctccataatttacctcacctgtgtgacattaatgggaaaaaagttctcaacatttcagagtttatcatatgcagtatcttatttattagcaaatcctggatatcttaattatcacagttgtcatacaattaaaataggaagttagaagagtcaaatgatagttgaattttggtttgagtttgtcttacaacaggtaaagagaaatcaccaaatgttcctaattatttcccaactattgaatatataattagaatagatagatctgctaactcaaggagttaccacaccaccctaggaattactgagtactctagtaggatagaactagtagaagttatgggaactctctctgaattctaaatttttttaaagaggaattgtagtatcttacaatgaatcatcatgttcattaaggatttgttmgagatagtgtgtttttattaaattacacagtttgacaagttcaaaagcagggtgagttacaggtaataatttttggttaatagttaataaactgtggcacaactttatatttatactattcagtgaacttttattgacagcctactgtgttccaggcatttgctctcatagatattataacctagtagggaaatgagcattaaaaaataatcacgcacacacgtgtatacacgcacaaacttacaaattatattgaatgttatgaattaaagatcagggtactttaaatgagtgtaaaggaagaagaagtgctatttactggaatggagaggtctggaaagtggcagattaaggaaggtcgtgagttttgttgcagacttgttaagcataagatgatgccagtgarccttccaaaagagatgttacctagaaatgtgcagatatagatcacaagctgtggtttttttttccctaagaaaaagattgatatgtcagagtagctggaaagcaatttaatttaattaagaggatctgtaaaatactggtaaaacagttgttggatgtgtgctaatttggaactctaagtagtgaaatataaacaatagatagccctaactctgctcaacaccctccaacttggcaaaatgctgagttccaaggactgtttcttcaaagctgttttggttctgcagatcaacatagtgtgtttggcaaataaaatgtatttactcttttccagaagaaaaaaaaagtaaagataaataccgaagggtctttacttgacactgcttgatcactaccactctgctgtcctacaaataaagtgttacacccaaggctgtaggttgtatcaacttttgaatgctgggggatagtatatcrtcctggggaagtcaatgataagcactgtgatctgaactaattggcctgaattaagatgtggaagccggcagtgaaaagcgaaacacactggcagaaaaaaacagaaatcagggtatttttttaatttccaccaatttggtggaaggcaaacttctaaaataggagctcttcactaagcaggctctgtactagttctgtaatgggaagcttaaaagataatctactaatctgaatttctatgaggaaaagcgcagctacacttgcaggcgagtgtttcctaactaggaaagatcttaagggtaactgttcgcactttcagctgtgatgaagtggtgaaaactgatgtcaaaacctcagcactgaggttatrgaagacaactgacagctctggagttcaaagactagtgtgctttcttccactggctataagtatcaaaattaataaaaatcctgaaagtaaaatattctgagaataggatcattcactttataagcttatgttgacttctttagaaagaaaaggggaaaaagaaaaaaaggaagaaaaaggcattcaaccattgctttttctgctgattttgaagtcaattatactacctttgagtataatttaatttcaaacagttaaatttatttaaaaataagaaaggaagaaagaaaaaaaaagaaaaggaggaaggaagggaagaaacaaggaatgaaggtgggaaagaaaggaagaaacaggggagagagagaagaaagaaaggaagaaaaaagtccttaagatgaaattattaaaatcctaaaacttcaaggacccttagaagtgatctagcccaatatggtcaccaatgaaataatcccctcctcttctctctaactattgtttatctgtcttctttttgatcaatcacagtgacaaggaacccacaagggccactgtattgttagacacatctaattcattattcaatgttttcttaggttgaatttaatcctaccttcttataacatttactcattggtcccagttctaccctttagacctactaaactctgtctatttcctttttctccaaaaaagcccttcaagtactagaagccctatagcctcaggcactctagaccctgatccacgaggatgcctggtcttagcagaagcagagcaagcacaagcagaccatcctccatagggaatgcagctttgggagcaaagctatgacatcactctgattagagaaaatgttgcagctggacccctgtgttgtagaacatttgttaaacattaaacagtgaggcccatctccacaggggaaccagaaacaactgcaaatggggtcagacttgcccaagggagcctgaggcagaagtattctgacatgaacataaaggattgatgtctctgatgtagttagtaaggcagttcttacttttgctgtctttggttcagtaacagtgcaatggtttgattctactgaagctaaagcagaaagtctgtacacaaaagcattattttgccccacgcaggaaaatggaaaactaaagaattaatgaaggaggatggaagatggtttacacagtgaagcattaggctccaggcagactaacaggaagttcactgcagctcatatacagcccctcaaggtgatagatgaaccctgtgcagggacagtgatcacagggactcttggtggaactcaaatctcaatcacaggaaagaaacatagactgaagatagtatttttttttgtattgaaaaggtatctttttttgcttttgttttttcttccaaaatttcagttacaaatttgctgcagctacagttgaagttgtgatacaggaatcatgacacagagagcaaaggtttgaagtgtggcagctaataggttgagagtcatttgtttgcctctatgattagaaatatttcccaaattcaaacccacaagataaaaggaggaaacaaaatgtctgagaaatcaaccacagaaaaagaggcaattacaaccagagaaccagtcaaataggactaaacacacttgagtcgtgatgatatcaagagacaagttatatcgaacagaaacaattttacacggcttctgatcattacagaagataccaacggacatgtccataattctagtgagagacagggataggcattgcttaggccttaacattagatctgagatagcctcatgtgatggttatttttatgtatcaacttgactgggccatgagatgcccagataattgtttttttaattatttctgagtatgtctgtgaaggtgtttctgaaagatattcaygtttgaacttgtaaatgagtaaaacagatagccctccccaatgtgggtggacatcacccaatccattgagggcctgaaggtgaaggaaagttgaattatctctgcctgagtggttgagctaggagactgatctgccctccattgctgctggttctcagggcatcagwcacagactggaatctacatcatcagctttctgcatctcaggcaatactgactttcctgggtctccagcttrtagacaggagatcatgaaacttctcggcctccacagttctgtaggtcaataccttagaaaaatatctttatagacaaatgtagatacagatagatatcctattggctctgaagtctggagaaccctgactaatatacctcactaatattggtatggcactaataagaaaaactaatgatattttctatagttgtatcatgacagataaagcattgttagaattaagatagagaattctgcgacttaaaacaaacaaaaaatatctgaattcacaataccagccttggaggaaaaggcttaggtggtttatatagagaacagtactttaggaattacatcttttgggttgatttttcagctcacaacaaactcccaaagtaaaacaaactaacttcaccttatgaggtaagactccaataattttgtacttgtctccaacttagagtaatggtttcttccctagaaattgaacagaaggggccrggcgtggtggctcacgcctgtaatcccagcactttgggaggccaaggcaggtggatcacgaggtcaaaagatagaaaccatcctggccaacatggtgaaaccccatctctacaaaaaatacaaaaattagttgggcatggtggcacatgcctgtagtcccarctatttgggaggctgaggcaggagaattgcttgaacctgggaggatgaggtttcagtgagccaagattatgccacttcactccagcctggtgagagagtgagactccgtctcaaaaaaaaaaaaaaaaaaattgaacagaaggcattctagtttcttctaggctagtgtgttgaatgggattatataaacttaggtatctgccatgcggtctgagaagcagaggagaagcctggaaagggagaagtctgcaacagaaatacaaagacagacaaatatgagattcacagaatccttcttagtttatggctccaattttaatttatagctccaaaatccttcccaactgagacccaccatactgcttccagtacattctgtaagctacctctatattttaaaaataaacacctcttttgctttaactaactttagattttttttgttactgataatcaaagtcctatatgctatagaataactgagttcctgtttgaacaggaacacaggttcatatttgacacagcaagttgtacaagtcaattgataattgaattttggtttgagtctgctttacaaggggtatgatgaaacctccaaaatcccctaattattttcccaattattcgaatgcaaaaatccatggtcattacttcttaccaatactccccacagtcaaactgaactgcctggcataatcttgggtcggacaagcccctcgaagaaggctgtgggcagaatcaagcatgttgattaattctcttagaaaatgtagtcatrtattaagcamctgtcatgtgtttggacgctgatctggatattggcgtatcattgatggacaagctacagttcaaggagacaggagctatgaagactaaagagagaatttcagtgcagagcagtatgtcctaaaataggactaaatctggaaatataagagtacaaagaaggggcatctataccggagatccagaaagggattccaagggaaatgaggcataaggcaatattgagaagatgagtagaagtcaagccagattaaagagttagggtaaggggagcaggttcctaggccaaagtaagacatgttccaaggcctgtaggcaagagttagcatgaggaatttttcacgatggctggcacctaaaatcagagcaggaaggagtgagaaataaatagacagatagcaagatgcagattccatgtgaggaccttggatttgatcctaaaggcaatggaaaatctttgatggattttaagcaggggaattacatgatcaaaaatgtgtttcaggaagattatgcactcctaaataggttaaaggatggcaagcttaccttcaaagagacctagagaagtaagctggttcagtaatccacgccaaacatgatgatatttaggattcatagagtaagcacgaggaaggagaaaatgaaaaacacagagagctaatgactaaagcactccgctgtggaaattgtactaaaaaatctgagataaagggtcaggtcacttcttaccatgatccaaaaaccaaaggctttgatgccanatgtaaccacatcacaatatttcagagctgatttctgttccagaagaaaacagtcttggtaatttttatagttatctgaacctcaaaggtcttcaaggctggcttgaaaactttacttaaccactttactgccacataagttacaaagcctggggccggccataaagatgttaatttaatgaatattcataatcaataaatattcattaaacaacaattccgttcctggcatgctgttgctcctggcaggtcccgcctgcatggcagagtgcacttgttaaatgagtgttgctcattgcagaaacaccttatgggatttcatgaaagaagctgcattcatctacaatacatacagatgtgtagagacaagttggaacaaattctgcacataaagaaaaaaaaaaaagcttttcttctttggaacaattcttgtgtttcacaaatgtgtggccaaatatgcgaaactgtatgggggaagccaagtagaattcaaaaggttttattcctgtttctatatgctgggtaagtgcaaaggcagaagtctctaaccagatctatgactgcctgaaagaggccagtttgtaaatgcaaatggcgagttgtgagcgtaagtgctccaaaagaaaaaaaatctttttttcttatattgtatggtggcgtttaagaargccacccatttcatattagatggagtcgctatgatgctgtatacatttcagttgtagtatacgtgttccattatgataaattatttttctaaaacatggacatcactatttacaagtgtttctcattaagaatccaccagaattctccatgatcaccacccaaagaattttcacatgttcttgcacactggtaataactgacaaaaccttctagatagtgacggtaaacagatgaattctctatcagaatttcctgcttacgaatactatgtaaagaaccaaatgttcaacacttttctgtattcttaaggtgctgcaagacacttgctttctgttgattccatagattgcctcagggaaacaatcctgttgttttccaaacatatgatgagcttccggtcagtgtagaataatattttccttctttcagacctgttgggttctcccccatgcctggatatccacaagcattaccctaattagtgggcatttaagcagatttttaaaactccagttattttgccactattcaactaattsactgaaaaagaaggctaacctgaccagaagtacctgcagtgctgagcttcagcctctttgaaagagtagtccaagaagctgtgatagacgcatgcaaactttatgggaaattccatgagttttgatgttgttgtgccattgttgttgctactgctgttcttgttgattttcacgattgagtaacttgcttcataaaacttccctcaacatactctcagcaacctgagaaaaatgagagtttccatgtagaggtgcatctctctgactcttacaacttggccttttttttttttcttcaaatcttggaactttgattaacacttgaatattttgaataaggtgctaaggtttgtgattcaataatgatggcacttacttcatctgccttgacagtctttgaatagaaaatgtgagaggtgaaaggttggctggaagggctactgcctccagcatacaggtggaaaaagacgtctcagctagggcacactattaaaggaaaaatgatatccttatatattttcttctttgctttctaagtgaactttctcttaatagtccttatatcacattattttccttttaaaaaggacagtatagaaaccacaggactctcataaccaaagtaattgcctatcaaacccaggtcactaattagacaaattaaatttttcatgtactcaacaaccactctcactattgggcacttgctattcttctaaaggagcctctaatagtcatcttattttacctgagcaattttaattgcatcttgtggcataccattagttttattagtgagttgcttaagcttactcatgaataataatcgtaaaatacaataaatttttaaatacaaattataagaaaagtgaacttaaataatttctttgagactaattttaatccaaattgagcttcgtctataaatttaatttttttcagtctgaaaatggaaagttacggtggaaaacttccatctaaattcgcttaatgtgataccctattatacacaattgtatcttggagaagcacaatgaaatgattttaaaactatataccgctaagaatgtctttgtgactatgatgaccttgcctgattacaaaggtctttttgtcctacgtgttgatgatctgtttaatttagcaatattcaggttatttcttgcttcccattcaagaagaatataacattgctacaggcattttaagaaaaaaaaaaagttaaaaaaattgaaagcacagatcagtctgtcttgttgtacaactccccagtcaccctaagtattgcattccagataacaaagtctttgtttggaatagcgcatgaatagtgtcttgtggagcaangcaagagctgggcaaggatgacgggattgtgttttcatattcaaatcccatgcaccttaccttacattttttccaacttgaaactgtagcaggaaattaaatatgattatattttcattgaggtagacaacatcttttagctgagtaaacattctaagaagctctttttcaaatacgcttcctaaactccacttactgaaaattcctttccaacattactgctcttctccaattttttcctcaaatgaaacacagacattcctgccaccctgactttgctccagatgtgtctctccctgctgcttgctctccatttatctaagccaggagtagcaagctcaaaagtgtgaaattgcagcttgtaagccagtaaggtgtcaggacattggagaaacagagtcagattttttgagcatttatgctcacagctcaaaataaaatcaagtaaaatgacaacaacaacaacaacaacagcaaaaatccttaccaacagcacatgcctttttagcttatttggtcccaggaggagccagccagttgcccctggtttaaatcccactgtttcttcagaccccaagtttagttctatttactttcgtgaagacttccctggacacccaccctcagttgccacgacctcctgtcttcacaatgtagcatttattgtaagtactatttagtttttatacacatatcctggaaggtcaaaggagtttcagggcaaattagcagatcttagcactttactttgagggcctgtttagagtagtttgccaagagccagccaggcagcctctcccttgggtggtatgtgaaaccaccagaagtccagggcttgttaacgctaggagcattgcagtagatagaccctaaaagcagaagtaagagttcataaagaaaacaaggccctcagctctgattctgacatatgtggcttggtgaaccaagggcatggaaaggagtgtatcagagcttgtatcctgagggacattgtctctcattttctcatcatcttccagcggatcacaccctgttgtcttagggtctgtgctagtcttgtttggaaacatctccttgaaaaccaaataacttgtaattgttattattacaaggttactgataaaacagatgacagctatcagccaatcatgtctattatatatttaacgggaagtcttatcagccacagaggaaacttaattaattaagtattctccgttgtaaaataatacacaaacatttagctcacacttctatgagataagcagcatgagtcatagtgcaataatctactagtcctgtgaatggagaaagcaagcctaagaagttatcaatgattcattcaaggacacagaaataatcaagaacaaaatgaaaaagggaacttggattttcctccctcttgtgctggtttttcagaaaactcataccaccagaggcagcagtagcatccaaaggccctttggaaatgcaagtgttttgcatacagattttaaattcacagaaatgtaatttaataagcagctgcagcacatggtagagatacctggctctgcaaactgtaaactgataatctagttggttttctattctccattttctatgctcccctaactgaagaaatggtagcatctacagaactatcaagcctgtcaatttgctttntcacctagaaatattttggaaagataagtgtgtatgtcagtttgcaaaacagcatgactcccttagcctttgstcactttattctgagccaaaagagctgatagcatctgtttccactacccatgccatcccatcatcaaaaaaaaaaaaaaaaggcataaagtttgggaaggaagttctgaaagctttcacatgcctgttccttaccaggaaaactattttcttccatgcattcattctgcttccctttcttgtgtctgactcacatgtttaactggaagataatttgggaggaagtcaagggtaaaaggtcaagggttgaggattgtattaagttctgtgtttaccaaaaaaaaagaaaaaaaaagatgatgtcaaatattttccaatgagaactaagcaggatggtcttaaaaatagaggcagagagaaagaaaaagaaacattcaccctcagatcctgtgaaaattatgttagaacatattaaacctaggataagaagtttaacattattggaaaatttcaggagacacatcaaagtgtcttaaactgcaaagtaatgcaaaatcaaagaaaaaacatactatgtttactaaatcagtttccttgtggaaaacagaggtagagaattaagaatttctaaaagcaaatgcatatactggcattcttttcttggccgttacttttaattttattcttctctatgcatatgcaaggataattcacggataatggttaggaaaatgtgaattaatttagagaaaagaagattctgtgtaacatagtcaagccaagctattcatccttctacctcaaacactacaatacctgtgtagcacaggagatgggacgggaaagggacagggaaacaaagaggggcatgtgaagaggaaagaatgctttttttctgttctgctgtgcatgaccttgaagaatttgttgaccttccttatcaattagcaatgttaaaggatatatggaaatattttgaacattggattactataaaaagtgctttgcaaagcttgttactagggaaataatagcagtgatacaaatacgtctttatagcaggttttattaacattttggaaataaatatatagagaatttaaaacaattttaatttgctgtaatttcagtaattattccattttaaaataccaataaattcatataaaatatatcttaagcttaaaaacgagtttatttcattgtgattattttctattgttttctaacaaacttgaaaagcacttttcataataattcactactcaaaataatcatggctgggtgcggttgctcacacctgtaatcccagcattttgggaggccaaggtgggtggatcacttgaggtcaggagttcaggaccagcctggccaacatgataaaaccccatttctactaaaagtacaaaaaattagctgggcatggtggcacactcctataatcccagctactcgagaggctgaggcaggagaattgcttggactcrggaggcagaggttgcagtgagccgagatcactccattgcaccccagcctgggcaacagagtgagactctgtctcaaataaaagaaaaaaaaaatcctgtatgttatttaatgtgggcagtgggttaagaaggtcagcagatttctcaaggtcatggataacgaacactactttctcactctcttttatacactgggattcaatttgtttaggcatattcagatctcattcccctacccttgtaaaacttttacttaaaacttttggtgycatatttttaatattggagaatagcttgatctaatatacatgattttgctttatatttattattcacagctctttctcttttcatctgaaacttagtaataaaaatttagttatatgagccaacaactttgtgacattaagccatctgtctagccttttatgcttgcctcaataacaggcaatcaatgacttcttggaacaactaacaggttttaacagtgaatggaaggaaacttttgcttaattatagtctttggaaaagttaacatgcattaacctccaaaatggtacacaattacattactaaactctcacaaactgtacatacatatatttaacattatcctctatttacctgaccataaattctaaatatttattcaaatgtttagtgcagtatcataccaaagggtaaatatatacaaagtttttgggttaactaaagtatgtatgcctttatggcattgagcacattgtattggaaactttttaacatatttgctaaaatttaataaaataaatgtttaatccatatgccaatttagcagtacacctattatttcaattgttttctcagaaaaatataaatacaagcatagtgtacatgtgtgcatacctctatctactagtccctaagagcaccttccaaaggtaaactaatgtggttgtaaggacaacggccttgccacattatcatgcccaggtgctcaaagagatgaggctagttctgaatatgtattttcccctattctgcaaacatagttcacttaaagacattgtattttaaatatgtaagctaacccactctttattaagactgataggtatttttcaaaatgaaatttttgttgtctgtacttgcaaagcaatatagaagcattaatttaaataattcacataggaatatattcttctggaaaaaaatgaatgctacaaaaattcatctcatttcaattgaactattagaataattactttagttatctatatgtgtaaaatctgtgggtcatttaatgggccctgcaagatcaacactttggaaataaataggttcagttattcttggtaggttaagaattatataactgattttttaaagtatttgaaaatttcttagatattcatgaattaacatttttgcttttttttttttccccaaagcaggacatttaaaaagaaagaatggaagaagtaatcaatcttaggccagaatttgtctttaccaaaaaggaaagggatattggaatcctggtacttgatttccattgcagctggaaatcttacttgttgtgtgactgtgagcaaatctacttacccctatcagcctaccttacaaggcaagataagattatcacggagaatagtttatgttatgagtacagtacaatattccaaatgaagtaagaactcaaaaaatagtaattatttaaaattacttttattattgtttatgtaatttctgtcatttttaacttaaactggacaaccatttgggtttcaactaaggttttaaattttaaatcaaaataatgtaattaatggattgttagggtcacacaggtattgaacaaaaagactttaaacacatggaatgttatctttgtactgctcatcattttcagctccaaagttttaactgtctttctgtgttcacaatgtgcttacaccatgtgggtttgatctagtgaatctcgcctttctcattttctgatttccttatatctatatttgtaatcaagtgaattagtagcgtttacaattgcaatttgtagaagacagcataggcaagcagatgttccattgttagagattctgagtccagttttaccgtatgttctaaaccaaaatgtcatgtcagatttgaggtcccttgagctctgctgaagtagtaaagggggatccttgagtcctattacattgacttgttggctgaactcatttctaccttttctcagaaatgttattgttttagtaatagcaaaaatatttttatgtccaagacttcctaataattaatactaagatttagcatgagcttattattgtgattactttggtttttaaattagtaatgaagagaattaaagaaaacactgttaggatggcaagagaatatctggactagaatcagggacattttaactgattggagcatgagtttattataagcacttaattttgccatttcattgctgagatttcacatgatttttctcttaaaaatcagaacatttaaaacaagaaattgttagtaaagtgttagataaacaaaaaggttttttttttcccaaaaaggtttaccagtctatctagcaaggaactcaatacagcacaaaagtaaagagctgtgtttccatgccagagtgatatgagtaggaaactcagatctgccatttgctacatatcaaaccttggggaaattatttaattatgggaacatcagttttaccatctataacatggcataataatagtatcaacatcattaaattaaagattaaaatagataatgaataaagtactagcacagtgtttggcatgtaccacacttattggttcttattattaatagaatttcttattaacagctgcaaatatggctcacttgaccaaaatagaattttataggcaatgcacttccactatagtttttacagataaagatatatcttatcattgggatttgatgataattgttgcaaaatgaggattagacagaagatagatgtgcatgtctaaattctgtattgaagaatgaaaacacatattttttcaacagcacattatggctcaatgagatgtcactattgtgacaggatatgaacttctcaatgtaaaaacaaatagatgcaatacagccataaccgtcagatcataattcttttcctattaaattgcttagttgtctgtttctctaatgcatagtgaaacataaattgtcaacgttccctttactggttaaaatttaagaaaagatataggcatgtagagccaagtgtttctaaagcaaaacaataaaagggggataactaacacatatttttttttctttaaactttcttaaagtgagggactttgaaatgacttaaggatgtgagtatctttctgtgcgtctagtacaatgatgtagtagtcttgaacacagcacacaatgtggcagttgctatggtgacaagatgtttttcattgaagaacagttaaaatggtgacatataaataacatatgcacagtatattgtctctgagtggaatgacctttgcccttggactataagaaggtgttttttttcttttctgaaattcttgtctatttttgatgtgcatatgtatctaatagactggtgatcaaactgccctctttgaagctgcacagggtacagatctgtggtgagaaaataaaaggtagctcaatattgtatatgcagttaaaggagttgatgggttggaaattaaagcacttgcattaggtgctgggctggctgaaaacattttacactttacaagctcactttccaattaaaacttatagtacagttatattttcttgtaatttggtggaaaggttactatatatagcaactaattgtttataacaaaaaaaggaaaatatagctgtaggcagagaagttgaaatctcttctgttctgagacaaggcactgctggagaaaaggacacttcatttaaagtactaagaatgcaggccgaggtctaccttctgctctctggccttgggcaagtcacttagtgactctaagtcttatctttaaaacagaaatagggctaacttaattgccacaaagaataggcaagggtatcaaagtagcaaatgcaaatgagattggtatgcaaatgcaaatcattgttcttatgaagtattatgaaaagaaatatttgagaaggtcaaatttcagagtttgtcctgtctggctttaaaatgatagacagtgctaatggcagttaaactaactttcttcttatttcatggcctactagtcaatgttatctagctggtaactattaancttttakattataatatatgaacatgttcgtttcataaatgtaagttagactgctgtatgtgatagtgtggcagatattctgaatgcttctgactaaaataatcataattgcagattaaaattatatacaagtatgtatatctgtgtatatataatctattcatctatatataataaacaatatatattaattacatataacatacatatgtgtatatgtattcatatgcatagacaaagagggagatagtatatataatacatctggatattttctatgtctatatctacatatataataagtatctgtgtatatatacgtatatatacacacatacatatacttcgttacatatctggcacgcaaagaaacattcaaataagacaaaagcaatataagaacaggccatttgggaggccacttgtttggctctggtttctgcaaaattctgtgttgattcttacatggaatgcagggacgaacaggaagtaaaatgtagggtgaagcatctgataggaaatcccatgataaaggtgggattggmgaagaaatacagacttagtgtataagtgaataagaaataaaataaagccaagaagaaatacagacttagtgtataagtgaataagaaataaaataaagccaagcttgaaaacaggagcaagcaataagactgcagaatgactaagtaaatttgaaaatcagctgaggatttttagacatcaaaaaacaataatatattgatgttaagatattaatagtaagatattaaaaaataaaaaatatgtatacatattataaagaactaaagcattcatagataatataatagttaacagagaaattctagaagaaactatgtattattagaatcaccctgtatttcgagcactttgggaggccaaggcgggcagatcatgaggtcaagagattgagacaattctggccaacatggtgaaaccctgtctctactaaaaatacaaaaattagccaggcatggtgcctgtagtctcagctgcttgggaggctgagggaggagaattgctggaacctgggaggcggaggttgcagtgagccaagatcgtgctaccgcactccagcctagcaacagagtgagaccctgtttcaaaaaaaaaaaaaaaaaagagttaataggaatgtaaaaaggttgctcaatagactgttaatatataaatgtattaaattttatccaacagcaacaatatattataattatcaatatraaatattcagttttaataacatcaaccagtaaaagtgcctaagaataaatccaacaaatttcaactttttgatataagaaagcattaaaatacaattcaagaatatgtttatattggaatttacccaatgtttatggattggaagacttagtatyataaaaagatgaacgtttttaaattttcctcaaaacaacaacataaattttctacagaatttgacaggctaaatctaaaatttgcatggaaaagaaaaccaccaagaataatttagatatttctgagacaggttctgaacaaggttgatagaatgaagatagaagaaatataggtatcaaggttctgtataaatctaagctattaagacagtgtattgatactgtgctaagcaaatattcaagtggaacagaatacagagctcagaacaaagctatgcatatatggaagtttgatttatgacaatacagacatttcgatcagagtagaaagaatattttaaaatttatttttaataaattatcctgagataattggttacccataaaaatgaaattagatccataactcatatatacacaaaaatcaattctaggtggactaaagacttaaatcttaatggcaaactataaaaatgttaaaagacaagctaaggaaatgtatttattaaacaaatagagtacagagaatgaaaaaacaccagtcattaagtaaaagacaaacaacccaataaaaaattgggcaaaagaatgaacaggcatttcacggaagaagaaacactgtagttttttaatcacatggaaaaaaatgttccacctggttagtaatcagggaaatttaaattaaaactgtatctatatattttttacacatacaagattgaggaaaaaattaaaaggtgaacaatgctgatattggctagaatatgttttaacaggaattctcatctattcttgggatgtgtataactgctataagtatttggaaacagtttggcatcaactactaaagtaggacatttatatattctcttgtcagcaaatacactgttatgtgtcctagagaaagtcttgcatggggattttttaagttcatactaacatcgtttattacaataaaaatctataaataataaaaatgtccattatgagtaaaatagatatatacatatttggaatatcataaaatggaatattatataccagtataaaattaaacttcagttacaatatcagtatagataaatctaaagataaaattttgaaccaaaataaaagaatacaaatataatcactctatatacatttcaatccagacataactacagtctatattatttagtgtttaatatatgtgtattaaaacttaaaacacacacacaagaagatgattaaaataatatttagaaaaaaacaataaacttgctgggaagagagggattagattgaagggttctacgttactagttacattctgtgtctttagctatgtggtggctaaatgtaaattcatttttctattattcttcatactgtagtatgcatgtttcatatactgtcatatatatgatatatttcacataaagaataaacaagatgtcatttattcattactttattcctacataaatttaacagatagtcattgaatgcctgtagtctgccattgtacagattattttaaattgaatagacaagttttagcatttccaaaagctaaatatctagtacgagttatagacaaccatgccagaaataacaatacagaattctcacattgttccatgacacatctatgcacagaaaaaaagatagttaaattggcctgtagtttaagagggttcaatgtgacaacagacttgaacactgaaatctgcaggagaaggtgttggccaagagaacagtcccccaaaaaatgcattccagaaaagccaacagtatgtgaaaaggcagacatcctagagagaacagactttttaaataactggatgaaactgataatttkctggcaattgccatttaattacctaaactctttggaagaagaaaactattgtaggggaaggatgaggagaagttggctaatgggtacgaaaatacagttagatagaaagaataagttcatgttcaatagcacagtaggaagactctacttaacaataatttagtgtatatttcaaaatagctggaagagaagatctgaaatgtttccaacacaaagaaatgatcaatgcttgaggttatgaataagctaattaccctgatttaatcattatgcattctatgcatgtagcaaaatatcacaaagccccataaatatgcacaattattaagtaccaaaaaaatccctattagattcttgaaaggcagtgaagggtccagggaaggtagaacttaagagagctgtcaaaatctagccattgtatggtgagctcttgttgacccaatagctaaacagggagctgccaaggggaatcagaagttctatatttcatttcttggcttggtgttataccaagagaagtagctccggtactggaaagttgattaggcaggaaacctatgtcttaaattaaaacaggttactatctcatcagagaagaaaaggagtttctcaataaaatagaggaaattatatgaaagaaaaacaggtgttggaaagttcagagaaggccaatatgaatcagaagtaggaaggcaaaaagctaaattaggaaaagaactagtcttttaggtatcacattttaagagaggccagcaaaccctaacacatccaattcaaagggtcgtgattaggatactgaacattccaaaactggggtgggggtagggttttacaaaatttaaaatcaaaagaactgagaaattttttgcctagagaagaggctcaagggtgaagaaaattggtcttcaaatatttaaaggattgatatgtggaagaggaagtaggctctccaactcatcaattttggatagttacagtgaggtaaattttagagtaatatatggaagaacttcctgaccattttgatagcctaaatattaaacaagggtttttggcaatggtgaggacaccaggactgtctcagtactcagaactagatagttaataggcagaggtgatgtagatagaggtgatatcagactccatgaatattatctcttccaaaccagagattgttgagcttgtttttacgctttctttccatatttttattgtatcagtttataacagagtactgcgtaatagaaaattttaaacaataaaattatcaaaatgaataaattgttttttatagaatttggtagaaatagatagaaattaaatgtgaacacaagttatctctcaactcacatgaaagctataattttaatagtaaaatgtggtaagacagcaaagaccttttgagaaattcttaataagttttagaattaaattgctataaaggtcatggagtaattttagtcattgctaccagacacaggaagatgtttggggtcattgctgcctgtcttctgtagacctagcagtaactttcccacaatgtaagaatgttatgtgtggatgtacaaaccccttattcaggatccaggagattacagaaaacacaaataccctaaaaatacaaactctcaagcaattaatttgtgattattacagaaaatagcaggttcacaagcattagttgacagattcccacaaatgaaatttgcaatrtaaagatcttaacaacaaattgcattaaataaaaaccacaatcgccgagtctctagataacttcaaatagttcaaaaagtcagtgtctgagtgtgcaaatttagtacatcacagtgaagaactcatgttagaaaacccagcttccctgaagccaagtatgtttgtacttgcctttacagaaaccaagaatcattcaactcatccatgtcctgcataaactcctgctataaaatgaagttattaatgattttccaggctctgatcatagtgaggtttctacttccttccatgtcttcaaattgagcagtgttgatttatgtttcatctaaaattttatgtaaatgtatttgattaaagagtcctcttctaaaatttgtctttaaaaagcattggacaatatcatccttctcatagctctaaatattttgagaacacgaagtatgcctgtttgtctcacctcctattccaaattcctagcacagtgcctaatagtgctaaagaaatattgctgtatgtatgaacgaataaataaaagttaaaaattcataatgctatgactaagtgcaatgaaaaataygaagaacatttccaagaagtacctttaaatatttatttataaaaacttgtttattggtctggcacagtggctcatgcctgtaatcgcagcactttgggaggccaaggcrgatggatcatttgaggtcaggagtttgagaccagcctgaccaacatggtgaaaccccatctctactaaaaatacaaaaattagccaggcattatggcgggcgcctgtagtcccacttactcgggaggctgaggcaggagaattgcttgaacccggaaggtggaggttacagtgagctgagatcgtgccactgcactccagcctgggacatagagcaagacttcatcaaaacaaaaacaaaaacaaaaacaaaaccttgtttatttaattaccaaatgtgtactgggcacctactatattatatgcaggtagtattctacacagctggaatacagcagtaaacaaaagagaaaataatagataataaataacggacatgaataaatacatagcctggtagaaggtgatgattgctatagaaataaaagggtagtatgggagctaaagaagttccactcacagaattggaaagtaggatattggttgctagaggctgtgaaggggatgggagaggataaggaaaagatgatggttaagagataccttattacagctagacaggaggaataaattctagtgttctatagcactgtagggtgaccatagttaatattaatttattttattcacaaacatctagaagagaggtttttgaatgttctcaagacaaagaaatgaaatgtttgaggtcatgaatatgctaattaccataaattgatcattacaccttgcatgcatatattgaaatgacactgtaccccataaatgtgtacaattattatatgtcaattttaaaaataaggaaaaagtgagggaggagaaagaaagagagaaaagaaatagaaatattaaacatgagacagtataaaggggttcaggargacccaggctggagaggtggcaggttatagtaataagcagggtgttcttataagacctcattgtgaaagtgacatgatcagagatttgaagatggtgatcaaataaattgatcatgtagaatacatggtggaaaagaagtctaggcagtagaaacagtgcaaagcccctaaaacatactatccttaaggaatgtgaaagaggccaatgcttctgattagagtgagcaagcgggtatagtagaagataagattcttaatctgcaccattgtcataacaaaatgtcatagactggttgtcttaaacaatagaaatgtattttctcacagttctggagaatagacgttccaggtcaaagtctggcaaagtcagtttcctgggagggctctcttcctttcctgtagatgacagacttctcatggtgtacccacatggcctctctctggtgggtgtgtacagacagagagaaagagagagagaaagaatctcacagatttgcattgggtgaaatgttctgtactcgatcacataatagaaatctgggtttgaaatagaacaatttgagtcactagtaataatgataataattaaatagtatattattataactactattataacaagcaaatgaataataatttttaaaaagtgatttctgcatcatatgactgagtctaaaatacactctttgctgtgaaccttaataatcaagcacagatctctctctctctctaattctttttatatggccaataatcctatcagattaggacctcactcttgtgacctcatttatccttaattacttttgaaaaattcctgttttcaaatatagtcacattaggattaaggcttcaacatacaaatttcaggagaacacaattcaatccatagcaaagaaaaacaagataaagtttaagggtagatcacgtagggccatacagatcattgaaaaggcttgggatgattatgcctggaattctctgcataaagagttttatgattctgtgttatatcaaggcatagaattttttcctcccattatttttggattttagcttagggctgaaataacaggagacaaaagctaagaagacactcaaattgagcctcaaatgtcagctttgagtactggtgtttaatataattggaataatttgcctgaatttattaattaaattctacatcacaaaccttggaattaaaactcctttaatttaacatgcaaatctatgcagaaacatgcaaaacagtattcgtaaagcaactgaaatgtatcttcaggctttactgtaggggtcaaagcaagaagatgggaggcagggaacacattctttaagaacagttttcgtatgacctagtataccaaaatatatgttggaggcatactggtgaacaggatagttaaaccaaaaatgggtgagacactactcaatttaattacaaaacttcctgctgtgtgcttataaagtatactaatgggctaatagataatgtacaaagatgtctaattgccactgaggatcaactattccacacaatatgttaggggtttttagcagagcatccttccatttaaccagagtttatcctgcccattagaagaatctaattcaatcattgttcagtgtcattaagaaaaaatatgattctgctgacagcatttgatttaaaaaaaagtgcagttctgaaaatagatacagttagtcattggaatcattatcaaagctgagttaattataaaaattttataagcatgtattattttcaatcttataataactactattttaattattatgattattattcgtgactcacattgttttattttaaaaccagacttctattatgtgatagagtatagaacatttcactcaatgaaaatctatgagaaggagaaaaggaagaaagtacagtcatttgtatattggtccaagcaggaccttaaagatcagctgtctaaccttctcattttacagatgagggaagagacccagagaggttaaatagtgaaatgtgaaattgagatgatttgctctcatacggatttaatggcttcattcctagctacccattctgcttcaaatctagtcaaacaagcaaatgaataataatttttaaaaagtgatttctgactaactctaaaatatactcattgctgtgaactttaccaatcaaacacagattttaaccttagatcaaaggagtaacattttctcaatttaatcagactacaaaaatttctgtgtgttagttatgactgcaagctattttattagtgtatattttaaagctcattcaggaaaggcaatatagccttccattctctttcagatacattaccctaggtcagttttcaaacccaaaagggagaaagacatccaaataaaaaaattagcatctggctgggcatggctcacacctgtaatcccagcactttgggaggccgagttctggcagatcacgaggtcaagagattgataccattctgtccaacatggtgaaaccccgtctgtactaaaaatacaaaaattagctgggcatggtgacgtgtgcctgtagtcccagctactagggaggctgaggctggagaatcacttgaacctgggaggtggaggttgcagtgagctatgatcatgccactgcactccagcctgggcaacagagcgagactctgtctcaaaaaaaaaaaaaattagcaaccatgcatagatttatctaaatacagaaatttcatgcagaatagatctgtgctcattacactagagcatattaccaagagaatgctttttaagccaaaaaaaaaaaaaaaaaagatgccgaagaccttttttagaccccatccacccaagggtcattgctctactgcaatcagtgcttatggtcacagttataaagtggtgactcttataacactgtcatgagttatagctcagaaagtatgaagcagagaaaccggcaaagctgacccaacaaagatagatataaagttagcagaggactagagataactttatgccagttgctaagggtgacgtacaactgatggataatgtaataatgcacattaagccacacttacactaaataagttcacaacatcattaatatccataacagcaggggcatcaagctgactgaggtaagtaaaggcgttgatgataaggatgccttaaggaaaggcctaaacccctaatgacctgatatgatgcataacaaaacagggaaaaaaggacactgtggtttcagcttcatttgtccttgttttttaacttgaacagccctctaactctttttttcacagcactgccatatttcacatgtccttctttttgaaggtaacagatacatctctcatcttatggacctgcattctcatgttagcaagtctgtgactttctcatttgtcctgactgctcatccctatgccggggctgcttctttggtattcctattctttgcatttttgtctgtttctcattttatttaattctcagaagtgttgtaaactaagttctctttaaaaaaacattttttaagatacagggtcttgctgtgtcacccaagctatagtgcagcggcatgcccagagctcactctaacctcaaattcctgggttcatgagatcctcctctccggtagctaggactacaggcatgtgccaacaagcctggataattttctaatttttattttttgtagagatggggtagctttatgttacccaggctggtctccaactcctgacctcaagcaatccttctgcctcagcatttcaaagcactgggatcacaaacatgagccactgcacccagccaaaaactaacttctatttaacaaaatccttccctgtcttctgctgtacattgcaatagggagaaacaaaaaaagaagaaaaaaaatagtatatgaggaagttgtgcatgtatgaaggctatgaaggctatctctaggcaaaattaagtgggcaactccatttccttctgaaaatccactcttctctctgttcccagtttataaacgatgtggctaattagaccatttactatggtatgccaaatccgaacttttgatacactcaccaccatctccgtagaagccagttgacttaataatctgttaactgtagctaattaatttgagtccttcagatagaatatgccttgactggaaggaatgactcaaccggaacaattttaaacctcatttaaatggattctagagtatgaagcaaggagtatgggatattgtagcttcctttataattctgtgttatatcagggcatagaattttcccattatttttggatttcggcttagggctgaaatgacaggagacaaaagctaagaagacactccatttgagcctcaaatgtcagctttgagtactagtgcttaatataattggaataatttgcctgaatttattagttgaattctagatcacaaaccttggagcataggtaatccaattttgtagatggggaaacaggtctgaggaagttaaataatgtgcccactatcagagagccttagtaaatgttgggactaggattcaaacctaggcaacctgaatccacagcccaatgtctccaagtgcctacttgtttctgaggttattatttgttgagaacactccagaatcactgtagtaatataatcactgttgtctgactttggtcaagtgacttaaattctcaaatgcaaagcaagagtggttgagtagacgatctctaaggtctttgagaattctaacattctagcattctctggccctgtgatttcataaacgttgagtcaaccttacaagacacacaatagctggctgataaaaagcattatttcagttacttgaaagtgaaagagggccaagactagtaaccccaatgatagattctgtgttcctgtcttagtctgttttcttctgctataacagaatacctgagactgggtgatttataaggaacagagatttatttcttacaattttagaggctgggaagtctaagatcaagaggtccacatccgatgagggcaatcatcctgcatcatcctatggcagaaggcagaaggacaagagagtgagagagaccaaaacagccaaacttatctttttataaggcaccttctccctccatgacaaatccactcccatgaacatgtcattattccacttatgagggcagaactctcatgtcttaatcacctctgaaaggttccaccttttaatactgttacaatagcaattaaatttcaatgtgagggttttttgttgttgttttttcttcttgttgttgttgttattgttgttttgagatggagtttcgctcttgttgcccaggctggagtgcaatggagcgatctcggctcacagtatctctgctttcctggttcaagtgaatctctgcctcaacctccccagtagctgggattacaggcatgtgccaccatgcccaggtaattttgtatttttagtagagatggggtttctccatgttggtcaggctggtctcaaactcctgacctcaggtaatccgcccaccttggcctctcagagtgctgggattacaagcatgagtcaccgcacccggcctcaatatgagttttgaggggacaaacattcaaactatatcatttccctgagtcacaaaaaaatcaactgacactatatagacctacaataatttatgtatacaaaataagaaatacctatttaaaaaataaatgttagtggtactagtacaactaatgaaaataaatgggaaccatagagattttgtcacataatagaaatctttttgatctatggtgtatcataatgagaccatccatcaaatcagtttggccactgattctcttattgctaatatgagctccactgtaaattaatttaacactcgcttcaattgtagtactattcagagtactgaacttgacttcacctaaaagaactgccccctccagtccccataatgtgtctaatcggtctgttaatgtaggcgcctcagacttttagtttcagccaattacttataagaaagttggtgcactgcctcacttaagactgaataatagtgccggggcagataatttaaatctaaagcttcttaagccagctgcttcattaagaggtaagccagtaactgatatttttaatttaacactcttttctggagatcctccatcaatcgggatgtgtgccagagtaataccctcataaagaaagaagtaaaacaggcctgaaacagtgtagtgaggaaataaaagaaattgatctagggttatttttcacaatccaaatgattcacttggtagtcacccaatagtaaagctaaattcgaatgct

SEQ ID NO: 97548 - DNA, 81815 bp, Homo sapiens
  misc_feature (1)...(81815): n = A,T,C or G
attactcagagatgagaattagcaggcaaggatattttaaagagttataactatattctgtatggccaaaaagttaagtaaagacatggaaaatacaaaaaagacctaaattaaactgttagagataaaaactagaatatttgggacaaaagaattatacgggatatgattaatatcagattagacaaagattagtgaaatttaagccacagcaatagaaattatcaaaaacaaaaacacagagaaaagatataaaaaaagaaaagagaattagtgagctatcagacaactttaagcagcctaatattttgtaattggactacctgaaaagaggagaggaagatttaaaaatctgaaaaataatagctgaaaatttcatatttttggtgaaaactttaagttcagagatctaggaagctcaagaaacctcaaccacagaaaatctgaagaaaaccacatcaatgcacatcacaatcaaattcctcaaaattgacactaaaaggaaaatcttaaaaacagccagaggaacaaaagacatgttttatactgaagaacaaaattaaagatgacaggatttcttgttggaaacaatgcatgtaaaagatctttgagtaacaactctatagtactgaaagaaaacaacctgtcaatctagagttttatatccagcaaaaatgtctttcaaaaataaaggttaaataaagatgtttgtgtacatataaaaattgaaataatttatagaaaaataaaaaggatttctttaggcagaaggaaattgatactgaatgaaaacctgtgtttatacaaaggtataaaaagcaacaggattattagccatgtgagtaaatgctgtggtttggatatgatttgcttttccccaccaaaattcatattgacatttgatccccgatggggcagtgttgggagatggggcagagtgggaggtgtctgggtcatgggggccgatccttcatgaatggcttggtgctattctcatgacaataagtcagttctagctccagtaaggttgaattagttcttgagggaatggattagttctagggagagtagttatataaccaagacatcccttaggttttggctctctttgcacgtgtctgcttcctctttgacctctctgccatgctttgcagcacaaaagcccttgtcagaagccagtgtcatgtgctttaactccctagcctgtggaatcatatgccaaataaacattttttctttataaatgacccagtctcagatattctgttatggcaacacaaaattgactaaaacaataaacataaaaaaccgaaaaaagttgtttaaaccttttaaaagacaattgactaagcaaaaataataataatgtattgtgggatttatggtatataaaaataaaatatatgacaacaacagggtggggaaaatggaagtattataaagcttttatattatacaccaagtggtacaatgtctgccctgatctgaatgtgtccccccatctcctgcaaactcatatgttgaaacctaaccccaaaggtaatggcactgggaagtggggtcttttgggagatgattaggttatgagagcagagccctgatgagtggattagtgcccttataaaagagacttcagagagcttccttgccctttccaccatgtgaggacccgaagagaaattggcagtctgcaacttggataaggcccttcactggaatctgaccatgctcaacctgatactggatttcccagcctctagaactgtgagaaataaattctattgtgtataagatacccaatttatgacattttgttatagtagccacaatggactaaaataaaataactgaaaagtagactgctaaagttaatgatgcatatctaccctaaaagaatgaccaaaaaaaataacctaacaaaagaaataaaattgaataattaaaaaatcgattaatccaaaagatggctgacaaagggaaaaagggaacaaagaagacaagagacaaatagaaagcaaatagcaaggagatagtatttaaattaaccatatcaataatcacattaaatataaatggtgtaaacatgtcaattaaaagatatttatgtttattggataaagaagcatagcacaacaatattctgcctttaaaagggcacttcaaatataaagacagaaataaaagtttgaaaaaagatataccattgtaaaaccagtcaaaagaaagctagagtttctatattgagccaggcaaagtaatattcaaagcaaagaatattaccaggtataaagaaggtcatatcataataataaaaggacaataagtcacaaggacaaaacaatgctaagtgtttatgtccctaaaaatggagattcaaaatacatgacacaaaaactgatagggcaccattgaaaaatagtcaaatccataattgctgtcagagaactcaatacctctcttccaataaagaatagaatagacagatactcatcaaggctataatagacttgaaaaacatcattaatcaaactggcttgattattaagaaagactctatccaacaataggataatacacacttttcaagtgcacatgcaatatttaacaaaatagaacataagtctggtccataaaacaactctcaataaatttaaaagtattcaagtcatgtaacatatgttttctggccataatggaattaaattagaaatcaataatgtgaaaatctctagaaaatctaaataacacaaaggtcaaagaaaaaatgaaatgaattttgaaatgaatgaaaatgaaagcatgacatatcagaattttaaaaatgtccctaaaacagtacccaggaggaattttatagtgcttaacacctatataagaaaaaaagaaaagtctcaagttaatgacctcaacttctattttaagagacatgaaaaatgagagcaaattgaacccaaattaagcagaagaaaggaaataaagagaatgaaaagacaaagaatagaccaagataaatatatgcaaagcatatcactgataaaagaattatatcagaatacataaagaaaacttaatttaaaaacaaaccgtagaataaagaaatgaacaaaagatttgaacaggcacttcaccaaggaagatatagggatggcaaataagcatatgaaaagatgctcaacatcattagttatcacaggaatataaattaaagcaccatgatatacccctacatacctatttagaatggctaaaatgagaaagactgaccatacctgcattgtcattgatgtaaaaggattacaaatatcatacattcttgatggtaacatgaaatggtgcaaccattctggaaaatagcttggcagcttcttaaaaaattaaacatataactacccttgatccaaccttcctaggcatttttcccaagagaaataaaagaatgtccatacaaacacttgtaaacaaatgttcatagtggcattatttgtaccagccagaaactggcagcaactcaaatattcatcgaggctgcgcctggtggctcatgcctgtaatcccagcacttttggattgcttgaggccagaagtttgagaccagtctggccaacatggaaaaaccccatctctactaacaatacaataattatttaggcatggtggcaggtgcctgtaatcccggctactcaggaggctgaggcacaagaatggcttgaacctgggaggcagagattgcagtgagccaagatcatgccactgcactctagcctgggagacagagtgagactctgtctgaaaaaataagtaaaaaaataaataaaatttaaaaataaagaaaaaagttcatcaacaggagaatggataaacacattgtggtatatccaacacaatggaaaactactcagccacaaaaaaagagtgaactattgatacatgcctcaatcttgatgattctcatgataactatgtagagttaaagaagccaggtggaaatgagtacataccatatgattccatttatgtaaaactctagaaaatataaaatgacctattgtgacagtgattggggtggtagggaagggtcaaaagggacacaaggaaactctttctttaaatatgtgcaatttgttgtatattaattatacttcaataaagctattttaaaaagctaatggcatagagctgagtgttagtgattggaaggaggctggagggattctggggtgcaagtaactgtttcttgatctgcatgctggttacatgaatgaaaatgtattgggttgttaggattcacttttttataagtatgttatgctccaaaaactattttgctttaaaagttatatgtgtttcacttccaaaaataatctgtagccaatggctttttggtagtgagccttaaaactctccatcaattaattaatggccttagcattttatgtttcatgtcatgcatcattttctctagcatgctgtagtaatttaggtgtttgctgtgtcttccctgcaagactatgtgtgcctcattcctttgtgtctcattcctcatgcaccctgcagaatctgtctcctgtcttgctcattatcactggttgaatattgtgtttaataaatgaacacaaatttgttgaggaaaagaaagttctagtccattgcaatcccatgttccttgccttgttacctttccacagttttcttttattcttcccttcccttcctccttctgctcttcaggcctatcttatttttcttcaacatgcttgctgcctccccagcgtggctggaatggagtgagaaaaggaaggaagagaaggtaataaggtcagagagaaacttggggctgagatctggcagcatggggatagggatttgtaaggttgtgtgaaatgggggacctatgcagtctctgaacccacttacatattaaaataatcacttaaacatatctgttgagattagacggtggtgagtataggataagagggaaagaaagcagggtcacttcttaagaggctatggcatattccaaacaagagatgatgggggcttagaccagggcagtagcagcgacaatggggacaagtggtgcttgacatttgaaagtggaatcctcttaattctctaacggattagatatgggatgtgagagaaagaaaagaatcaaagatgattccaagttttattgcccaaacaactgtaagtaagaatgaagatgccatcaatggacatgtggaagactgtagactcatgggaagaaaactgaaaaacatgtttagtttggacatattatgcttcttagacttttaatgataaatgccaaatatgcagttggatatataaagctgggatccagagagagatgtggttggatatgaatttgatgattaacagcatgagactagctgaggttattaccacggtgtaagaagggaagaggacaaaacagcattgagctacctcaatgttagaaaactagggaaacaggaggaagcagcaaggaaactaagaagcacctgccagtgaaagcaggagacgatggtgacttagatgccaagcaaagacagttttctgaggaggagggagtgatcaactgtgtcaaatgtttctgacaggtctgatgaagacgaggactaagacctgaccactggatctagtaatagggtgttcattgatggcccagagcagttttgtaaagtgatggaagtgaaagtccctgtggaagggctttgagaaggaatggacaagaagaactcctttgaagagcattgctgcaagaggcagagcagtgggcagttgttgtgagggaaagtagggttagaagagaatattgaggatgggaggaagaacggcatgtttgtgtggtgaaggaatgatccagcgaaaaaaggaaaaattgatgttgttatctgtcacttatgttcttgttcatatcccaccctgttcctatgtttggggatcccaactttgaggttgagcccacacatcctagattctcactttcccagaatccacaaagatggggcacaggaacaagaagctctactaccagatgcctcagcccctcactctgaattagaagcgagtgacatgaagaacaaatcacaccacatctatgctggaaacagatgctagtgagccttcagacacagaaagtttgagaaaaagaaaagtgttatgttttcctttaaaggaktttataatcactgagggtggggattgactgtctcttatttaccactgaagctcctgagcctagcgcagttcctgataccaagcagaagtttattaaatttgtgatgaataaataaatgaatacagactagttttacttagttggttggttgacagattagagtgtgaaaaaattcacttcaaaggtatacttcaatcactatcccttgtttagcagaccttaatcagacttaaagggacagaactgaagttatgattgctttgaaattctttcttttttttttttaaaggaatgtgattttgtgtgccttgatatcagaccttatatttggtattgactaaatggcctgtttaacatttcacatgatgcgttaacactggaaaaggagaagaacgggacagaaaaatgaaaaacaatagcatttttttcttgagcaatgcgatggcattaagccactataatagttttaaataaaaagaacaagaagagaaataattatgcttgagtttaaagtgggcatttttacctatataccctgtaaatccactgtgagtcaagtttctgtaagtattcatttgcaggctcttttgtttagttgaagttttcatttccttataatctgcaggcagacaccctaaatgcagctcaaatacttaaacacatctcataacttcaaactactcattaagaacatttgtctactaggcatgataatcaccactctcctctccccatgttgctgttgatgacaaccaataggaaggagtgggagggacacgttatggtttaaccagtctctcgtaaattctagaggattcaaatctcagactatccacacagagctctccatggttaatcttgcttagcatggcaggtgttaaatctgtcccaacccagaatacttccacttcatagtaaaaacacttaggtaccatgagcttttttttaaaataggaagaatcacagaaattaaagagaattgaaaccttaaattttattatctggggaaaaatcagaacttttaggtccagaaatgaaggtggttttaaaatggtattagtaaactaatgttgatgactgtctcataaagaataaccaaagaatccaagaaaagttctttatctgtgactttttatactaccaacatagagccaagatttctgtcaagccacaagtattgctactaagacactgtaaaggcagtttaatattatcttaagataaatgaggaaacaatataataaatgagtaaaaagaaagacaactaaagaaagaaaaccagaaagactatattcgatttaattgtttttagaaaattaaacacaatcttaaaaataaaagagttagaactatgtctggaggaaagtaaaagcaaaacagaacacttactttgttctaaatatggccatttggaaactgtgaactgagattgcacagagagattctgatcataaaataacaagttgtattagtttgctagggctgtcataacaaaatgctgcagactgcgggcttaaacaaagatgtactcctcgtggttctggaggttagaagtccaagggcaaggtgccggcagggcacgtttcattctggggcctctctcctcggctgggggatggccctctttctcttctcaccttgtctycacatggtctttcctctctgcccttacagatttgatgtctctctttgtgttcaaattgcctcttataagaatgactgtcagaatggatgaaggcccactctaaaggcctcattttaacataattatctctttataggccttatctcaaaatacaatcacattctgaggtacaaggggttaggaattcaacatatacattttgagggcacacaactcagttcctaacactaggtttccgaaaagattttacacatcaatgtatatatttaaaagataatgctagaaatgtgtttttcattttcttttctcttataatttttctgagggctaaagtgacctaatacataacagttatgatcagccaaatgcttactctgtgttgtgtgtgtgtgtgacagagagaaagacaaagagacacagggagacagagccagaaagagcgattttctcagtaccttttctcaatactttttctcttttgatttctgataacacgtttgttaggcagcctcccaaatggctctcagtggtctgcacctcctgttcttcatgcccttgtgtatccacttgagtgtgggctggatttattgattctttttttgcggggctggggggtgsacagggttttgctctattgctcaggctgaagtgcagtggtgcaaccttggctcactgcaacctctgcctcctgggttcaagtgattctttgcctcagcctcctgagtacctgggattacaggtgtgtatcaccgcacccagctaatttttgtatttttagtagagatggggtttcaccacgttgcccaggctggtatcaaactcctggcttcaagtgattcacccatctcagcctcccaaagtgctgggattacaggcgtgagccattgtgcctggcctggatttattgattctttcctaacaagtagtatatagcagagtgacaggacatcagctctaatattaggttgtgaaaagactgtggcttccatcttgggtgcctctctctttgagtgctcacttctggggaaagccggtggacgtgtcttgggcaaccctgcggagggtcccatgtgactgagatggaagcagagcttgtgagacctgccaacagccacatgaatgagcctgcaagtagcaacccttaagatgactgcagcccagtggctcacgcctgtaatcccagcactttgggagtccaaggtgggtggatcacgaggtcaggagatcaagacaatcctggctaacacggtgaaaccccatctctactaaaaaaaaaaaaaaaaaaaatgcaaaaaattagctgggcgtggtggtgggcgcctgtagtctcagttactcgggaggctgatgcasgagaatggcatgaacccgggaggcggagcttgcagtgagccaagatcgcgccactacactgcaacccgggtgacagagcgagactcygtctcaaaaaaaaaaaaaaaaaaaagattactgcagccttgaggaaaaccccaaggtaaaactttctagctaagctggctggattcccgacccacagaaaccgtggaataatagactgctgctgttttcagctgctaaatgttgacataatttgttatgcagcagttgataactaatacaagcttagcctgcaaatgtcagtccaaattttccttttcaagctgtagcttgggatacatgaaaaataagcaagtgttttcaaaaatcagtttcagaaaactttcattaacacttataaattgagatgaaaaacctaggatgaaagttttcaacacaataacaaacctgaaaagaaagactgctttgctttgtctattattaaagcaaaattgcttattgtgtatcttaatgtaattgatttacattttcgttctataataatttagtttaggctgaattttgaaaataaatcagctgcaattttagtttccctcttaagagagagctaaaagttcaagaattacaaaattaatagtgtcagcaataagaaattatatagttaatatgaaatgcccgtctggatgatagagccagattctttactcgttgcttacatgtcttataagccaggaatgggtctggtccaatatctgagtccatcatgatttgtttctcatggtgctcaggcacctgccctgtccatccaagatgatgtgggcaggcctgggtgatacccagggtagtccgtcatgcaccattcttacactctcattctttgtacttctgctcttacaacttataccctgtaaacatgattctaagtcagcaacattttttttaattggaaggctttagacacactgatatagtttggatgttttgtcccctccaaatcccacgttgaaaggtaaccctcaacgttggaggtgggrcctggtaggaggtgtttgggtcatgggagcggatccctcatgaatggctcggtgctgtcctcatgatagtgagtgagttcttcagagatctggttgtttaaaagtgtgtggtacatgcaggatatgagggagaggaaaggcctcttcttccgtgcttttataatcattggttaacagttagggtagcagtgcttctatataggacaaaaccaaactccattggctggagaggctgcaaggcaggaaggcggatacctgccccaaaggatgttagagaatgggcagtttcataattttcagacaggcctgaggatacagactctagttaaagtactgccttggattactgtccaaaatactctcttgtccctccacagtgtgcatgtatgtgaaatgcatggctgtgtgcatgtatgtgtgtaatctaacatcagatgctatatctatgtgtatatacaggtacctaaactatgcctaatctcttaatttgactmtatgctgcttgtcagagaaaagcagtagaaaatttgatttgggccatatttcctctatcgtcagcaataatcctttgtattttaaacacatgtcccacaactatcagaaaaatatgcagtattttttgttagtattttaaacatcttagcacaatgagtcatagcatgggtctggaattctgacctcctgagttccaattttgctttaccacttgctagctacgtagrtatgttgtttcattctgtgaattccacctttgcatctttaaaagggaataacagcagatgttactgacagggctatagagtgcttaggatccacacacagctattaatcaataaatgttggtgatcatgcagaaaggtggaacaactttcttaaaataagtaattctccrgcatataactgcaaacaaaattctaagtagagaaagtgttattattagtagtataatcctgagctataaaataaaatgctccagtaatatctatattatccattataaacacaattagtataatgtaatccatctttctaagccatctgtgggggtttggttacttcttcttacataatctcattgaagaggatctcatggcatggaattagaggagaaaccactatgtagtgatgagatttatctgcacaatgcaagatttctagctaagcttcatgtaaaaggtatgtcttgacatgcatcttagacaataatgccatgggaaagagttctgcaaatggagttggaaacttttgataaggaaagggttaagataaatgtgatcttgtagcttggtggccattccacgacatcaccctagaatagcactcaaaattaatctccaactgcgaatcactttccctttataatagcacataaccactttactatactacctaacaagacattttgggtaatatcactgtcttcaaggcctgggaataaggctgaaccatgatttttcgggcctaatataaatttctgccacaggcctctagtcagggcctgcatagggccatttacatatactctctgccattaatttttgccacaaagcacacagttctaaaccacagcatatgatgtggaactatgaagaagcgttatttttattttgaattcccattctgcatagctagtaattttgcatctttttttgttctgtaatcaacaggaggagcagtgtcaacagtcctagccagctgttgctgaagggcccaacaccaaatcccagctgaagaacagcttctcatcttttgagacacagcacagggtgatgggcatggagctcttccacactccccacagtctgacttrgctctctccgttgtgccctcctggcaccctgctcgtattttattgtggcacctatatcgctggatctcactcactggtttgcactcctgtatcccctttgagggaacaaatcccatgcctctgcaatcccaggatctgatactgagatagacactaaacagatatttaaaaatttttgataatcaatgaatggacaaggagaataaataatatgaaagatgaaataaagaaataaaagtattaatgagagtataaacatatccagattgggctgggtgygatggctcatgcctataatcccagcactttgggaggctgaggtgggaggatcacttgaggtcaagagttcgagagcagcctggccaacatggcgaaaccctgtctctgctagagatacaaaaattagctgggygtggtggtgtgtgcttgtaatcccagctacttgggaggctgaggcaggagaatcacttgaacctgggaggcggaagctgcagtgagctgaaattgcaccagcctgggtgacacagtgagactctgtctcaaaacaaaacamaacaacaacaacaaaaaaaaaaaaaaaagaaagaaagaaaaaaagaaatccagatagactattatgtcttactgttctttttcattcataccaaatgggaaagaatttcctgtcaatgctggcagtctctggctatcatgtggcagcatccgggaaggacctttgaggccacgctctttccctcaggggacagtgaggtgcgttgtccatggcaccgatgggtttttctctgggtagcaggrggttccacaattccccagccccatttccttttaagtcattctggttatcatttcagttgaaagaattggagctacttttcacttgggagaacataataaaaatcacttattcagtactaaattaggatggacagcctttctcttgggaagaaaagcaataacagatcacaataatgagattgtgcaacaagctttgaaaatgcttatactacatttatatgaaacagtatttgcttacacttcagatatggctgtcgatttatggttcagagccatggagcaggtaataaatatgactgtgacaactttctgaaatcatttttattactttttaaaaataaaaatactatttgctgttcaattcctattaaactatagcttctaaaatactcaactttggattttcaaaatcaattctggaaggatgtagtccataatgctataattcatttttcaaagtacatagcatcactgatgcagtgtgytctaaaaacttgtgttccaagcatgataatgatttttagtccatatcattgatattgactttactaggtctcataaaatgcatttccaaaagtaattacatgttttgtaagatgaaactcaatatttaattttaaatttaaatagaacaaacatttaaaagtttatataaaaaaattggtgaaagaaaaagaatttcactatattatataattttgtatatcctgagaaagttatatttttctctttaactttctaaattctaacaaatgaggtccaaattacctacctttcagggatttttaagtattgtaatgtataaaatataacagagttggtagtagtaaagttattattatctaaatattaagggaagtctatggataaaataaaaataaaaacaacaaatacatacaatcagtttagttgggtacttagaygttaagtgggacagtgtgtaatgatgcaaagccaactatttagtagctggttataaagcacatttcttaaaataggaggggaaaccccttaaatacaagagaaccacgtaataaaaatgcaacagaaaagcagcttgatgatgtgcacattcaactcagtaacatgcttgtaaatacagagacctakgctgtcttttttcattttggggaacagattctaaatgatatctccaactacctcttaccccatccctggtaggatcacattacagatatccaccccggttttcaaagttgtgcagatagctaaccatgctcctagattcaccccagacctctgaattgtctaaccacatctgctttgctcttagtttccacatacagaactctagatttgttggacgtttgagggctttagcaacttcagcaagaaaaaactatagacatagaatagtctttcaagaataacaagatgagttaagtggcaaaggtgttcacttacgaagggacttatcaaaattttagtccaggtatgccttgctttcagctaactcaaatgtagagaatctaaaataatatatctattctttcaaaattaatttgtcgggcaagtgatatgtgacgtggaaacataagatgaagccctagcctagcagtccacagcctacagaaacagtcttaaagcctttttcattgtacagcactttctctccatcatttatttgtttkgyatctatctatctatctatctatctatctatctatctmtctatctatctattattctatctatccaaccatcctttatcatataccaccatggtagaatattttgatctcataaaatttacctttcccctaaaatagagatttaaaaagataaagaatacacacaaatgacatctccaactccctcctaccacatccctggagggatcacattacagatacccatgtgggtttccaaagttgtgtatatagctaaccatgctctcaagattcacccccccatctctgaattgtctaatcacatctactttgctcttagaacaaayggaagttctaatcatttctccctagtagatgatcttgcataccccttgggatatgagcaacccacattggagatcagtgcccccaaaggttataaagcatgtgaacagattaccatcagaaggcacagagatagaagcaactaactccctaggggaattggaaaaactttacagggagagtagatttataaacagggtctttgaaaaatgaggaggatacaaaacataatgtaggaggtgatgatgtgtgtgcatataagtagattatgcactgatcttctctaagggaataataaaaagccagactgactctaggactggacattaaacttggtagattaagaggaggaagagaaataattctattcccttggaaaagaggcatgaccctcggctgctcacattccatgcccaaggagggctgagatgctgcatctagtccaagaatgtatttgggtgaagcattagcaaaagtataaagaagtttgttttgcaaacaattttttactgctttcctagaagtgcttttacttttagactcttaagacaagctgagatttggatgtggaactagttaagagagaaaagaaggttcatggcttaactaggttggaggctagttggcctgcctctaactttgtcttgcagagacttcatggggcttggagtaaaggcattattaaaaaaagactatgccctcctgattctgtttgctgggcacacccttcctcagagacctcagaatgcatggtgggagggtgggagggcaggagggataggacagaacttagttattgaggatctcatttcagataagactacttatgacagaagtttggactgggtaaaatgtcaacacaaacatgggttgtggattggcacactcaggtgaggaatggcatagaatcagaaacacccacggaacagaagacatttaccaggaagatgggggaaaggcagagggaacagtggaattatgagataacaacctaacctctaaactcagggccaagcatatacagaacattttgtgaatttcaaaatgctgcccctgcagaaagacaattttttaaagaaatgcccactcaagattgacaaagtaaaaaaaaaaaggcacatcctttgggtggatgaatgagaaagagtcactccttcctttaggctaattcagtastgggccaggacccacagcttgagaaacaatgtaagtgagctttcagcccccattcaccctgcagtgcacaaactgcagaatcctacctggaggcctgcaccatccttaatttttttttttttaattcattgctcacttggaaggctacaatagccttgctatttcctttattgcattatgtagcctcctgcaacaaaaactgagctctttgccaacatggatcatcttgatattcctagaaaccaggaagtaaatgcaatatagaaatgcaatacagacctatgtccttgacttatgatggatcagcttatgatttttcagttttacagtggtgcaaaagctatatccattcagcagaaattgtacttttgagtactcatgtaaccattctgtttttcacttcagtaaattattcaaaaaattacatgagatattcaacacgtaattgtgaaataggctttgtgttagatgattttgcctaactgtaggctaatgtaagtgttttgtaggctaggctaagctatgatgttaggtaggttaggtgtattaaatgcattttcaatttatgatgtcctcaatttatgatgagtttaatgaaatgtaaccctataataagatgaggagcatctgtggattacagttcacagaaaagcaaatattctatcttcctaggaaaaatgttaagaaattatgcaatgttaaagtaatgactgtgtgaataaacacataaattgtgaagttaggtcagcagagtagtttcaagtgggaggaaatgttaatggcagaaatgtgaaaagatgaaaatcttttactaagttaaaaaactgaaattaaaattaatttatctgtacattgtaactcaaccacatgggttggctaactagatagaaatcttataatttgacctagcrctacataaatttaaaaaagttaacagtatcctgaaaataattttaaaataataattgtgtgaaaactggcattggaaataacatttgttgtttgcgtgaatgaaaagtttatttaaaggttgarggcagagtgaggtgctaagagtggcttattgaaatcaaagctctagagtaatctgcataataattatcctaatcattttcctaccagaaaaactgatgatgtgtagactttcccatgaccacatggcgagtcaggggaacaaggaatcatattcatgattcccagtcccagaccaccatttcattattcaagaagacctagatctaccactcatgggaggttagcccaaagctcacaaactaggtcgctgggtgaagtgcagcgaagttttctttgtttcaatttacaggatgaaataatgggcatggacctggtaaattgtacttgcaattattttcttaattataactgcagggtaatttccgcagatagggtgtataatatagaaagattttttccccctcacactaaggagtagggcaattgaaggtcttccatttctcctataaggtgttgctgagacatctgatattcctcacatatagcacttggtgatttttttgtactttacaacacctgcacatgacagccaaaagaaatggtggatttggaaaagaaaatgaattaaattggtttttgggtatcacatggacmaaaacaagcttttgggagtttttttsctatacttttcacttttcaatctaygggcttagtcttgtatatacaccatgaaatatgtttttctgcttgattgtttcctataaaagactgtaatgtaagaatgtgttatttgctccaatttttctccccatttacttgatcagtgtgagaaactattctcctctagcctcagataacatgttatctattaccatcacgtttaggtaaaacagagcctggaaacacattttattgatttcttatggaaataggaatatgagtgtctggaaaaaaaaaaagtactcacaaaacagagataaaaaccaaaaccagaactcagtctcacacctaatgaaagcagagaagaacagtaaagtggaagaacacaaccaggcataatgggaggaagaacmsaatgaaagataggcttgtaaaaaggaagagcaaattacygcgagcaacagagggaaggagaatttcctcaggcgaggattaaggagggaaaaggccasagagaaagaggccacamgaaagcamtgaaaagaatcaagcagggcgggggcsttttgctaggcttttcttttctgtctttttttttttattattatatttctttccttaacaacacatttgtgcttccagtggtaaaaggcagaggcagagaaaagataagatttctcacttcaaaattgtgcccacttttaatggtcctttttctctaacccatttggcacctaacaataatccatcaagagaggtgctgaatccttatgtcgataaatgtattttttccctctcttggaaagacatatgctactaattgttttatttcagaaagtacttttggcaatgctgattttatatccctaagtgccccctagtgacaaggtccaatttcaaaatctctttcacagtaattttgttctaacggtttcccttttcgtagtacaaatgtggctgtcgtagggacaaacaatccaactttcgatcaatttattttaattaggcagaaaggagggtttcttgagcasgtctaggacaccataataaattactgtttttctttatgaattaatttataattggaaaaattcacagtcccttagaataaaatcaggcctctccaaattacactattaacaaaataaactatttggactgtgagtagtcacattcccttctcctctgttaagttatatgaagactcagattcctgacatcgtttcttttaattcagtttgtgaaacaacaaaatagcagcacagacatgaagaatgacaggctatacttttccagttatgatttctcctgatcacttctgatattcctataattctagcatgaaacatagacactgcaagaataaatgttaaggcttaaatactgatttagcgactcgtgtgatatgggcatattatgtaatttctttgagcctcagttttatgtctgtaaaatgggaatactactactaataataaaaagattattgtagggattaaatgagatattacatgtcaagcttttagcagcatctctgcatatatttaggacttaataaatgatagttattaaaatgctcagcccaataatttatagaggccaaccttgggtcttttcttctctctttaaaatttggtggaaccgatcttaatactttgaagcagagtcacaatgacctttaaatagagtggggatgatatttacttcaaatcgatgctatttttagattctctttagatcctgagtactcaagagcttaactagaacattcaacaaatccagttctggtgtaccatatttagcaaattgtctatgaatttaaacatgcaaataggagatattataacttctctttgtatattgttttacacattaaaagatcctggaatatattttcctcattttattgatgaggaaactgaggcacagaggggttatatcaattggtttccatgggggaaggggcaagtctccaggggaggcatcaacatctgctggaggtgagggggaagctcttcctagctacgaaccttcttcttccactaggggcaggagaagcttaagatttgaacagttctgcccttgcagtccctgagccactaatattgatgtaagcatgttgaatttcttagccacttctgggatggaaacaaagttaggtactactgggctagtaactgattttgaatgagaatctaggtctattatatttatattcccatagctgcataaggagactcacttctaattctttattcagaatttttagcttcaaatatttgtgttttttctcacttgcactccctgtaccaccatagtcttacttccatcacctttttacagagctagttaaaaggaaaactgattagcatgaagttaaaacgatcggtatgccactggaattttctctctgatgtaatcagaaaaatagatctcagtctgtgccctaagagaggaggtccactgctctaggctttattaattttatttatttatttatttggtcagcatcaagtgcccaatgatgaatctattttcagagctctctaaaatttatacactgggtgtggagagggtatgctatattcatagaaagaagtccaccaattccaatgaacttgatacaaataagtactttgattgttctgaaaacctccagcaatgtgtgggtcatgaactgaatmtataatagttttccctgccatataaatttttattataatgctgtttggcctgtttaattatttaatttccattcacttgatttcaagtgtggttgagatgtcagagatcattagttgtttatcctcatagtgtcctagatagctggaacaatcgtttgtttctaaagcccatttcccgtctgcagttgcagctctttttgtactacatttgcttgcctcctccaccattccagattcaaatgatttatgtgattgcttctcagtctttctgggattgctgcaatttttagaygttatttcggttcaacctgtcacataaaaactgcagagaaaagtccaatctccctgagatagattgagtcaaagccagcaaagccgggtcatttgaacagccttggtgcaggtaaactagacactggtgaatgggcagagatggtgatcctgtcatggcaatatcaaacacagcatgaaagcaggagagagcacatattatgctttccgtattccagtcccccttgtgtgtatgtgagcatgtgtacgtgcatgtgkgtgtgcgtgtatatgcgtgtgtgggcattccgtggagcttacttcaagctcctaaaattccacattcaacaggcgcaatccccactctggtatcaamgtctccatggtggagaaacccactgaagtgtggattcactaaaatatgaatagttgacaatgctacctctttatgacattttstgcttaagtatccctttcaattacaactatttaataaaatggctgtctcctgtttccatagtcagtgagagatggtggctgagagagaaagacacagacagcacaatatatgttttggaggtaaaattgatagatagcccttaattgaaaatgcagactaaagaagagggaaagtgtccagtcctaagtttccagcagtagcaaggaggtgacacttactgaactgagrgattttggaagagggccaggggtgaggcaggtagcactaatggcatatcaataggcaggtggttacgtggctctcatgttctgaagataagcaagtgaagaagagacattggcttacaagagcagatayaatcactgtaggagggaaagaggatagattaaaaagcaaaaggccaagccaagaataatccagtgagtaaaattccaatagaagaacaaaactcaaagggatggaaaaggaacagtcagaaagggaagggggaatcctatttttctagaaggagaggataataagattaggacaggtcatgtcagatggacaataaagtgtcctctgaatttaacagcatggagatcaaccattcgcaagtgcaaatcagtggagtggctgggacagagccagactggggtgaacatggagaaaatagggtctggggggacaggaaagggtatagataactcttytgaaatgcatggctaaggaaaagagctgtatctggaaaaggatacaggattcaggaagatcatttactgactgatttattttttggtgggggagaatacagagcattgcaaatgctgacagaaagcatccagtagagaagaggttaaagatccagaagagaaagtgagtcwctcatcagggaggttcatgggaggacacggagagacaggacccacagcataggagggacgactcaccactgataggaggtgggtccactcctcccttgtaacaggagagaaggagaagacaatgagagcaaagcatattggtgtatacagatctggtgaagatatcagagatagatctcagcaggtgccttctattaacttctctggaacatgaaagtcatccactgaagaggagaagaagatggggttgggagattaaatttcaaactaggggagatatggaatggttacttcagagaactgacctaactaaagaagtaatttcagcatggtcaagcagtacttttaagcatttgtattaataacaacaatcaagtagttagaaatgatagcatatcacatataaatctgaaaagcattatctcccctcttatacttggtccctcctaagcatgctatattaaaaccaatcaatttaaatgtagttctttctctagtttgtagttctccaccacttaatatatcttttggctttgaaacagtgtgtattgagcagatgtttctttaagttgacaatccttaattggaaaaaggaaaaataaattgcataaagtgttaaatgagttccttgcgaggmtaggaggcagtcgttcattcaactgctccccctgtcctcttgtatctatctcttttccctacctatctcggttgctttcttattcctttagcacctgccacagtgctgggctcacargaagtattctggaatactggcattccattcttcygccatcatcaggagagttgaatcttcagtggcccttcaatcttgagacaggattgmagcaggttcttgtttttttggttctgttctgttctgttttttttttttcctttcctttgtcaaaaatactgaaactcagaattgaaaaccaaaggaatcacttgcgagtgctctcactctcgtcctgtgctcttctctctcacacatatagaaatatacctckatagttcaggtagggtttttgcactgtatatcaaggacttaaagaggaaagggggtcctgttgattctgcttaaatattttgttgcaatttgtaacaatctgtaactcggattcagtcatggaatctcaagtctttaatgttgaaaaggatcgtagagacagtttcatctcccctccagcctggactacactctattttatggatgacaaaacctacaatggttaagtgtgtgtcctgaggagcccattctgtaaaataatgaccttagagtttttatgaacatgacaaagaactctttcctaggaggaggccaggcatttacatgctcatttttctagaatggtgttctgcactcattattgcttaatgaatgctggataatttgaattcgttgttcatgatcctttactaaaaaaaataagcacagatctttggactaatggaatttgccaagtcatcatcaggctaagatctgggtcttagtataatttcccttctttcagttcagaattaaaatattatagataggtgggtgaagtaatgccagtaagtatggtaatacatttctgacacatggcatgcaatctgtgagggcattccttcacttggtcctgtactttgggcagtaatgaagtggaaaattaaattaaataagcttttattattctgtggctctgttgaaaagggtaccatcaaacactttaaataaaaaacatatcttctgaaacaaagcttctgagttctttggcattattgaactgtgaagaagccttcctctcatccactttatgactttcttttcttctgcttttacctttggtagaatcatatccatggtaaattatttggggttgcatcagaaatacacacttcatgagccttggaggtaaaaccasaaggcatagtttctaaattaaaccagcaaaagtaaaaaggtaatacttttgttttattgttttcacttatatctaaccctctaacctcagttttctgtgaaggcttataagtcttagactgcaatatttctaattctactaggttctttacttaaatataattgtatcatactcagaatcattctcctttataacatgtctgaagatacgtatttttttcatatgaagtaaatttatttaagatcacaaaatgatacttgacagctgaaagggagatctcatattcttaacttttagccctggggacttaagggaggtcactctcatggkctatgtttttttctcacttygacttccttcttttagactattacaattttagtgacatatgaaaaaaacagcctcctctccctgtgttcttgtctactgtaagtcattggccacacatgaatattacatgacttgaagtaattgtcagggtgaaatcaagacagttgttgtcttacagtcaactcaagtgatctgatgttccaccaggacagagacagggcaagtgcaatgggaggagtgtgaggtctgctgccctacagcctcgaacttgtatcctaactcctcctctacttcctgtggggctgtggatgaggaacgaaactgctctgaaccttgggtttctcatatacaacatgaagataataatgtcattgatatagagttgatctgaggattgaacgagagagagttcccatctctcatcgtactcaagaattagtacctatcattactgtgtattttggcatcagcagaaatgtctcaagggatgatgggaagccccatcttgatatctgattgggaatttcctgatcgggactgtttctaaggggctcaggacaccagctgcagaagctatagtcacttgcaggaattatggccatgagctgtctcaagggcagatgggtggggaaaggaaagagagggcggtgaatacactcagcagaccaccagcctctggtaggcagtggctgaggagtgacaggtctgctgaggccagggctcttggggtggggccaggtattcagatattgtaaaggctcctggtgatttctgatatgcagccaagcttgagaagccctggcatggagattaacaataaggaggacttgaagccacaggaagatttatctctgggtctttttgggtaattagtgacatggaagtctggcctggacaatgtagtaataaagtcaaaaaagaatgacaaaatagcaagcctataatcataygcattaatttatttaaattymtataataaaacaccactgaagtggctttcattttctcttggtgaakgcaggaattattttaacasagcasagagtgctcattggtgtaaacagacaagcttcaaacagttcatagaatcaggcacaccaatgccctgagtgcagggccgtgagyggaaggtaagggatgccgcccaggcagaatagaagagccagggccccatgaagaaaactttgagccattctcaggctggggaaaaaaacagacaagagcagcaccatgcagtaaatcacttgttgaggggccaagtcagggttagcagaatgaaggctgctagaatgaggaaatcccaccaggaaactagagtggctacccagaaygggtggaaattgaaaaggggagatcttttaagagaagaccatagaaataagttcagggagcctttgaacttgaattgctcagctgtctattgtatctatttattttacttaacaaggttccaaactctcagtctcaaggagactggaatataccagtgagtgagctgggcttctctctagagtgccaggcaatgagctagactcacggcttctgcttcccagtttctcctcttcaggagagttcccacaaggccagcaggtgctggccactggtgattcctgacaattccctgcacactggatccgaagtttagattgcttgccttctactgtcaagaccacckttgcctttgccctttgcaacatggaagcaagctcctcctcttttggtgcacaggcccacatgtatctagttgtgctttggtccatgcaagcctttctacatgatactggggaaaggggaggcrtgcatctgcccagactctgatgccactagtatgctcccaagtccataaactgacaaatacataagtacattcctatttgttaattataatttatgtactgttgacccttgaacaatayagggtttaggggggagccaacccccctgtgccatcaaaaatctgagtataacttttgactcccccaaaatttaactactgatagcctatcgtagactaaaagccttactgataatgtagtcgattaacatatattttaatgttatatatgttatatactgtrtttttgcaataaagtaagctagagaaaagaaaatatttttaagaaaatcataagaaagagaaaatatgttcactattcattaagtggaagtggatctcataaagatcttcatccttgtcttcacattgaataggtagaggaggagaggaagagaaggagttggtcttgctatctcaggggtggacgaggcagaggaaaattcacatataattggatccatacagtttaaacccatgttgttcccagggttaactgtagttccttacagtttacagagcactttggcatggaaatggaaactmtaaacaaacaaacaaaaaagacaaatgcctgcagttcagcaaggtagaacaagttttcccaaatcacacagacaggatgtagtgaacttakaactctactccaggtgatatatttccaagttcagagtccaaaataaaacaaaaggtacagtaattataagtcaatttaattytcaatagttttggacatgcggctaaaaattatakctagtggccatctgtcaacaaatgtraactatgaaactggatattaaattatatctaatttaatacactgtacataggatctaattttacatactgtggcctaacagtgtgcaaaatgttaggctacccctgtagygtacagtgtcacctctgtcatatacctctgtcaaactggtgcagtggagtcctgccttccagatctaattctttcattactgtatgagcttgggtagggccactcaaactctgtcatttatgaaataaaggattatatgattcaactagtaatgactttcatgacacatgcagtgtatccaatagcaacaagtgaagtggtatccatagtttctcattccatgaacttgtgtggtgcataatatttgccaagtctgtgcatgtaatagcaatagctagttttcagagcatgttacacgcgctgaatatactgtccatttcagagccctttacgcacaacattggcagattcatgaattattatgttatttacctttctactattgagtgaacagttgttaatttaaatattcttttataatttgattgatcatttggcatgaaaaaattaggaaaaataattaaacaaacaagaaagccaaagcttgagcccgaggccctgatccatgacatgaaattcaaatacacttatgagtatctgagcatattttactcttctaacaacttctaaagatttaattcaagaaaggrctccttgacttaaaaaaattagcaaagagccttactcaaggtactgtgcaattaatatcattattgagaatttccctagttgcttctctcttttgcatatattagcagcaggtgttgttttgtatttaacttattatacacattttgttatgtcacagaaaatcaaaaatttcattttaaagttctaattacctagaatttcctagatgatcatttatttcttgaaaattaatgtcttgacacagtgcctttcaaataatattaatgtagaaaatgtaaactaatttgaatttaataaattgattgccaactctttcttttatgtaaaagtaggttgggcacacctttggtaacatcaamcctttggaaaagttggtaaataaaatttaagttcaattgtattaatgaaattaaaaagctatgattgtggtattatcataaataaaatatgtgagtgcaacaaatattaaataacaagattcaagaactctgcaaccaggccctcattcacaagcctacaagaacatgtgcacttcattaaagtcaatggagtgtaccagttcatcttggcattactcataatcgaaacatttcaattttagttaacacacacacacacaaaactaatttaaaagtcaaatgagtaaattagttmtatgctcctatgttccaattccatgttgatatcaactagctgaatttagcctcaggaggtatgaaaaaatatctaatacaatgaatggaaaaccttttaaagaattacagatctgaggctgaggcaggagaatggcgtgaacccgggaggcggagcttgcagtgagccgagatcccsccmctgcactccagcctgggcgacagagcgagactctgtctcaaaaaaaaaaaaaaaaaaaaaaaaaaaaaaaaaaaaaaaagaattacagatctgttaaaacgaatgtttttgcaactaactcaacaaacatatattttatattgtaagagcccctcaaactgctccattagaaaacagccaagcttaactacagatttacttctrgattttgaaagcagcgaatcaaaaactggaggatttatataagaaataaagtccacctcctgaaaaaaaacatttaaattgaacagtgattgattgaaaaatattttctgtgtacacattcccccagaaaagggggaatttttctggtttacatctggtagatttctcaattgtagtaaacactattcacaacacattctagacattttcttgacctttatttctgtgatactcttctttttttgctttcccagtttttgtcattcttttagggtctctctcttttctattgtctcttttttgcttatttctttatcaatccttagtgggggtcaccaaggactctgccctgcattccttactcattcatttctacatttttagtcttttgactccacctatgaagttaatgatttacttcatgaatactygtttccatttgagcctcttcctaaaactaggttttagttatggtcatttgcagatatctaatgtgatcccaaagctcaaaaaagaagtattaaaattcctagagttttctgctaagatattcttgtagctggtgcattctggctgtgctgcaagctcaacggcctggaatttcatgccccatgattagacatcctggcacatttctccaatttttcagtgtaaagaaacatactttttattttccgaagtttaaatgatcaccagagaggcakttgtgtgtgtgtgtgtgtgtgtgtgtgtgtgtgtgtgcaggcactacgcatccttcggagagtgtgaggggaagggacctgagaagaggaaagcaaatgctgcctggccagtgtagggcgtggaatcaaggaggggacactgactttgaactctgcacccagctcatccatctgcctgcccccagtcttgttgggagcatccagtcacacagacccctgcctctcctggcgactctgtgtggagggatacgtgctagcatatgtgtacatacttcctaatagcaggaaataatggcttgaaaaattcaaaagtcacagagagggttaygtaggggctyctatactccaatagactaggctgaccaaagggtagaggattccacacatggtttcaggccttcttttcctttatcactctgcatcatttctatgaattctttaaaaccctttttagtagaattctctgcttcttgtttctctgcartccatattacctgcctcagattgatggtgtctgtgagatttgggtccctcgcaaggtctcaatctaagtcctggatataatttcaagactttgcttcagccyaatcttgtgacacgtggccttctacaaacttcttcagtatatgcatgcacatgtacctgatgtggatcctaaattcaaacccacttggtgagcatccccctttctgtctcactattctacagacctcctgtcttgagaattctgaccctgctcatcccagccatgggctatcagtcaccacttataaatgtaagttactttttgggcactctaaacaaaagcattaattttggcttattatggctatatacacctcatgcttcttttgtaaggagtgtggcttggcttataagctgctgaaaggcagagcagtctgccttgctatcacccctgagcatraccagcatgctcaccaccgcctctttcctacctcactctacccgtttctctcctctcctgttaccttggcctagaacacgtggcttttacctgcctaaggatttcatctttgctgcttttcctgcacagagtgctcttctccactggttacatggctggatcccccttgatccaagtctgtgattagatgccacctgcacaggcaggcccctgttcctgtctttatagcactctgttgcttccctgcagaaaatctcacaaaatcaaaaactgtacgtttgtttacttgattaactctcccctcasacagtaagctcccggaggtcaggtacctggacgtttgctcaccactgtatatccagcgcctagcacaatatgggtcaataaacactaatcaaaggaaatagtgttagagctttcctaagctctaggttgtgttagmacattatcttaataaaggtgatgaggatgttttatatatctatacttacatcaatctctctttctatagttgtgtgtatgtatacatctatgatgacagatatagtatgcacrtatgatattaaagactttatttaaatactgatttacagtattgaatcactgtatgcaatacataatattattaggagagtttcataatttgccatcatcctctcactgcaaaggtgaggataaagaacasaaatcatatgttctgcctccctggaactgaagtccttgctgaaagacagtgaataatgctataaaatcacttgtgatataaagatcattatctaaagtcattatcatacatgggacattcaaacctcacactgagtttttytagtacttcaagcctgacaattttcaaaacactcaaatttctatttctactttatatttctcagaaaaaagagagtaaaccaaggagacactggaaaatttacggttaatcacaaattattgggatattaaatgcattttcaacataacgatatttctgacttatgatgggcttcttgggacataaccccatcataagtcaaagaacatcatattcacaaacagatctgtgcaaaaatgtccatagcagtcctattcataayagcctcaaactagaaacaatccaaatgtcaaaaacaagataatggataagtaatttgtaatgtagtcayacagtagaatatcacacatcaataaaaaaggagtgaatgwctgatatatgcaacaatctcaaaattattacggcatgtgaaaggggcctttacaaagtacatgctgtgtgattccatttatattaagtccaagaataggccaaactaaactatggtgaaatatgtaagaagtggtttcctgggaggtagagagaaggtagaagaagggtagggaggtaggtgatgaggttttgaattggaattgactggaaagggcaaagagaaaactatttagggtgtgggattcaayaccttattttgggtggstggtacacaggtgtatctaattctcaaaacttactggattgagagaatacttaagatctgggcattttattgyaaattatacatcaattttaaaattaagagattctattattttgtttaaaattgtattactgaacactgtktggaatatttccctactttctaggcatgtgaaacatttttagaattcttgtrttttataaatttatcaacttagtttatcaagtatgatgacaacattaatgcatccagtttccttagmttaagcctcaatttattgtgaagttcaaamacatawagaattacamaaaccaaaaccaaaaagccttgtccagaatcaagattaaaatttcagagatgaatgtcattgccacactatgccagcaaggggagtagttacactttgagaagagctccatctccatcaccgctgaattattctatggggcactttaacaaggccccaaaaattgacttttgagtgttgtcatgatggaaatgacasatcattttaatgcaagagaaaaagattgaaaaccttgaccctttagattactccgaacctcaatgagaaggagaaaaatacttgctgatcagcttattagaatattatgttcatgtaattctggtaccaggaaaatatttaagagaatagctaaattaactgcagggtgccactttttctttgctaattattttcatacaagaataatcatatacagccctttccctacaaaagaaaaaaacccaacaacttcacagtttatttttatacatgtgagaaggacagccccagtgtgtgcagaaggtacaaactgttggaaaatcgaggcttggtctgacagtagataaggctggcaaacagtactttttctttcccctgcaggataagggcttttcagttgagattgttaggctacaaatctgaagatttatgctgaattttaaaaaatatcatcatgttcatcaattcttataagatttgtaaggcttaattctcacaaaagcttaggaaggctgcagaaaagtctctaactatcctttcctaccaactttggtaatcctggatttacagaaaagaatgttcaggctgacggtgggaaacatgcccccaggcaagcaggagagagagcaggagaatgggcctgccagatatggacacttatgagatgggtaccggccctctttaccctctaaccttcgtgacaaccacacccttgattctaacaccatagcaccttcttctcaatttgtctcattctccggagaaactgagtgcagaggagctagcaatgtgtgccccagaaaataccctgagccacgccctgtgctgggctggagtcttgacctatgtttgggaactgtatctccgcaatctgcagtgcttgtgaatacgatgtacctccctccctttgccaaatgagggcaaagacactgagtataggtaaacaatagtccatttcaggacccgtgcccaggagaacatgcctaccaaatgcaaagctmtakggcaccaagtgccggtttgtggacccacagtagcctgcaaggattaactctagctttaaaatcacacggcactgcagtttggcacaaaagcagccctctactccgagagagagtatgctatcaatatgtaaaaaggtrttatccttgaatatgtgtatccttttgctggtacataaaccctgcctcaagatattcttcatgaaattccaaggaacatttctcagttcaatgaccctaagaaatgatgttgaattactctccacttacaaaatagaggaaaagcattttctttcagttcctgtaaatggaggcctakagacgtaaaggagtcagagtcaraagagtcaagttttagattctgctttgaactatatcgagatctccaaatcggagatgctagtctgggttatattcttgccgtcaaggacgcacagaactggtccaaattgaccactgtttcactacatggcaaaaaaaaaaaaaaaaaaaaaagagagaaaaacatgttaatgacatgccactgtacacctttccctaatgttggctttgccactgaatggatgtgagtcttgtgttctaagtgggaaataaactaaaagaccatattccaaggattactaaaatctgtgagatatgtaaaggatagamacaagagtgaaaaagmacatacacaaagaacccagaaatgggagacatgttgattacaggaggaaatataaggagggtgtaattagggtcaaagaaataaaatgaatagatgcttgtctttgcatttgtttttaatgagtggtgagttgctttcttgagcaggcaactgggtacaamccaggcagaaataaaatgggagttgtagagggcactggcgggggtgggtgtctggcatgacactaggagattaaagcaccttggagaaaggactgatgtgcatttgtagaatgggagagagtaccctgtctgaaaccatattaggagacacattacttggtgcttcctaccctgggaaaggcagggctgcacttcagtgtggttcatgctgtgtagggaagtcccacctgtggggttgagggtagtaatgtgccatggggcaatctccacattagcaggttaccacagtggaccgaaagaaatgtacaggaagcaaggtgcttggaagtgaatttcacgtgattcatgttggaagtcacagaagagtgggctttgggagccaaggctgagaagagagaagaaaatactctcggtctctcaacccmtaatgagtctttggagctgtcttttcacaggtgcctggaattttgtccaattggataggtttttccagatgtttcaaatgttattcatgggagatgtttayattcattatctccaaagatcttgactaggagctagcaccttgcatttgatatatttaatgaatagccattgactgagggaatcaaccatgctcccaaatgaggaatgtgtcttatattaattaaaataggagtcaataacrtgcaagatatagcctatatttcctttattactgccatttggcaaattgaggacgaaagctctaacaattcaaatctctctcggaggtaagtttagtaactatcaagatagatcttggcagctctctcttggggtccccaaggctcaytaaacattttaagaggacnctgaacattttcctagtggatggtgagataactcacttccaagtgtgggaggaagtgcaatcttgcctgttgcaaccagcaaattctggaatgaggtttagacttggtgctaaaggtgtgaggggcaggtagcatgcagtctggctcctttttattaatagttagctgaaacttyacctttctatttcagaggaggtggacagcttttttactaccttatgtgmtagggaagaatgaaagttcaagtgaaaggggaggctgggaataggctgcagttgggatgtgagacaagggtgggaggtgagagggtaggagggtcaggcaggggtctggctggccactgtcctaaatctgagcagtagcgtcagggctggaggttagctgatggtgacagcatataaccttggaggcatctggctgctcagccctttgcacaagccactcacttacttgacaacaacaagtcacaggatcacaggctgcggactctgaatagaaagggcgccattctgtcaaactaatgctgaggccggagaacagggcctctaaacttctgagatctgcactggccaacgtttccaattgtcccctcaatggcacttgctctcagccactagtatacctgctttgatctaccccaaccccagaccatcaactcattccttttgattgctccagagtacacaggtgtggctgtacctgcaaactcatgttttcaggatgggcttttaattccgctcaaaaatatttttccatgtctctttcttgtcttgcttccccattgcagaattttttcctctttccccagagataagctcttactcacagaagacagtaacccagtggttcctatctatagagcacacatggtggataccatatctttaatgctctcagtaacccgtgtaagctatgtgctgttgtccttattttatttgattttttagagatagggtctcactgtgttgcacagagtggactgcagtggctgcttacaggtacaataatcatcacacactacaatcttgaactcttggcctcaagcaatccccctactttagcctcctgagtagctgggatgataggcacatgcccctatgcccagcttgtccctgttttataaacaagagctcagtgaggtcacccagcatgtgttctggccaagtgcattgtagtttataaaatgcctccacatgtgttatgaagttctctgacctatgaattgcatgttattattatctccatttcacagatggtaaaatggaaatttagaggggttatgtgacctacccatgttgcattgttcatgggtggctgaactgagtttcgaacttgtgtcctcgtattctacatcccatgcttgttcacagtatagtggcaagaaaatggaagctttcaggcataaactctctcaaatttctttatatccatctttaaactcatcttagyttttccccactcatccttttctcctgtctcaggaagaarttgattctattgtgtgttcctaaaagttctctcctgtgcccttgaataatcttattcatttccatttcttcacatttcaactctttatgcaaaagactctcaaatctttctttctctaaactccaattattgttttcgaccacttaaagggtatcttttcttggkaatatacctttatgtatagaccatacactactcccacattccctcagctctatacaactaactctaagtctacgttgttttacttgggcaatacatgtgctytgatgtctccatgctyttgcttgtactgcctgaaatgctgcccttccctttctctacttgcagaaattccattcattctttaaagaatcagttcaagcrtgataactgtkactgaatattctcccaactcttcctgttagatttaacagtgtattctgtgcattcccaaagcactttgttttttgggataacacattgcttatcacatgagaaaatcacttgtctccatctctgtctcaacttatgggctaccagtaaagtgaagacaaaaagggaattttatttatctctacatcccttgatgcaataagcatggcccttggctaagtgtttattgaatgaataaaggaataaatggatgcatggtgactcagttactattccaatttttcaatatacccctaggagggcatggtctgattttgtctttttccctcacctcaaatctttgctattgccctaggaatctgacttgcttgctttgcaaaaatgttgagttttaaatgaaaacaaatgttacctgccatgtgagatcatgaaaaagaaaatggaataatatatcatttttttcttgtaaagtaaacatactactgtcatctaggtgatcaacattacagatatgcatcccaaaattagaatttatatttataaatttttaagataataggaattgatcatcttctattactaaatgcttccatccacatgttacacaatagcaaacctcattagattagaataattagtttggaaaggaggagaggaagatctakcctgaattatggaagtcagaatttattgaaagcaacattgttttattactttcaatactattacctgccaataaagtctaaggggatatctacttcatgatcttaataatctttattttacagctgaatctttttgcctaaagaccactgtatgccaaagccatgaaaacaatgtattctttttacatgggtcacaaatattccatttcacttagcaaatccattccttgcagaaaattcaaagctaaatttcagcttagtctagatcaaattctcaagaattctgtattagcagtatctgaattaatgaggtkttactctattcatagaggaagacactttaaacaatagactacagtgcaatgtgccaggaaagtgttaagtacttttaaaataaaaatagaaaaatatgtaaactttttcatataaggaaaacaccatcctatatataactgaaatcagtcttcagagcctttagtttcctttgtaaatcccttgaggacaaggatcgtggtttgcttgctttttctccccaccctccaagactttacgcactccaaaaatgccacctaggcagtgcttcctagggatggctatcatcagcagaacaggtgcttaaaagccacactctgaggttttcagatattctagttgttgctctgcttatctataactacccaagattcaaacattatgaggaagttactcactgattctgggtacaggccgcaagtacttcactggtccccatcctgaaaaagaagaggaaagaaattcatatattaccatcacatccaaagacatttataaaactttctacacaaagatgcctcaaagcctctcatattttatttgtaacaaggaaaatgatgggaarggagagggkcatgaaataaaatgtgtcatcccctgtgtttctggcctgattaagcttggtgtcacttattakgaaacctggcattaccaygaaaatttggtatakaaaagcctgggctttgagcctgtactctttatggcagggaaatggagccagggactggggggtgggtagcattggaaaatgaccatcacaaggaagacaatttcctttgattctcagcattccatcccataacagatcaatgtgctaatatacaataatattttcatttattaataaaatctttgtgtaaaattgagtactygggctckatgtctttgggtgaaattgagatagagatgccatgtacagctcctggcattattagtgacccactattggatgccttagtttgggaagcttggaagagtaaatgaacasaaagctaggataaaaaagagggctctgaggcaagcaaccccacggatatttaaattatccagaacgaatgaaagtttattctgtagtaaacagctataagaaagaaatcttaaggttttccttgaacgggtgatttttcatggtgattaccaagggcatctttctgccagatgaagttggcctactgtaacatagtatatttcttctggcctagtcacctatggggagagaagagcctcagttccttctgagaacaatcttasagagcagtaagaatgtaattatatgactacttagtttttggctttttgggtyacatggttccatttctttcctttaamacattatatatatatatgtatatatataatatgtataatacmacatattataacatatatactatatgtcataccatatattttatataatatataactataatgaaatatatattatataatacacttacatatattatatattaatatatattctattstgtattttataaatatataggtaatgttttgctctctgcaygccttttaaaaaatatctttcaacatatgttgactaaaacttgaatgagtactaaaggatggtgtggcttaagcaatggtaggattaattgtctgtcctgctagccygcctcatttaaatcacctagtctcagtgtgactcatttataatattgctttgctaaccctaattgagataaaaatcttaktggtacttgtcttttaagttattttttagcaaatttcacrtgtgccaaaaaataccagtttacacttgcatcaatgatatgctattctgtttttagaatgatttaaagcatatatccaagggcatttttaattgtcttgttatgaacttcctggtgtaaggtactgsccattctacttgatttagtaatatctgcattttggaggcaggtatttatgagtcatatagctcatcagtaagtcacaggtccttcagtacaactgatccccaggggctggacctggatatgtaatgcattgctcccacccaatttattgtaattgcaactctatattyacctgttcacccaggtaatggtagcatgattaaggtcacactatcatggcttagtgataagaatattgtttagactagaacaaaatcttcctccacacaaaattgattatttmtagcatattatcattatttatgcaggctgtcactgaatcaaggaaggaagttaaattggtgtggaaaaactggttattcaaaaaatctgcttctttatatcctacaatattctggtaagttgcttattgattgtatgagagattgttctcatcaaatattgcttttaagctatctgacttataacaatcaagtcatttccttaaaaaatgtggacatgataggctctttcctccatctccatgatggctcaaatatgaaggttgtgcaaatctggcaatttcttaaggatgtctggagacctgatattagggcattacaatgagagtacactcaggtattggtaattcttccctggtctagtttgtccctccacacatcatggatggaagtatactagttagataaatgccgttctcccccactatagtaaacttattgaacactgggatgatccagtctggttcctctttttaacttctctgaacctagtttagtcttatgcatatatattgaattaacctaaatttctgaaagagctatttctgtaagcatcgattaaatgatagggaaataaatacamtttattttttatcttttgaattgtctcctaargaaaagtatcctctcccacatctcaataatagtaatatagtatatagctctttaaaggctttaactatatcttttaaatcattgttatttttctgtatatttgtacataataaatatgtaggatgttgggctcastccatacaatcaatatagactgactgactagctacaagatcatgtactgaatagctatgcatattcttccatggttaactgtgaaaataacttgaaaccccaacaatggggattgcttcacaaacagaaattaattgggtttggccagagccactaaaattaatgagtttaaacctcacatccagtatatctgttcttatattgtgtttagaagattgaaaaagaattaagacttaatttagataatcaaataaaataggatctttgcctttcattccataacttattctgatcatcgttttttgtggtgaagcatgtkttacctcttgaaacttggcataaacatcataataagtgaataggtctagagctttgatgaaaatttaattttttwaaaaattagcatttcactgatccttatcctgagggktggagagcttcacacascactgagccaggtagagctcacactcaagtgagagaacacaaatacaaccatggtgtacttttctcaaagaattcaaaataattcttctggccatgtgataaattaatttagttgtttgtcatcatccttatctaactgagaatacaaggatakgaaaaggttagagagcttcctaaggctatgtggcagtttgttgttaaagttgaaatagggttacatttggaatgccaaggctttattttcaataatgaatcaggatttgtttttccagctaaactttgtagatatttgatcatcaatatcctcttaattttacacacagatatttggatgcaaagaaaaaaataatcacagtgaagtttaggtcctttggttgctgggtttaaaagwttatcccaatattttcttttgaaagatwgatttggkctcaccttgccttttgttttatcttttcttttaaaatcgcctggatgcgccattattaaatgaataataaccacaataacagctaacatggattgaatgcttattaaatatcasacatgctgctgagtgcgttatgtgaaccttatctaatttagtatcataagaatcccatggaaatactaccaggatttctgcatatagaatatagccacatatttccagttctgcattttcttacataaactacacccataatcatcatgtatatttctcagtttctgtttcattaaagtagattgaaaaaggcacaaagcagaatccttttagatttaagtttttccccaatattttaccactatctagctcacatataattctatagcctttattttattttattttgtatttttttgagacagagtcttgctctgttgcccaagcaggaatgcagtggcgcgatctcggctcactgcaacctcctcccactgcaacctctgcctcctgggttcaagcgattctcctgcctcagcctcctgagtagctgggattacaggcatgtgccaccatgcccagctaatttttgtatttttagtggagatggattttcaccatgttggtcaggctagtctcaaactcttgaccttgtgatctgcctgcctcagcctcccaaagtgctgggattacagatgtgagccaccatgctcggcctatatagccttttatttttagtaactcaattttattgagtctttacaaaacattttaatagaaatagcagttctcttctacacacccatatatcattggtttacataattatcattgaataattatatgaactagcaaaactggcacagcacatstgggtacaaacaccactgacgcttggtccacayacatctccacaggagggatcaggagtttacaggcgggctagagggcatccggtactgaggtggctgtgaacatcagtcgataggatataatgagagaacggacagagttgcttaatcaggcaaatcacttaggaggccagtaaaagtaacttctttttttttttgagatggagtctcgctcagtcgcccaggctggagtgcagtagcacgatctcggctcacggcaagctctgccttccggkttcacgccgttctcctgcctcagcctcctgagtagctgggactacaggcgcccaccaccaggcccggctactttttttgtatttttagtacagaggtggkttcaccatgttagccaggatggtctcaatctcctgacctcgtgatccgcccgtctcagcctcccaaagtgctgggattacaggcgcgagccactgtgcctggccagtaaaagtaactyctattgtrttttatactytaactatgtatgcatttgataaaattcattactttgataaaattattaaaacgtttaaaatggaaggacaaggaggaagagcatgagtttaggtatcctacccaagattgcaaaactagtggtggaactagaatttgacgcctgaatttggcctccaagtctagaattcttttgctccctcccattatgcgttaggacagggatgattgtggtgggttgggtgtgctgctgcagaccagaaagggggctcaagacagttctcctggtcagcaggagaacagagcaaaagaagatagaagaaaccacamagtgattaaatagttttagaaaaaagacaattcttgcaaaagaagagcactctgattctgttttccttgagttaacccatgtatttcttgactttgtacctcactggktcaaaacaaaagggktttagcatacaaattttgctaatagaactggkttttctaactctaaaattgaggaaatcttgaaagggcatcgcgtctctccagcaaacagtaacaacacagaagaacccatgatgcamtggtcccatggggaaccaaggaaccaagggtgggataaagcttaaggaratttgtgaccaaaaatagcaactgtacttcaaatgaagtacagttgtctcttggtatctgtggcagattggttctggggcaccctgcamacaccaaaatctgtgaatactcaagtccttgatatatatcatgtgcatatcacctatgcacattctcccatatactttaaatcatctctggagtatttataacacctaatacaatataaatgctatgttcatagttgtgatatggtattgtttaggaaatgacaagaaaaaagagtctgcagttattgagtacagacrcaaccatgttttttcccccaaatattttaaatccacgtatgatggtatccatggatgcagaaaccgacatacatgaagggctgattgtaatttgaatctcatcatccacctttttmtaatctttgggtttcatatgttctatttccatcaagtccttctttaggtaatactatttaagcaccagttttgaagaacttcctagtcccctagaaaggattttgtagtagctgttttaaaatgcctgagaatagaatattatgttttcccattaggtattaatgatttcagtttatgttaaatgctttctccgttaatttccttggcacttcccaagttatttccttcaagaagaaaatttgaaaggtactcagatttmtatgacttcacaaggaattcataaaaaggtcaagctctcaaatggctatcccttcaataaaattatgttaaattgttcaaaatgtttgtacatgggtcatcacttttatggactttgaaaaatagctgtttagtttttaaccgatctggttataaaagtaattattgccatgatgtggttgagattgaaaactttctttttataaaatagaattcagcttaaatatctttttggaaggagattacaagccatggattaattatttgattaacatgrgtaaacaagtaaagagtatatgagtagatggcttgtttcatgatttaaagattgtaaaattagttaattaaaaggaaacacaagcttaaaagayggcgagatgcaagatcagtgtctgaaataagtgcttcttttcaggatgccctgcataaagccttgcctgtgcggaggcagcttcctgtgcactgccggctgccgggtgtgcttgtccatgtgccagaccccctgtgcaggagaatccagcactttagagcaygctttgtgtaaaatagagtgaaaatcgaatcatattcggggagtgtctgagagacaggactagctcaagaggcagcctctaaagtgagaatagcactgaaaaggggtggagggcctgatcccaggcctgattcttcagcgatctcatgggaaacccattcattcagcttctctgagccctcattccctcaccttcacctatacaatgctttaatgtccacttcagccttgagattctaggaaatagggcaaaaacaaacaaacaagctcttcattatcatgcaatcatcaagattttcctgtttatattgtatttaatagtccaccccacccccatcccataagtgttctcatatgtgttacttcatgtaattctcacaacagtttcccaagtatggtgggcttactggctggcatggtagcctgccttaatcttgccatactatttctctctctcaattatttcactctcacctatacttgattcagttccaaatatttatgcaatcttcgctttgacctctcctgaacttcaattctgcttcttcaaattctagcttccacatcagtgtcccattgttgcctcaagtgcagctggacttgaatgaaacttgtaatcctkgtmcccaaaccacccacccctctgaacttgcacaagtgtctattatatggacacttcttcctgccattccggcatgcagctttgacatatccccccaccatctcctctccccaacacttgcttccagccaccttttgatcctttctttmtatatctcataatcattctttttagcttttcagcgctgcagcattctggccaaggtccttagcacatcaaattacaactgtctgcaagctggtatccctggcttcagcatccattttcatcttaatttatccaatgaattgttttaaaaattgtttttcctatgctacactcctctccaaaaaccttgctttttcctttcactgttacaggatccagtataactgcattaaatacaatctctgcttccctgtgtaactcagaattctctacaaattctgaaagtcccctgaataggccacttctaatcccaagcttgaaacagccctcatccttctgtttgaaaaattcatatakattcttcaagatctaagatggtttcttctctcagtttcagagtggccatcctctgaactacascaggcattgctcgttgggaggaaggcaacrgcacasgcatgagcascatgccasgccaagccctttatatatacatgaactcatstgctcttaaccttaccacgcatgcatcatcactgtccctactttagaggagcaaatgtggctcagagaggttaataacttgtctaggtcacagatttgccaagtgctggacccaaatcttggtggtcgggccatakagtttgtgcttctaacctttacaccacacgatctatcaaagcttctgttgctctaaaaatccttttgtgccactggtctmtakcatttgcaagctcyttaagggaaggctctttgtctctgtgctctgtagcctgtgactggcacacagaaacaccccgtatgtgaagccttagaggtccagagatggagtttagcagtagaaacaagagcaaacccctgacagtgtctstgggctcaaaacacacagagacatacaccytccttcttgatctttcctmtactctgacaaaagtgctgactgcatatttcatagatcagaaaaagagtaatactactaataaaaatacccgatacatttccacatttcagaatgtgggccagataatgaagaaaggtctttgaacagtacagcctccstccttccctctcttccttcttttcttccttcttktgtcacttgctcaacaaacatttgttttatgcacaccctgtgccagaacaacgcacctcagggtttgttactaatggtttctamtgagctgctaaaagacagagccaagtgatattaggtgattaccaaaagcaacaaaaaaattgctaaaatgtattgtgagcataccaccaggtakacattaggcaagggcttggcagatattatctcacttaatccttattaaaactctatgagataaaaagattattatctccattttacatataaggtgagaaaggtgaaggtsatakgactcataagggacaagcaaggattctagtttgggtagtttgaaacgagagcctgcactcttaccctttacacttgacttccgccagaagtagatacagctttgcaacayaccasaggcatatttaaaattagtttcatatcctttgaaaatagctccatamacagtatcagggtacaacaggaatgcctccactatcatcacacactttacctgaaagcaggtgttcccagggctttattcaattcatttgtaaaattaaaaattagcaccaagcaatctccagaattcctcccagacacagaccttgtattattccasaaaggcagctgttggrcagtgagtgttcactaatcttggagtcagaatgaggtttctttgaatagcccagcacccttgctatcagttcstgtcaccgtggtttgtacctattacttccagtttgtcatctgctgtcctcaactgtstggtagacaatcacccaacccaaataatcacctggatatacagtggtstgtcctttaccccacccctttcatacacgcagttcaagatcaacrtctcagtttctgagttctttatcatcctgctctgtggttgcaggttttgctctttggatgtgagacttgcccttatgtccaatatttcctagttgcaggtcctggctgaagaggagctacttctgataaaatgatgcatctgatttggaaggatgtttgcgtcattccctcccttctctttttctcattttcaagattgctttgctcaccagcatgacacacatcaagctttttcttttgatctgaaataaagtctctttttgttttttatgmtatgggccttttstgggyaatctcattcattttgttggctctaatgacaactatattagcactggtgactcctaaatttctgaactgtatttcttacctgagctcaaataagaatgtgcccagagcacatggcctcaggttttccacgagcaccaaaacagagcctatctaaatatgaagtcctcctcttyccttycaaacatgctccggctcctgtgccgcctctcagggaatgtggcactcastcactcaaatcaggggccttggaattcctcttgcattcctccattacttacatgtcatmgataaccaagtcctgttcattccttcttcaaacatttctcaaatccacccactcccccatccgcactgctgcttccctgtttctaacctagataattgcagtagatatccaagaagcatcattgctttggtagctaacagtcatttcaaattkaagataaataaaatagaaatctccttttatcctcagccccccaaatggatcctcttgtgtctgctgtatctcagctaatagtattattcaccagcttgttctcagcttaaayctggagtcatcctttatctctgttttygtatccttccacatccactctatcagcatgtgctgtcagttttacttctaaaatccttcctaaatctgacagcatctcattatttctactgaaaccaccttggtctcggccacttcatttttctcctggtttactttaacagctttcttaaatgggctccctatctccacttttttcctaaaatcccacctgtgtcagagagcttaaaaaaaatttcattacctggcttaaaattgtccagtgtttatttttttctcaatgcaattataataaaatccaaactgcttcccacagtctataaggccccatgtaagctgcatgctgccacacgttcacctttgctcaccatgctccagccatgtcaactttctttcttcttcctcaacccaccaagcttgccctgcctcagggcctttgcactcttctctcagatctgctcaaggctgkttccttcatatcactcaggatttagctcaaatgcctcctcctcagagaagtcttcctctcccattctggctaatgtgatgcctgtctacaactcctcagaatttaattttatctcttctgatgggataattaccatagactgatgaatgtgtgtgttcttttttaactaaaaaattgaaagtggaaaaagttgaaagctttttttcttaaaatagaaaaatacaggcctactgaagcaggttatttaaaattagagaaaaatagtttaatatatctctttgagatgctgaattcaattcttttggctctacatacccagaaatgggatggctggatgataaagtagctctatttttaattttttgaggaatttccatatggttttctacaatggatgtactaatttacattatcaccaacagtgtattaggattcccttttctccacatccttgccaacacttgttttcttttctctttttgatgatagccattctgrtaagtgtgagctaatatgtcattgtggttttgatttgcatttccctgatgattagcggtgttgaatatattttcatatacctattggccatttgtatgcattcttttgagcagtgtttattcagggtctttgtccatttttaaatcatggtttttgttgttattttttgctatgaagttgtatgcatttcttatataattgcagcattattcaaaatagctaggatatggaaacaatctaaatgtctaccaacagataaatggataaagaaaatgtgagacgtgtgtttgtgtgtgtattccattgtttatgtgtgcacatatatacattttatatatgtatatgtattatatatgtgcacatataatatataatgcattatatataatgcatacataatggaatattatatagcctcaaaaaaagaagaaaatcctgccatttgtgatgacgtggatggacttggaggactttatgttcagtaaaataagccagaggcagaaagacaaattctacataatctcaattatacgtakaatctaaaattgttgaactcatagatataattatgcaagatgaataagttctagagctccaatgtagagcatggtgactatagttaaccacactgtattgtaaaatttaaaatttgctgagggtagatcataagtgttctcaacacacacacatgcaaaaggtaattatgtgaggtgatggatatgttaattagtgtgataatggtgattatttaacaatgtatgcaaatatcaaaacatcaaattgtacaccttagatatatataattttgtcaattatacctcaatgaatttggaaaaaaataaaaatatataaaatgctatatatatatctatattcatgtgccaaattcaaaagtacacaccctttttccgagtgtaacagtacgtatgatattatgaatgcagaccgaatacagacactggatgattcaggttggtgaaaagagagcaaggtgcatcagctcttccgatgggacatggaagaagcaagagtcctgcttcataggtaagtctcaaggctgaggataactggacttccacctctcctttatctccagttcaggaaagaaagaaggatggacaattaaaaaaagaaacaaatatctcttgcttgtctaaactgtctggaagacacaaactgatgtggcaatccaactagacctctgggaatacaatgtaacctagaattaaataacgtaacctagaattacattacagggtttctatagaaggaaatacagaggcacaggtgctgtgttttgtttttgtttcccaacattttgttaagataattttcaaacatgctgaaaagttgaaaagcttcatttcttaagatcatatttctcccacttcaggcaaagccaagcaacatcaaaacttcctacctgcctaagaccagtatattctaaatctctaagtgcctgggaccaaggactgggccacgacatgatttttgacattttggttacctttttagtgtgcttatacctgcaatgagccaatcactcttgctagatagaaagagactattttttttaaaattttattttatggtaagaacgcaacatgagaactgcccttttaacagattttacatgtacgatacagtattgtgaactgtaggtatgatgctgtccagtggatctctagaacttatcaggggctgcagggaggaggaagtggggagttgctaaacagctgctatatttttgttggttgaaaaagctctgaactaaattttgtcttcaagtctccttacaccactgctgggaagaacatctacatgcttattgggcacatttgttttctgtcgtttagagaggtccttcatcaatgagtattgattattgtgtcacgtagtatattgctcatacaaattctgaagtcaaattgtttttaaaaatctaaattggtcacatcttagccttggcgtttacatttttttccagcaatatgaactgagtggtccctcatatctgccatcttcatagccaaacctgttacttttcacccagaaaagaaatcttcctttgacattttctcatgagtaacgataatgaatttgataatttactagtggaaagggtatgatgcctaacttacactgaactagatcctattgtgtttataccgggcacaactcagtggtctctgaaaagacaaacaaatgcctgggcatggtggctcacgcctgtaatctcagcactttcggaggccaaggcaggagcatcactggagctcaggagttcaagaccatcctgggcaacatagtgagaccttgtctttactaaaaataaaaaaaatttagctggatgtggtggcacacgcttgtgtgtccttgctactcaggaggctgaggcaggaggattacctgagcccaagaggtctaagctgcagtgagctgtgattctgccactggattccagcctgagcaactgagtgcagagagagaccctgtctcaaaagcaaaacaaaagaaaaaagasaaacaatgcaagctgattggagacacctgtttgcttatttttgccactaatcattatacgttatttaaaagcaagagatgattaaatccatctttcaggtcatttagttaagtttttttttttttaaatttttacaagctctcaaggtctttgactactgccaattctcaagccattcagataagaaagcattgctgccaagtatgtatattaaatkcttcttcagaagttcactgaaattcaaacattacaactataattaggataccaagaataggacattactggtactttaatgtgaaaccaggacctaatacacatatgttgggaagtgttatttaaagacttctgctatggggttatatttaaaaaattgattatctctctttttattctctctcttatgaaaatgacaagaattgttttttcttatgttttagataaacactagaaaagtaaattttaaaaatgaattcatgtcttactttaaaaaatattttgtacatttgcattgggttaaataaagaagataactttctgtccaggtgcagtggctcatgcctgtaatcccagcattttgggaggctgaggtgggcagatcacttgaagtcaggagtttgagaccagcctggccaacatggtgaaaccccgtctgtactaaaaatacaaaaattagctgcgtgtggtggcatgcgcctgtaatcccagctgcttgggagactgaggcaggagaatcacttgaactcgggaggtgaaggttgcagtgagctgagatcatgctccagtctgggtgatagagctagactcagtttcaaaaaaaaaagaacttccagcaagggcttcagttctgcagtgtccactatggtagctgctggccacatgtggctgttgagaacttgctatgtgactagcacaactcagaaactgaatttttaattttaattaattaaaatgttactttaaaatctgaagtagtgtaaagtgtttttttcattaaccataactttattgtttccatagactacatttttcttcaatgattgcatcatgtaatctactattttctattataatacacatgttcagcctatctatcatttctagcatctaatgaataatttcttatattgatagcatgctgcaataatactttcaatatcctggcttaaataatatatcattaaattaatttcccctattgcattttgctttttgaaatgcagcttttcaaaatgtaatttatatatatggcttacattgtatttttattggatattgctgatccagaagaaagcgacagagtaaaaaacaacagcaacaacaaaaaatacaccaacaagtaaataatgatgaaatctggagagtcttacaaatttacttgttctttctgcctaagttaaaaccttgtaaagtaccacatgatccagcaattctatttctggggtatataccaaaaaaatggaaagcagggtctgaagagatatatttgtacacccatgttcacagcagcataattcaaaatagtcaagaggtggaagcaactcaagtgcccattgttgcatgaatggataaataaaatgcaatatatacatacaattgaatcagtcttaaaaaggaaggaaattctggcacatactacaacatggatgaaatttgatgttatgaaattagctagtcacaaaaccacaaatattgtatgattctacttatataaattacccagagtagtcaaatttattgagacagacagtgaaatcgtgcttgccagggacagagggatggaagaatggggagttactgtttaaggaatacagagtttcagttgtgcaagatgaaaagatttctgtgaatgggtggtggggacagttgcacaacaatgtgaatgtacttaatgccactgaacatttttaacacataaacatggttaaaatggtaagttttatgtgtattttataattttaaaaaataaataaataatttttaaaaatcatatagctatattgctcctattgctgcagaaagatatagtccatttcaagttaccatgaaggttaaggaaaaatattaaatttaatgtacttcatatttgcttwtctatatgtcctgggatgmacatttttaaatggcaagaaagctagcagattaggtaagaaaaatggccagagaaaacaagataaaagtkcattaaataaagtcaggttttgaatgtagtgttttgtttgtctctggatatcagtgaaacagagaactattcgttttcagagaaggcttggtaaaattgcatttcggggactttttggaggaggaaaggactatatctgactgacaagtacagattgtttctatacagtgtgaaatgtattagagatttatagtcatactaataactaggccatagtaaaggtgtgtaaggaaatgaaggtaagctagggtagacggacatttgccaaggactcaaaatgtaatttatatatatggcttacattgtatttttattggatattgctaatctagaagaaagcaatgttggaaagatgttcaaagaaaggcatggggatcatcccaccctttaaatggtccaaatggaarccaagatactggatcacgtctargaaaatttaaatatgctagctacactcaataatgyagtaattcatggkcatctgtaactcctcagtgtgaattaattaatcagatcactcagctgcttctgaaagggacccctggttctggtgtcccccacaacaggtacctccctttgtgggtctctctgttttcccactaaagcttagcctttcttgraattcctccaactgccactcaagtcataacctcacttytggggtgartggacttgaggtgtttcatgtttccttagagtttcatggcttctctgttgtcctacgaatgctcttatctggggattttcagttaaataatcrgacaatgtatatgattgatttctatactgcatggctcaagtgacatacattcactttagaaggttttaagttgcacagtatacaagtatatcatttacagttgattaaaatgtkkgtggtcatttctatttaaaagaacaagttaggcatctgtttcttggttagaaataagcacctcatttttttaccctgtgkgaaaatcaggtatgacttaacactccttgcacaagccaggctgaggatctctgatattctatttctgtgtgcatttgtaatcctttgtttatacaaatgacactttcagctagtcaaaatatgcatttacctagaatgctcaattacaggtcatgtcacataagagtgtagttactgtcattattatattgactgatacagagatacacacacctaggttgccctttgatacaacttccacgataaattagttgatcattcaacacatacatatgagcctaatagcatgagcccaattttgtcaagacstgyttcgtctcatgctgccttgatgagatttgtcatctagctcttgaatattcatttttatttgagttactttctatttcaattgggaattatttgtgatttgtgtttgtaataccatatttaattgaagatgaaagtgtaaagtaatttttggctaacaccaactatgaaattattctccacttcctcttctgggtaaaagaaacacatacatgttgtttgtgaaagagtcaacacagatwaaagtttctctttttcagttacacaaggaggcaccctgtgaaatttattgtgatgcagctgaagataatayttctcccctgccacctaaagaaagcatgtttccagtctcaactgtgagcaaataaatcctgtttggtgtagtataatagcaatccaaattaaacatcaaatatgtggagggaatttcaggtagatgtgttcatatctgtactttgactatgtggtgtgacatggcaatttctccttcattagctacttagcatttcagatttgtctagtctgcatacacacactcctttaaatgcagtgttacacaataaaatttaaggtattttaaaaataatgtggcacagctgtgttgctatttaatctctatcataaattcgactggctggaaaatgaaatttgtttaaagataaaacctgtaggacttcttttaatgaacagcccaagtgtaagtcttccattttgaggaagggaaaacgcatctaagagacttcatttcattcaataataaatattgttccgaaaccataaacccagagaaaattggttgcttttaaaaatagacttcattaacatagttcagagagccaggtcttcaggaaagctgcttaaaaaagcaaacatgctggagatggattgcctgggaggccgaggcagaaaattggtagttcagaactacaggatggaaaaatgtgagactttgtttataccaacctgggccactgggcataagatcttaggaaaaaatattttgcttcttttttcagcaattccttggggtctgtgttaagccagatgtggatcacaggtctgggttcaagtctcaattctgccatctgctagctaacccaagtgaycttgaccaagtcacatagcagggcagtgcaaaatgaccaggctttgctatcacacagacctagatccaggggcacactggtcaatgtttaaaactgaatgaaccctggtttgtagtgtttgccaatctccatgtgtaaatactcccaccatggccaattttaagctacctgcatgacctcactgaatgcagagctgggaagagaggagcacaatcagttttctccagacagctttccagatattataagctggctccagcaagccacagcmtaggttccatttstggttccaccagttaataaatggggcctaaagcaagtaatttaaccttcccaatctcagctttccaatttttaaaatgttgaccataaacaaactttacatgttcatttaaaggctcaaatagaagatactgggcgcagagcctgaaaatagtggttcaataaacatcagttccccaacttaatggcctaaggattaagctcttctctctctatctctctctctctctccctccctccctctctctctcttttatatcttcttccttctcactctccttcctttcacatattccttgaaagaacaagtctgcatttgtcttatatttgctccccaaccccttgtcacttggttttcacttacagaattcctccagcataatttctctgtggtgatgagtagatatctccctgcaactccaatagatgttttcagtgcttattttacttgctcactctgtggcactggacaggtttgaccagtccctccttttaactttctgtctttcttggattcagagacagagaatgctgttgattctcacaggacagctttgatttatctttcctagggtctcggtctctgagttatcttactgtgttctttgttaatgttggggatgttctaaggattcagccttgccttgtctcttttctcactcctgactgcctttggagctcattcatatccagggcttcaactcttatccaggaaccaattacttaaaaggcaaatctgcatctctctgaagttctaggctctattgcccataacctaccacttatttgacattcttgacaaaattctgtccccatatcacacatgccacattataatcaacatagatacgacttaatttattattttctccaccaaacttgtctctctccccgtattccctacacaggttgcagtatacatctcttctctaaggtgggaaacctaagagttatcctcccgtaccttccatatccaaccaggtcagtttgatcttgtaaatgtatctggattccattttcttggcttcctctctaatgtcactgtcttagtaaagacacctcagaccttcatcctgttattcttgggtaattaaaatgatatgcttcctgatttccttgcctcccgtcaatttctcttccaatccatacttccgctgaggtttttagaaatctctctcctggagagatttttagaaaatgcagatggattctgtaattccttgtacttcattagctttcagcacttactgcatgaagtccaaactccatggaacggcatagatggtccttgttgattctagtgtgtgcctacattttggccacatctcccacctcttgtttatgactctgttccaggcttattaaatcactaagctttccctcaataggccatgccttttcccactaccttcatctctctggcaatgtctctttcattaactattaggtgtttcagatttgtttagtttgcataaacacactcctttggacagcgagcccttccccccccctttattttaacctggtaaactactccaattctttcttcaaggactgactcaagtctcgcctcttccaggaagccctccctgaaattcctcatgataccttgtacatcattctctaaaaggcactcttcacaccatgttgtaatcatgtgtacttgcttttctccctgaactgaatgtgagtgaattaagggtatttatcccacatcttattcacctttgcatctctgatgttaagaacaagtcctggaccattaaaatatttatcaaattgaaagtaccaacttataaatacctcagattccttctctgccccttttgtggtgcctgaagtgctgtcaagaaaatagcttttataagctacgaacaagttaggatgataagcattttaagcttgattctaactggaataatgattctcaaagtgagaatgaaacatgtagatattgcaaaataccaatgtccaaaataatgggcttttcaaggataatagtttgcttaaatgtatttgtcacaatgtcttctacctgctaacttcatatgtttaatgttggtcaccaataattaaaactatgacaaaataggtctttctcactcttgatttttaagtttttttttgatagtgtataggaactatgtcaaaaacactataaaaatagaaatagcctagagaaaaatcatgctaaatgtgctaaatattatttgcattcaataaatgtgacatataataaaatgaacatgttattcatgcacagatggaagattttattcagtatctacttaactattttttttatcctgaatgactgcatgttcaacgtgtgttaaaaagttttaaaatggaggtgccattgctgttgtagaacatttccaagcatcaacacactcagtcaaaaagtaagccgcaagggactgagtttgcaaagcagatgttctacatttgctaaatttccaataatgaatttcaccttttgagttgagaaaaaaaaaaaaaaaccattgttcctctctgtgggtagctttttgcaaatgatgtaaatgaacaaaccatttctaactttagggatgctctaatgtaataaatgaaaagtacgcaattgatttctccattctctggtccactagggctattctttccattatacttaactgaatttgaaagagttcttctttttggaaatgttggaatatagatttaacagatggtgttcccctagtttatgttagtaagcatcctaacatacctttttctaaacaataatttataatccacttttcttcacaagaattcctctttgcactttatgctgtgttgctttctaatatcgagaattccatggcccacaaagaggtctttcttctgatgagataaaggtacttcaaacaatgaagtttttacataaaatctatgaaatagctgatctttttaaaaattttcccggtaaagagaatcaagggaaaatagaaaattgatgacatcaggtatttgcctcctcatatgtatccacttatcattatatcaccatatattttataatattctttaccaagccaaatcgccaaatttagttttgatgtttctaaccatattctatgactatgacatagactttcaagcttagtstcaaggaggatataatttgaatgggttttcaaaaatgacaatgaatgataccaagtgatacatactctcttgtgaagttatttctggcttatgaaaaatagcrtcacacatgaatcaatagcccggactgcaatcagtgtagacggactctaaatagaagtcactaaatagactacaggacagttttattccatagtcctggcaccatcagctagacgctttactgagaaactcagtcgaaactaaattagtgtaatctttggaacatgattcactcagttatataatgaaatgaaagccacttaagttttgttgaccaccattatacatagtagagccatttcaattaagtgaaaatggcaatagaatcatagacacaaaattagaaaaaacgttggcaatgatttaaccaaactctttatgaatctcttgtcaacattcttttagggggtgcccaacccctgcacatgtttacaaacataatctcattctttccaatgctagagacgtttccttgttaggaagttatttcttaccctgaataaaaagttacttctgtgtagctttcatcttagtgcaagactctttaaacaaagaattaaccttaaccaaccaaaaaatgagggtcttggtaggtcccagttttaataggaatattctgtctaaaatattttctaatttttttgtttcaattattatacatttagtgcaataggatagggtagattgaaatggtccagaacctaatattggtctttcttagccaggagataaactcagctgtaaacaagagggtgcagggtatatagtaactggggaggcaggacatagaacctgaggaaaatgaactaagatgtaaaaaattccaagcaggaagtcagaaataggagttcccatgatgtttttggtatcttagccacacactttatctaaagaagtctacattcaggccagtaccacagactgattgtagtatttatgactatagtggcaaacagtatgttccaatcttgaaaactcagactattgttacaaatttagatttcctgatggcrtgatttgttgtcatttgaaatgattaggagccccctaacattcccmtagaatatgggctctatccattagttatccttaacctcaccctctcatagaaatcaggcaattgacaagctacaratcagatagggcaaattagtaaaaattccactagtaaagggatttttctcatagccctrgtgacctgtgttccctatcaaagatgctgttgccttaaagattttccatttgttgaaaagtgttttattaagcaagtaactgaacaaagcattaaagtgattagcactttgttttgaaaagaaacgttagcatggtgggggtgcaggaaagggtagggagtggagatgcctgagtccttgtcctgcctctgtctctaaccttggtgtcaccttgatcacaaataatttcagaagccatgactattgagggaacctaatgaggcatcagacttaacactttggccaacttagctttcttccaaactgtgcattttctttaactaagaaggtagtacayacagcattatggaaatagcatttagaagcaatttagaaattatttagaaataatttctcccccaaggagcaataatgaaggtaatcatacctgtgagggactcagacactttcttgccttcataattgtgtgtgtgtgtgtgtgtgtgtgtgtgtgtgtgtgttcatgatcaggctttaaaaggttcccagagaatgcaaacaataatatttaacaggaaattcatgcaggtattaagttgcccacttatctgaaatgaatgctaagattggaaaggacaaaagagacagaagcttatgctgtttatacacttttagattaagatggatctttgtcttctattgactatgctgactctttggaaacacacataatatcttattaccagacaggaaatgaaagctaaaagaagctagtggatgggagtgattggtagctcttgcttatcacaggagtagtgggttggtagaaacttgggaaggatggcgggcataggtacacatgccaaattagcgttctmtatgattgttggcaatttctgggcactgtgagctgcaacactgctcctatgcaaagatcgacttggtaaatgaaaatctatcttacctcacaactttaagctaaaaggcaagtcatggaaatatgaaaatgtaaaaacttaattttgtattagttagcaaatactgacccctactatgtgcaatggcattctgccaaagcatgattcacttctgaatccatatgaatttagaagtgaaggcattcttaaaattcctccaaaatataaagatgcttctcagttaacactgtcctgaaaagcatccactacatatacggttttaagaaataaaattgagattcatagtcatttgggaaagtaaactggttgtcaactatcacatcacaatgtstgtattttaatactgttggtygcaagacttacctttaaatagataatcatgaaaaaattaagcmacattcccatctcattttcttttgaatgtaatgattggatgaaaagggcataactgatgtgaaagtgagaaagctaaatgtatgaatttattttaattaaattaatatygatcagttcaaaaaccataaactattaattttagtgtgaatttttgaataataaattttaaaaaatttaaaggtggaaataaaatcaggaaataaagctggagcccattggacaaaatcttacctgaagttactttktgttctcttctcttctccactctccctgaaatgagaagtggaagataagttacagcatggagtcatgagaatatgatgaaaataagatgaaagcccagtttacagcaatttccaaacacaacctctacttcagccatgtccagtgtgctcctagagatgactgggctcagctgacaggcataagaactgcttacaaaccaatttatgaaagtaaaaaataaataactatgcattaawtgtgctgttggatttttaaaatcttgttagccagagtcgtttactcaacaataaacttacaaagggcaaatccccatagaaaccattatggggaaaacagctaaataagactatgccctcttacaacccacttgaaaaaatagaaaggacagacaatataatatgaagtgagatgtgcctcaaatagtgtagaatgtttaaagatatgagatgatgaaacagttattttaagaaaggagggggtgctcatgaagttatggagaaagtggtatttgattttgaccttgagatacaaatgggatttgagaaatttgaaatagagaaatgactgactcttggcaaaggaaacagtatgggctaaatggacagggtatttgcgcaagaagaacttgcacacttacagcagtgcataggaggaggactatcctagaggttagacacaaggcaatgaaagggtggactgagtcatggcagtgggagtggagaggagggaagtagtggatgcaagagaccggggggaggccgaaataatagggcccagtgatttataaaatgtgagttgccaggaaggagaagaagtcaagatgagtggttagctaggtgactttgggtatagagatgcaagttggggaaatggtattatagaatgtgatgaggctgggaataacaagttcagtgtyagacctactgactttgaagtactatggggacaaggagcttgtaagaggtcagaaaatttaactatcctaatatatacgcatctgacattggagcatccaggcttataaaacaaatactactagatctaagaaaagagatatagccatacaataatggtgggggacttcaacaggcactgacagcatcagacaaatcatcgaggcagaaaactaaccaagcaactgtggacttaaatgaacttttgaccaaatggacctaacagacatctactgaatagtccatccagcaaccacagaatgcacattcttctcatctgtgcacagaacattctctaagactgaccacgtgctcagtcataaagcaagtctcaataaattcaaaaaaatctgagttgaaattacagatgcaagaaatgttcatcataagatggctgaagctgaaggagtgaatggggcataaaggcagacagcacagaggagtgggtggaggacaataactaagataacatgactgctgcttttgttttgtgatgtaggcccacgggaagtcagaagcagctgagatctggggacctcaacaaagtgcaggctccggtaccacaaatcaagttttagaagtatgggggttttcaacagcatgttgctactgcttgctgagttcacatgattgttgctagattgtgagagagtagttttagcagagagtgggcagagaacacaagagagactgcgagggtttgggaagtaagtgtgtgatgagaaagtggagctgaggacatggcttcttgtttatcaactttggcagcctccaaatgagttgaataagtgaaatggggtaatagcttgactagaagccaactaaaggtttttgctaagttatggaaatcctaagcatgcttatagacttaggtaagaaactgtgtacctgggcaatggtgtgtatgaacaccacggtggaggtgaggaccgtggtttgggataagtgaagaccatccttccagctgtcacttttttttgtcatctatcaacattccacagctggagctagttactgagaagttaggccacaygttgaagctacatgtaaactttatccaagcttttctaacagcccttcgagtcttttaaaatcctaacatataaggtggaaaatgtacaatcttcccttatgtcgctgccaaaagtgtagaattcatttaactggcaccttgattaatggcatgttatattcatttgggtgatttccagaggacttgtttgatgcaatttatttcaatgattccaacagataaatagcatgaataatccatttaaaggcctcattcattaygaagtgtgacagggtaccttctcatttaagttttccactgggcaagccactgcttactgttggattattcacttatgaatactagaggcctcggacattttcataaattttaaaaaatggtattcaaggcttgaattgtaaaatatgtaaacaaaaacaactttttggagtgtctttaacctatattagaataagtcactaattctgaaagttggaagtgtatgtatttgagataaataatatggtgtagtgatcaaggtrtcccaaatgattcccatcttctcttcttttgatattcacgtsctgtgtaatcccactgaattagattgactgtgtaatcaaggattttgtgggaataatatagtgtgattttgaggttgatccttaagaaaattgtggcttccagtttgggtgtggtggctcatgcttgtaatccctatgctttgggaggctgaggcaggaggatcacttgaggccagcagtttcagaccagcctgtgcaacaaaatgagaccaccatctctaaattgtktttttaaagattagccaggcatggtggcacacatctgtcacctccctaattagttgggaggctgaggcaggaggatcacttaaaccaaggagtttgaggttaccatgaactatgactgcaccacagcactctakcctgaacaacaaagcaggaccccatctcaaaaaacaaagacaaaaaactatggcttcaatattcctttcttttggatcactccctctgggggatgccggataatatgttgtgaggacactcaagcaggcctatggagaggtccatgtggcatggaactgaggcctcctgtcaactgccaatgaggaacaaaggcctgccagcagcccccaccaacttgctaggcayatgagcaatccatttaccagccccagtcaagccttcagctgacagcagctctgggcaacatgttgactgtaatyttgagaaagccaaaaccagaaccatccagttggctattccagagtcccctacagaaaccatgtgagctgataagtttattgttgtttttagctgctaaatcctgagataagtgttaaatatatgtttcaaaagtctgtaataatttatcatttaatatactatacctacagtaatgctaattgcaggcatatcaatcagtctccctgattttcttatttttaaagtggggatcagggtctgcttctctggaatgctatgaggatgaaacaattccatatggtaaagctagcaagaaatggacaaaattcacatgaaatattggcatctcatgtttcagaagggaggctgaaaggtgcaacttttttttatgaatacctcaaataattttttttatgaagacctcgaacaattctcagcccctatgttatatgaaagggctttgtaaattgtagagtgctatataaattccacctattagttttatcatgaattagtcctgttacaggaatctacttagatttcttagttatatatatgtatgtgtgtatatataggtgtgtgtgtatatatatatgtgtatatatakgtgtatatatgtatatatgtgtgtrtatatatgtatatatgtgtgtatatatatttatacatgcacacacatacacacaaaacatcaaattagaaaaataaaaattacatggtaggacagtactatattgatccatggacacagagattgaactgtttagatggagacgaccctctaggcttccttctttagtatctttatctcagtctgaataggtgatcttatctctcattctctcaatgttcactttcccccaaagagacaactgtgacactacatctctagctccaaaatctacttaggttttaaagcctcttggaaatctctacttgtgtcctccactgcacttcaacacatgtttttaacttaaataattatagtcccartttctctaatgaccagtgatgatgagcttaatgtggcacatatacaccatggaatactatgcagccataaaaaagaatgagttcatgtcctttgcagggacatggatgaagctagaaaccatcgtcctcagcgaactaacacaggaacagaaaaccatacacctcatattcttactcaccagtgggagttgaacaatgagaacacaaggacacagggaggggaacatcacacactggaccctgttgggggtgaggggaaagggaagggagagcattatgtcaaatacctagtgcatgcagggcttaaaacctagatgacaggttgataggtgcagcaaaccatcatggcacaggtattcctatgtaacaaacctgcatgttcagcacatgtatcccagaacttaaagtaaagaagaagaagaaaagaagaagaagaagaggaggaggaagaagaggaagaagaagaagaagaagaagaagaagaagaagaagaagaagaagaagaagaagaagaagaagaagaacaagaagaggaggaagaggaagaagaagaagaagaagaagaagaagaagaagaagaagaaggagaaggagaaggagaaggagaaggagaaggagaaggagaaggagaaggagaaggagaaggagaagatttcattaaaaaaaaaaaagcaataattatagtcccctacaaaactgctcatccttggtgtctgctcaggcacccaaacataaaacctaggaaccaccgtcttctttcttttgctccttcttcccatctaatctgtccctcagtccaatacattcccctccatcaggactttgagacatatcttctcctttctcactgccatcaccctagttcatgaactttatatctgttcctggggttatctattttctatgggctcctaacttgtttgttggttttttctgtcattgtaatccaatcactcctaaacagcaaactctacatttcttaatataaaatttatgaccttggacaatttggccataactttccttctgctgtcactcctcaagcatcacagagaggagttagccattacaccaggaattacaccttcaccccagttccccattcatgctgtttctgcttcctagaatgtcctgtcacacggctcctgcctatcaaaaccctattcagcttttagagctcagctcagctgccagtcctctgtgaagtcttttcttttgtgccagctccccaaactctccatgccctgcagagtgaagcacccttcttctgtgcttctgtaacctttcatttactcctttgccatagcactaattcttattttggttcacaattagttgtgtgtttgttttcctgactggatggtggcttccttcaggacaagtcgagagtcccatatcgttctctctcctgatgtctagcaccgtgccttaaacacaaatgctccaactcactctgaaatgctggagaacatgaagtcaattttagtactgctaaaatgcagtgaaagtacamccaagaatagagcttttagcaggtatgtatattacaactgacaaccaagaaaactattatattagaaaagtgggtgataaaataatagaaaggctttcagaataatgaacacacattctgtcctagttgtgctttattttatcacagattctagtttaaaaacaaaacattaaaatatggtttgcatcttayttctgcttaaacctggatgcagcactccacttgcgatgaataaaaatggaccataacctcataaaaattgaatttgtaagataaaactttttccttatatgagaaaatttatttaattgaacactaaagttccgcatctcatgactatttatctatgtaaactgagtctcaatatttttaaaagctattttagacttgaggttgtggatattgtttcatggagaaayattacatatatgtcaatttacagtacatttcagtacttcagtatggaagtagtctcttaatcacagtgattgtttctgatcttttaaaaccacaggcacataaatggcaatttgatgctgtctcaccaataatgagtatgggcatctgtatcataactcagtatctcatgtcacttctcaggagaaggaaattgtatatgtgtgtgtgtgtgcgtgcacatgcacacacatgtatgtttatacacatttatatgtacactatatatatgtaggtatatatatatgtacacacacacatatatactatattttcatgctcaactatagtctcctctctaaaatatgttctctcttctacttgcttccatctttttataataaagtctgttgtggtatcttatgaaacttgcctcaccgcactaccaatttctcagtagccaattctgagtttgcgttcactttcaggcattttatctgccttgctctgagaggtattattaatcacatcctgttgctaggatacctgagaatgttcatttatgtctgatgtttctttggcaaaatgcactatgaagaaggcatagaatcatgacaatgaaaattactgtgcacatgctacttattaaaaaagggaggaagagcataaccaccagataatataatgctaactgccatgaattttttaatatcgtttttgtttcacctagattttaaaggaaaaaaaactcgcaatatttttggataatgagaatctgtagtgcttctatacttccgagttaactagaaaaagtggaaggtggtagggttttggttctgttcatttcatagggatttaagagaggaaggagcttgaaatgcttcaaatgcttcctttacagacagggtaactaggttatagtgctagttgatttgcagggycagacctaaaacccaggtcaccactattgccatgtttagctattttaatgcaagattttttagaaaagtgggatgtggaattggacaataatagtaaaaaaatgcctttatcaatatattaaaataatttcaaaattagtgctgtcttgggtgctagtacaccaaaaattcctgcttattggttgtcatgagagaatatggatacataaaatccacctcaatgcaagattttcttagtcaatttcttcctacaggaaatagcatgatataacaaaaggaacacggatttggagttcgatggactaacttctcatcctacccagggatgcttstgagccatgtaatctgggaatgaggtcttgagtaccttctcattacatgtgctttttsttctcacctcttctctctttcgtgtgtgtgtgtgtgtgtgtgtgtgtatacacaagatacgtttggcatatccataagccatatataatcagtctctaggttttaaaagttgcaggaataaattatttaaaaaaattttctgcagactagctttttattagtcaattattgtttatcaaattatttgtttgaatgaaacaatttttttaacttataattatctaaccacaatgtttcaggartaagatacttgaaagatcttgcaattttctttttatcaggtaagtatttatttagtacctactatgagttgggcattctattgacacttaaatatttcatttaattttcccagtaaatgactttcattttctgatggtgaaggcaggctcagaatcttttttcacatgcacaaggttccagttagtgaatgtcagaactggaatatgaatccagagatttttaccttttctgtgctttttagctgtggtgattaaggacaattttgtagagtggtgaaaactttgagttgtagctctaccacttgatcactgtgggctgtgggcacctcattttaatctaaggtgaattgtttttttctggaaatgggagtaatacaagtacctacttcacagggtcactgtgaagattaaataaaatgatgtgtttaataataatctctacatgttttgagtgcataacacaacaatatttataatgctctcaccttggtgcctgggacatagcaaatagtacattgctaggtgctcctctttataagtattctgtatcaggttgtccttaatagcatataataattctttatatccttaaggtcgatgacttccattatgaatattatamagttgagactttgggagttttctgatatgtttacatcacctccctctcttcccttctttttgtttccaaggaaaaaggggcttcccattttagtggattccctttctctcatcctcatgtcctaactcttttcaaatacaaattagtttgatgaaaaccaaatttacatgtcaaaattctccccagttatgagctaagatcatatgattttaggatgcaggctttatggcttaaattcctattcacattttggagtggccaccaactgtggactgycaatagtctaatgtggtctgaagagaaagggagagctgctctagaaatcagasacctccctgccagaacttgttctcttccacaattggtagtagaatcttgaacaagtaacttggctcttgcaagattcaatggtctattcatttagataggtaaatgctatctttcaataattccaaaagaaattatgcaaacagggatgtgaaaggattttatgtactacattgtaagaggaggaacagagaagtttaactgggccaatttgaaaaccaactggtctgtagaagtctacataaaactgyagaaactgcatagcttctgtgtggtcaatggtataaaagaatgaggagtttattttataatttatggctggattcatgctgctgattaaacaccagcctccgcmgacattgaggatagcctctatatggctgtgaatcctctctgccctcctgcaggtttagataaactccacttgctcctgtctgtttctatttgcttagttgatatgttgctaggacgcttaggcaaagagagccattatgagcacagcgagtactgtgagctccagacagtgtgtactgagatacaaaaactggcccttcagaaacatatcgatacagatagatctgggcttctgaggtcggccatctgccttggcagggctgactctccatctgcactccccagccctggggtctgccatcccgcatagcgtggagaaagcttgagaaggactgaatgctcaaagatttgcaggcggctgacctctctgtaaagaaatagtaaaatcagtatgagaaacaacagttttaggttgtcttggaaattcccaagtacaaaatttcttcccactgagatctacccgacaagcaygtaattaatgtgacaaacaacagcccctttcagattcccaacattggtctggctgaattaaatcttagagtaaaccttttgatattcaggatctcattctgaggcagtcatttcttggcagagaagatttttggaagacctttagaggttgaagtcagactggcaatagtaaatacctaattattgccaggttttaaatagctttgcaaaataggaatrctagtcttaattgcgtaagctgcagctactgactaaaggagggatgtgagcatttgtactttcctctgagcattgaacgtgtttctagtaagttaggtgtgagtagtcacttttaaataatataatattctaagtgtctttggtgtgtttattatattgagaaaaactggaatgaattattttgtaaaatgacaaatcttttcataatgtttattcactcctgtgctagaaaaaaatgataacacattaagagttagagtttaattcccttcccctcgaatctctgcaggcctagtaacttgcttaccyagtcggatacagcagaaatgatgtttttccaatccctaagcttaggccttgagcatcaggcagcttctactttccatctttaaaaacgtgctccagacaccatgtaagaaatcagacaaccctaagaccaccatgctgtaaggaagctctagctaaccacacatggaggccacatggaaagagagctgcctgaacagtatgtgaccagctcccaggtgttccagccatcccaacccagggaccagatacgtgggtcaagaaaccattttagaaggagattttccagctctagtcacctcagcaaacgccatgtggatttgagacaaactgccctgccagacttttcccaaatccctaagccacaaaactgcaagcaaaatatcatttttatatcattaggttttgtcatacttggttacacaggaatagtcaaaacaacgcttttctttttttcataatgagaatatttattgacatacatatcaatatatattgatattttttttcctttgaagcagggctcacctagattccttctttcctaagagggtttgttcaatatacctataaatatgttctattattcagcattttagcatctaaaattaytccttttcatgaaaaaagaataaagcctgttattaggagtgcagttaaagcacaatttctatagattactacatattttgttttattagagwkttacaattttaccctgtaaagtggagtaaaagtaaagtggagacttgccagtggtccagcacatcagaacttgtaaaccatcaattggggtacccatttgaaacaatgacattaaaatatgtatctaggcttcgaaaactytaccatatattgttagaattatgtagaaatcctctgaactgaaacactcaaaagattcaacacaatttatggtaaatartttaaaatagtcttattttccctgggtagatttacttctaaaggatcaattagtggaatctatattgaattaagagttttaatattatttagagttaattttctgtatgaaggcaacaacrggaagcatttcattaggaaaggtaatgatatgagtccaaacagaatctatgcttgtgaagtctgagtttgttcacttkaaatagcaatttatgtggctaatgaacacacaatcctgcctagattttcatctgggggaaacaaggacatttcattgctctttttccccacactcttaatcatcatctcattagcttgtggagaaaactggtggaggccagaggtgagctttattttcttctttgagatgtcagtacaggttttaatcccgctagccccaagtttttccttttttatcttgaaaatatcctcttcacactcatcttttccttcacattgacccacgtcaaaggtttgggcctcagacattcagggaagccgatatttcatggatagaaggaagaaaacatgaaaagtatgtttagatcagtggatattgattaattgctttcaggcctttacaggctactttgtaagcttgtaaagactatcccccataaacttggttgaatggagtttactaggaaaattgttaattgtctagttcattttaggtgtagaagaggctccccacmacttgggcacttaggagaaaacaaccagagcacatcttgttgagtgtctattatgtgagagacagaaagataggtacttaatgtctgcaacgctattgtaaaaagtaaacaagaaattcacagtcaaggttcagggaggggccctagagaagaggctgtggactggtgcaactgctagggccttcaagtgggggctggaagtgggcctgtacctaataatagagacatggaggaagagacactccaggagtgaagagaaatattgtctgaatgcctaaggcaacaagctattttctggaaaaatcttttattagtgttcagtgtgaattgctgacttcagaaaaagcaagccaggcactggcacagtgcagctcaccagaagggcgggaagtagggtactccagggagtgggtgcgggtgagctccaggaaggagagtgggaatgttgaaaagagggtcccaactagatgcagtcactgagagctaagatttgcacaagactaagaatttggcattgtcagggaagggcagtaactttctagctttatttactgtgaaaaacacaactgagtgcctgtccacagtccattctcctctttttctactctggtacccaaccctcttctcacatgacatgcataaaacatgtaaactaatcatcgtggtccccatctcccttagtttaggtggtcatttgacatttctggctaatgacatgtacatttatttatttagagatgaggtctcactatgttgagcaggctaaactcaaattcctgggctcaagcaatcttcctgcctcagcctcccaagtagctgggattacaggcatgtgccatcacatccagctataggtgagatgaattctgttgaagaacttcattaaaagatttttcttgccaataaaaagacacgcatgggagaaaccatctccttttctttcagtgcatgttgtcacatctgggcatgatgactggttcttgacctacactggttcttgaggagagtaaagatcacctggtggccacaagcagatcatctggaggyaaaactccttatctgaggacaaaaycaactcacttcaagaatgactgaggggaacacaccccaaggatgaagtcaccaagcctctgaattaatgcaccacgggaccaccctgcatcaggttttcttgttatgtgttatttmacctttttgggtataagttcaagtttttggtyacktgtagctgaaagcatacacaagccaactacaaaaataatattcaatgctaaatacactaggaataawatctaaaggaaagagcattgcctttaagacagttccaaaaattgtaggcgtgagactcttccccagccaggcactgtactttagaggatcttctcttgctctctttcacacacatcactttcacagaaggtgaggagggcccaggtgtctgtatatggcatccacacctttcmtagaccatgcactgagtacctgggatgccagaattctctgacctaactctgcccagatcagatctstggaggaggggaccagattgcatcattggtgtgtaggctccaaggcccgaggagtgttcaaaggattcctggggctttgatgtgtgtatcaatggccccagtgcacgtgcatgaggccccttgcaatgctggagggactgtgatgaaggcagaaagaaaaggggacctacacttgttctcgatgagagcaaagatcacctggtggccaycaagcaggtcatctagaggcaaaactccttatctgaggaattcagaagtaattagacttctagaatttctatacatttctggaatgcaagcatgtcgaaacccattgtacaacctttgccgacataaaggcaccaaawcatccacaaatgttaatcatttctcatgaccaatgtgattaatatggtccaaatcacccttcagctcctgcgttaagtccacaaatacccctacggaagatccaactgggcacactcagtcctctcttactgaagctgcactctgctgcagcgttcctcctatctaataaaacattcctcttcaaacttatactgttgtttggtcaattctttttttttattattatactttaagttctagggtacatatgcacaatgtgcaggtttgttacatgtgtatacatgtgccatgttggtgtgctgcacccattaacttgtcatttacattaggtatatctcctaatgctatccctcccacctccccccaccccatgacaggcactggtgtgtgatgttccccttcctttgtccaagtgttctcattgttcaattcccacctatgagtgagaacacgtggtgtttggttttctctccttgcgatagtttgctgagaatgatggtttccagcttcatccatgtccccacaaaggacatgaactcatccttttttctggctgcatagtattccatggtgtatatgtgccacattttcttatccagtctatcattgttggacatttgggttggttccaagtctttcctattgtgaatagtgctgcaataaacacacgtatgcatgtgtctttatagcagcatgatttataatcctttgggtatatacccagtaatgggatggctgggtcaaatggtatttctagttctagatccttgaggaatcgccacactgtcttccacaatggttgaactagtttacagtcccaccaacagtgtaaaagtgttcctatttctccacatcctctccaacacctgttgtttcctgactttttaatgatcgccattctaactggtgtgagttgctatctcattgtggttttgatttgcatttctctgatggccagtaatgatgagtcaattctttttactgccgggagccaaccactctttgctgccagggctctgacacctcacctggtagttctcttgcctcaggcccagcaattacaggggcaggtgtgtcatgacaaaacaccaagggtagttcctgggagaaggcacagagatgactagcacacatgcattgtctcactggattctcagctcagtcccaggggaaagaagggggaaatattttgtccatagcttgtaaataagaaatagagactcagagaggtaaacttgcccaagattacccagtaaacattagattctggattagaatccagggctttcacaaatcacactgtttaccacatatgctccctcatatttttgtgatactggtctaatttatgtacaaaactgagagacacaaattgatttaaactatccttttgatttatacagtctccagtttcctatctcaaacacacctagcaaagcttatcctaaggagataaaatacaaataaattaaatacaagtatctttataaatgatcatcatcaaatttattgtacattttaaaaattgaagaaattctttttaaaaatcctatactggtgtgaagtaaataaagtgggatggagttagcctttcctcctagcattattttataggatacagacaatccactgtcatgtgtataaaatgttctctgaagtcttgtggaaatgggtcatttctattctttttcctttgttgtgcaaaatatgtaagtttttccttccataaaattatctgaactggctgcttacatagccccaatctgtcagtttgattttaaactcctcaattcactatttgctatagattttttttcaaaaaagttatgagattatttgcatattacatgtgtggttttttttaattgaagttttatccttcagttgagccagttgtattcaaatctgggtgagggtggtgggggtggtgaaggtgggaggccacgagggctgtaaattttgtagtattgtgttccatcttaatggggtggctctggaaggaggagaagccaatcccaaatgtgcacaatccaattatatttccagggacatctaacaggtatcctccagaatcctgaatacctatgggctatatacagagactttttttttaagctctgttgtgacactgctagatattatgggtaaagaaaaatcaggcctgagtatgaataggctggctgatcttagttcttaacaagctcattggaaaccctgggcaagtgataatagatagagaaaagagtaatttcaaaaggtgaagaaaaatgttacaaaattcagatcacacatttgtaatacctaagccttacagcgaaaaaaaaaaaatcagcttgtgggctctgccaacattttcctggagccagcatgatggggcccaggttgctgtctctggcttccaacaatatccacccatgcagacggcaccatgattaatacaagcagagcactctgttccgcacgcatcagagcagtgacatttttgcactggaaagtactatttgagctataagcaaaaatggcaaggctagcttcaactcaagacagttcgaactccagattttgttctaggcattcagatgatgccctcatggatggcggaactattcatttaaagaatcatggtgggtgcatttttccatttaaaaacatttgacagaattccatatgacaacataaacatttgaaagaaatgtggagtatacaggttccttctggtgagctgctcctgcctctggtgatgatacgctcttttgttctctggctagtccagagactttcacttaatcccatattcaataggacactgcttggggtgaggctggcacttcttggtacaggcttcaccctacaatgcacacacaatttgaaatagattgccagcagcccagggcaggagaggaagaggccaggcctgctgggctatttgtcatctcaaacatttcaagcatcacatgccacctctttagcagggcacacagggatctgtatcccctggcaagatgtttagttttggtgcatacaaataaggtctgtaatgtataaacttgaggggacagaaagaacagccgtcgcctgaagcttttcttcctgtgtgtaagtggcagaaaactcttccataaacatcttaatatttcatcttgaagactggataatgtcatgtaatggaattaaaatacatacatattaaggaagtctgctgggtaaagaacagctcacagccagctacatttagtcggactttggtctgctttcagaggaatgtaagaatcttcgaggtattttgtttttctccaattttggaaagccaagaattttagacctcatttttttaaaattctggaatcttttataaccactgtgtgcaaatagatagtattaaaaacacaaatgtaacaagaaggaaagtttgctatcaaaacaaaacaaatggcagccactttcttttgccttctaggggaggagcagaatgccatctccagaaaaaaaataattctttaggaaaattccctgattccttaaaaattcattttggttattcaagtgagactcctggtatagtccagttgggagagagtggagaaaaggaaaggtataatgaagtaagaggatttatagagtcgttcactgctttttttttttttttttttgagagagataaggtttaatgaccctgaaaatagtaagggagaaacgatataaaaagagaggcctcctctaggtgaatatataaatatggtagtcagttggatcctaaggaaggatacaatcaataagaaattccctttttaggaaacgaaaagaaaatacttggaaccatgataactactttcaatattaagttatttccaattctgcattatgttggaccccattctatcaatcttccaattaacaaaagtcactttggctttatagtgccatgtgagggtggcaaaagtttatggcccatcttggggttgatatacatcagagagtgtcttgttctaggaggtaaaacatggagtaggaacaagaatgtggcataagcagaaaatgaaacaggtgataaccggaagagcttattagcccccagtaaaggtggcatgtagagggcacaggacctcacagagggtggaaaaacagtccatttatttggatcttaaaaaatgggtacctcatgaagggtgggagacttttggatctgggcaacaaagtcaaaaggagaagaacttgctgcaacgcagctattacttatttgcatattttaagttttaattgctaggagttaacaaggtaaaatagcgagagggccagcatttggaccctctctcttccaggtgtagtaaagtgaccttggccagttgctgtcctctctggacttccatctcctcatgttcaaggtggaagcaataatactaaactgttaggcttattataaaagttaaaagaaatgctgaataaatgacaaatataaattcacaactcttaagttatagtaaaataaaaataactatgattctgttttttaaatttattttttagagtcagggtttccatttgttgcccaggttggcctcatattcctagcctcaagcaatccccttgccttagcctccctcccaaaagagttgggattataggcatgagccacaatactcagccaatatgattgttatacctgtcaggatgacactgacccccaaaggcctaaatcattcacatttcctacattaattatttaattaagtgccttaactagttggtgatattttagcatttataatttgacataaacctagttgtgtttttcattaattatacttcactatataacctaaattattttaacttcttacatgtatttatttggttcttgaaaagctagagtaaattctaaaaatatttactaaataggactcattaaacttataaataccatgacttctaggagagcacaaagttcagtaaatatctttgtcttactagtgattatttttaataaggccttacgtttctgtggtggtttctgtttcatgtgtgtgatctcttgattactctgatcttttttattaagatagaattatctatattccaaacattaaattccagtagtaggacccaattttctaattctactttcttgaaagtaaaatggtatggtaccatttattattgcaccacccaatcaatattttcatagttagaccaaagtttcagattcatatactaacctatgggaatgtcactagtggataacttggctggtaaactgcactgacacttcaccataaccgacttttttttttgaaaatcattcagttcaattttgtttagaagattaagcatctctttggagagcaaaacatctagatcaaaactgacactgcattaaatttacagggcgatgctttctggtttgctagttatgctttaataatattttgtggcaggaacaacacactgctgtctggcattttcattctccttagaaaaataaaaagaaagaaaaagaaaaaagtaaaataaataaataaataaataaagggctttcctgtaatagggtcaaaggattcaacgactaactcaattctgtcaattttaatggtgggatagtacccaaggtgtttctttttcatttatctatttttatcaagaagtggtttgttttgaggaggatttacagttctgctctcgtatcttcacttttctatgggcccatatgtactcttgcgtaaagcagctttttaaaaaggagtggttactgtgagttttagaatgttaaacctaatatattgagattgactgaatctgatggccctgatgattctaggaatgcctgtccagtttagtttattaagcccctgtgtccctctatcattttattgcagccacactagggcgtggtctggagaaagggtaccaaaactcaaagcagatatttaaaataatctgtgggaaaacaaagaagttataactattgcatatcatattactttgggagctgcttttgaatgatccattttcctctctcccatagagtccccaag

SEQ ID NO: 97549 - DNA, 14486 bp, Homo sapiens
ggggtcaccaggcacacagggcagagggtttgtcagagtcttgttttctgtcacacagccttgcctgagagtaccctgccctcttgggagcaccccggacatccagactcatccccaaggctcactaaacccagggtcaggaagcattccctctggaatccagccagtgccagctggtccactctggccacacacaatggtacctcacgtctccacccaccgccggtccacctggacacagggcctccagcacagaacctctgatcacaggcttctgcactggcttctcctcgacatatagacacctggcttcccgctaacacagcaggcctcccaaaactcagctctcttgaccaaataaccattctggaattttctggatagactgggtccttttccaagtggcttggctgatgaaggcattgaagggaatggctggtgaacccaagtctgtctgagtcctgggcgtgggccgcccaccttcactgtttaaggcctagaggaaagaggaacttttgagtcctttgagctgaaacagcctgcggtgctggagcctgagtctggccgctcaggatgctgactcccctctgtgcagggaggtgggagccgcaggtctgagcacctgttggtgggcggcggcaggaatcctgccttctatagtcttatcttatttcaccctccaacagctgtgagccaagtactactgccccccatgaaagatggagaaacggaagctcagagaggctgtgtttcccaaaccccctccgctgagaagtggggagaagggctccaagcccagcaatgtctaacctcagagtcatgcctttcaagtaccaccttaagacactggaaaagaaacacaaagtaaacttaaattatttccttccttcttaaagcagaaggaagaaaataataaaagatagagcaactgtgaatgaaacagagaacagaaaaatagagaaaaatcaataaacgatcaagttggttccttgcaaagactgacacaattggcaaactttcagctagactggccaaataaaaaggagaaaacacaaattcctcatcaggaatcaaagacgggacatcaccactgaccctaaagaaataaaaaggattataagggaatattgtgaaccatggtatgccaacaaatgatatgaagtggtcatattcctgggaagacacagctaacaaaactgccttatgaaaaactgaaaatctgaacagatctataatgactgaagagattgaattagcaatcaataaactgtccacgaagaaaaaccaggggttccattgtgaattctgccaaacatttaaagaagatcaattattcaagctcttcccaaaaacagaagagaagataatacttcccaactcattctatgaggccagtattactttgacaccaaaaccagacaaagacatcacaagagaactagaaataaacatctcttgtaatacagatgcaaaaatcctgaatgaaattttataaactgaatccagcaacatataaaaaagattatatgtgccaggcatggtggcacatggctgtaatcccagctactcaggaggctgaggcaggagaatcgcttgaacctgggagacagaagttgcagtgaaccaagattgcaccactgcattccagcctgggtgacagagcgagactccatctcaaaaaaaaaaaaaaaaaaaaattcttaagactcaataataaaatgacaaaaaaccaattaaaaaatgggcaaagggttcaaatagacatttctccaaagacagacaaatggccaaaaaatacaggaaaggccaggcacgctcacacctgtaatccctttgggaggccgagacgggcggatcacctgaggtcaggagtttgagaccagcctggccaacacggtgaaaccccatcgctactgaaaatacaaaaattagctgggcatggtggcgcatgcctgtaatcccagatgctcaggaggctgaggcaggagaatcggttgaaccgggaggcagaggctgcagtgagctgagattgtgccattgcactctagcctgggcaacaagaatgaaactcggtctcaaagaaaacaaaacaaacaaacaacaacaacaacaaaaacacagaaaaatatggtcaacatcattagccaccaggaaaatgcaaaccaaaaacccaatgagagaccacttcacatccactaggatggcaatgagcaaaaagatactaaatgccggctatagtggcacgtgcctgtggtcccagctactctggggaggctaaggcaggaggacagcttgagcccaggagtttgagaccagcctgggtgatacagcaagaccttatctcttaaagaaccagataaataggccaggcgcagtggctcatgcctgtaatcccagcactttgggaggcccagacaggtggatcatgaggtcaggaattcaagaccagcctggccaacatggtgaaacctcatctctactaaaaatacaaaaaaattagccgggcatggtggcaggtgcctatagtcccagctacttgggaggctgaggcagagaattacttaaacccgggaggcagagattgcagtagcctagattgcgccactgcactccagcctgggtgacagagtgaaactctgtctcaaaaaaaaaaagaaaaaaagaaaaaagaaacagaaaaataatcacaagtattgagaggatgtggagaaatcagactctcatgcccttccagtgaaaatgtaaagtgacccagccattctggagaacagtgtggcagttccacaagtgattaaacatggagtgaccacatgactcagcaattccactctgaggtatgtacgcaagagaaccgaaaacatcacgtcctcaatgtgtgcaaggctccccgattcacacctccagactcgtgagctcatttggcagtcaacggcaattccccacctctcatgttctggagatgcccatactgagtgttcaacactgaattcagcctctcagccctgacccagcttcgcctcctgcaccccagttccacactgccagtcacccaaggattactggaattacaaaccccagtgtcatgttggaattcccctctccatgcgccataacctcagtacattaccaagtccacagtgcatctctaacaccttacggaatcttctcatttctctccagcctgataaaaccctcataacaacctccagttactgagctggtgctgtgtgcaggtgactgtgttaagcagctacatagacctcaactgtgcccaccaagcccaagtactatcagtagtctccttttccaggtgaggaaactggagcttcttagagacattgaccatggtcatacaactattatcaagcacagctggctccaaatccccagatcctaacaagtacctatgggcccatgccacttgaagtcaccaaccttactgcattatggtacaactgttagagataaggattgtgaagccagactgtctgggttcaaatctcaatgttacagctttctagctgggtgaccttcctaagatctgtgcaccttgggggtgataatacagtgatgctgagagacaggactagctggatttccaaggctgactaagaattcctaagcctagctggggaaggtgaccacacccacctttaaacatggggcttgtaactcagctcacaccagaccaatcaggtagtaaagagagctcactaaaataccaattaggctaaaaacaggaggtaaagaaataattaaatcacctatcccctgagagcacagggggaggcacaatgatcaggatataaacccaggcattcgagccagatcaggcaacgccctttgggtacccccccgttgaatgggagctctgttttcactctattaaatcttgcaactgcacactcttctggtccatgtttgttccagctcgagctgagctatcacttgctgtccaccactgctgatcatcgccatcgcagacccaccactgacttccacccctccggatccagcagggtgtccactgagcttctgatccagtgaggcacccattgctgctcccaatcgggctagaggctcaccattgttcctgcatggctaagtgcctgggttcgtcctaattgagctgaacactagtccctgggttccacagttctcttccatgacccacggcttctaatagagctataacactcaccgcatggcccaaggttccattccttggaatccgtgaggccaagaaccccaggtcagagagcaagaggtttgctgccattttggaagcggcccaccaccatcttgggagctctgggagcaaacactcatcggtaacatttgctgggctcgtatggggattctccaaagcggtgagtaatattgaaccactttcacttgctattctgtcctacccttccttagaattggaggaaaatactgggcacctgttggctggttaaaaatgattaatgtggccaccggacttaagactcaggtgtgaggctttctgggaaaaggctttctaacaatccccaacccttttgggttgggagcattggtctgcctggaaccagcttccacttttacagttttcttggggaagctgagggctgactagaggcagaaagctgtcgtcccaaattcccggcattggccggtcaagattatggcgcagccagaagtctctactcaacagttgcccatgcgtgcacccctatctctccttctggcccatacctcctgggtcctaaccatgactttcttgaaagtgtagccccaaaattctccttacctctgaatctacttcctctgatccctgcctcctaggtactaatgcttcagactcacttcctctcccaagtattagagcaagttgtatctccaaagggatctaaggaagctctacgctgtgtccttaagcacctagggtatgaacccagggagtcttgtccctggtgtccctcccaatttagatatacagctctcgacatgggaagttatgtgggacctaccacccttgccagggccccaagtttgtaaatggctaggaggattgctctcccattgtgtaagatgctctcctcccccaatttctacccagcttacctcccccactgcaatacaatctctaagcctagactccttggccagggccttagaattgatgacccagtactttaacaactggaactgtgtctacgacaacagaatagatcaggaagaaagcgaattgagtaaattaaagggaggcgcatattcctatagaggcaaatgggggcaacgagcgaacattcttccgctgtgttcccaaaatccatctatcaagagagagaatgagagggaaagagaaacagagagagaaaggaaagagagagagaagagagagaaagaaagagagaggggggaagaaaggcagaaagtcaaagagaaagagagagacagtcaaagagagaaagaaagagagagatatataagtagttaagaaaaaaacagtgtaccctattcctttaaaagccagggtaaatttaaaacctataattgataattgaagatcttctctatgaccctataacactccaataccactttgttgtcagttaaacagtgtaatgcaaacattaggaaaaaaacttcaaaagtccaccttaggcccagagcaaaacatagaaactctaatgaacttggcaacctcggtttttttcacaatagagatcaggaggagcaggcagaacaggacaaacgggccctcaggcaagcagaagttcacttcttgcccccatttgccactataggaatatgcacctccctttaatttactcaattcgctttcatcctgatctattgtgttgttgtaggcatagctccagttgttaaagtactgggtcatcagttctaaggccctggccaaggagccaaggcttggagattgtatcgcagcaggggaggtaagctgggtagaaattgggggaggagagcatcttactttggaggctctggaaaagggaaacgctgggcaaatcaaatgcctgatagggcttgcttccagtgtggtctacaaggacactttaaaaaagattgtctgaatagaaataagctgcccctcatccatgcccctcatgtcaagggaatcactggaaggcccactgccccaggggatgaaggtcctttcagtcagaagccactaaccagataagccagcagcaggactgagggtgcccggggcaagcgccagcccatgccccaggtatgcttgaccattgggggccagaaggttaactgtctcctgaacactggcatggccttctcagtcttartctctggtcctggacaaccgtcctccagatctgtcactacccgaggggtcctaggayaggcagtcactagatacttctcccagccactaagttgtgactggggaacttcattcttttcacttgcctttctaattatgcctgaaacccccacacccttgttagggagatacattctagcaaaagcaggggccattatacacctgaacatgggagaaggaacaccgtttgctgtcccctacttgaggaaggaattaatcctgaagtctgggcaacagaaggacratatggatgagggaagaatgcccgtcccgttcaagttaaactaaaggattccgcctcctttccccaccaaaggcagtaccctcttagacccgaggcccaacaaggactccaaaagattgttaaggacctaaaagcccaaggcctagtaaaaccatgcaatagcccctgcaatactccaattttaggagtacagaaacccaatggacagtggaggttagtgcaagatctcaggattatcaatgaggctgttgttcctctatacccagctgtacctaatcttatactcactctgctttcccaaataccagaggaagcagagtggtttacagtcctggaccttaaggatgccttttactgcatccctgtacatcctgactctcaattcttgcttgcctttgaagatcctttgaatctaatgtctcaacacacctggactgttttaccccaagggttcatggacagcccccatctatttggccaggcattagcccgagacttgagccagttctcatacttgggcactcttgtccttcggtatgcggatgatttacttttagccacccattcagaaaccttgtgccatcaagccacccaagtgctcttaaacttcatggccacctgtggctacaaggtttccagaccaaaggctcagctctgctcacagcaggttaaatacttagggctaaaattatccagacacaccagggccctcagtgaggaatgcatccagcctatactggcttatccttatcccaaaaccataaagcaattaagagggttccttggcataacaggcttctgccgaatatggattcccaggtacagtgaaatagccaggccattatacacactaattaaggaaactcagaaagtgaatacccatttagtaagaaggacacctgaagcagaagtggctttccaggccctaaagaaggccctaatccaagccctagtgttaagcttgccaaaggggcaagacttttctttatgtgtcacagaaaaaacaggaatagctctaggattccttacacaggtccgagggaccaggttgcaacccatggcatacctgagtaaggaaactgatgtagtggcaaagggttggcctcattgtttatgggtaatggcagcagtagcagtcttagtatctgaagcagttaaaatgatacagggaagagatcttactgtgtggatgtctcatgatgtggacggcatactcactgctaaaggagacttacggctgtcagacaaccgtttgcttaaatatcaggctctattacttgaagggccagtgctgcgactgcgcactcgtgcaactcttaatccagccacatttcttccagacaatgaagaaaagataaaacataactgtcaacaggtgattgctcaaacctacgccgctcgaggggaccttctagaggtttccttgactgatcccgacctcaacttgtatactgacggaagttcctttgtagaaaaacgacttcgaaaagcagggtatgcagtggtcagtgataatggaatacttgaaagtaatcccctcactccaggaactagcgctcagctggcagaactaatagccctcactcaggcactaaaattaggagaaggaaaaagggtaaatatatacacagactctaagaatgcttacctagtcctccatgcccatgcagcaatatggagagaaagggaattcctaacttccgagggaacacctatcaaatctcaggaagccattaggagattacaattggctgtacagaaacctaaagaggtggcagtcttacactgccggggtgatcagaaaggaaaggaaagggaaatagaagggaaccgcgaagcagatactgaagccaaaagagccgcaaggtgggaccctccattagaaatgcttatagaaggacccctagtatggggtaatcccctgtaggaaaccaagccccagtactcaaaagaaataggatggggaacctcacgaggacatagtttcttcccctcaggatggctagccaccgaagaaggaaaaatacttttgcctgcagctaaccaattgaaattacttaaaacccttcatcagacctttcacttaggcattgatagcacctatcagacggccaaatcattattaactggatcaggacttttcaaaactatcaagcagatagtcagggcctatgaagtgtggcaaagaaataatcccctgccttatcgccaagctccttcaggagaacaaagaacaggccattacccaggagaagactggcaactagattttacccacatgcccaaatctcagggatttcagtatctactagtctggatagatactttcactggttgggaggaggcctttccttgtaggacagaaaaggccgaagacgtaataaaggcactaattcatgaaataattcccagattcggacttccctgagacttacagagtgacaatggccccgctttcaaggctgcagtaacccagcgagtatcgcagacgttacttaggcatacaatatcacttacactgcgcctggaggccacaatcctcagggaaggtcgagaaaatgaacgaaacactcaaacaacatctaaaaaagctaactcaggaaacccacctcgcatggcctgctctgttgcccatagccttattaagaatacaaaactccccccaaaaagcaggacttagcccatacgaaatgctgtatggacagcccttcctaaccaatgaccttgtgcttgaccgagagacggccaatttagttgcagacatcacctccttagccaaatatcaacaagttcttaaaacattacagggaacctgtacccgagaggagggaaaggaattccaccctggtaacatggtattagtcaagtcccttccctctaagtccccacccctagatacatactgggaaggaccctacccagtcattttatctaccctgagtgcagttaaagtgtctggagtggagtcttagacacatcaaaccctggataccgccaaaggaacccaaaaattcaggagacaacgctagctattcctgtgaacctctagaggatctgcacctgctcttcaagcgacaactgcgaggaaagtaactggaatcgtagagctccatggccccccccgtcatatttttctctttactgttgtcttacccccctttcactatcacctcaccccctccatgccgctatactaccagtagctccccttaccaagagcttctatggagaatgcggcttcccagaaatattgatgccccattgtataggagtttttctaaaggaaaccccactttcaccatccacacccatatgcccctgcacttcgggccacacatttcaatccctgtatctttaacctccttgttaagtttgtctcttccagaatcaaagctgtgaaactacaaatgttcttcaaatggagccccagatgcagtccatgactaagatctaccgtggacccctggactggcctgctagcccatgctccgatgttgatgacatcgaaggcaccactcccgaggaaatctcaactgcatgacctctactacgccccaattcagcaggaagcagttacagcggtcatcggccaacctccccaacagcacttgggttttcctgttgagagggggtactaagagacaggactagctggacttcctaggccgactaagaattcctaagcctagctggggaaggtgaccacacccacctttaaacatggggcttgtaactcagctcacaccagaccaatcaggtagtaaagagagctcactaaaataccaatgaggctaaaaacaggtggtaaagaaataatcagatcatctgtcgcctgagagcacagggggagggacaatgatcaggatataaacccaggcattcaagccgaatcgggcaaccctctttgggtcccctcccgttgcatgggagctctgttttcacgatattaaatcttgcaactgcacacttttctggtccatgtttgttccggtttgagctgagcttttgcttgccatccaccactgctgatggctgctgtcgcagacgccccgctgacttccacccccctccagatccagcagggtgtccactgcgcttctgatccagcgaggcaccggttgctgctcccgggctagagactcgccattgttcctgcacagctaagtgcctgggttcatcctaattgaggtgaacactagtcgctgggttccacagttctcttccgtgacccacagcttctaatagagctataacactcaccgcatggcccaaggttccattccttggaatccatgaggccaagaaccccaggtcagagagcaagagccttgctgccattgggaccggcctgccaccaccctgggagcaaagaccggccagtaacaatgccttgctagggcccagtgtctagacaaggtctactgtctgggctgctgcattccaaatacggcgacacctggctagtgcccagggtctactgtctaggctgctgcattccaaatatggtgatgtctgcctagtgcccagggtctactgtctgaggctactgtcatccaaatacagtgacgcctgcctagtgcccagggtctaccgtctaggcttctgtcattcacatgagacgcttggagcagtttctggcaaggaagtggggcttcaagatcactattctggcaacagctgcctccagtcttctctgcgatgtggatcacttccctttcgtgaacagctgcctagttcaatgtgtaaagtcctccgaatgcccagcacgtgggccaccggccctcctggcccctgctctgggtaaccctggcccccccgcccgcgaatccgcacagcccccacacccccgggcctggcactttcagtgcccccgctcccgccccgtcgcgtccgcgcccctggcgctaacgcagcctccaccttcgggctccccggtcctcgctgctctgcaccgtccaactcacccagcaggcgctcaggggatgcctgtcggcccgcgaccgactcggagtactgggactagctgcccgcacagcgcagctgtctctggcctggccccactgctcccccgccacgcctctcggcctccgtccgtcccatgggcggggcggagccgcgggcgccctgacgtcatcgaaccgcgccaccctcgttgccctggaaacgcggacgccgctgccacccgggcgggctggaagccacgaagcttcgccaggcgctcccgggcactcttgccttctctgcttttaggcaaggcctggctgaccgactctggcgagtcgctgccctctcggagcgccgtagttctgagatgcagttcacaccgcggcccttcttggggcccactccaaggctactggatcaggacccccagtctggggccgggcattttcaaattaatcagcaggctctaggtggtggctcatgcctgtaatcccagcgctttcggaggccgaggcaggaggatcgcttgaggccaggagtttgagaccagcctgggcaacatagtaagacccggcatgcccaagagcttgctgaagtttgagaaccgtggttctgcagagtttctcagagagcccctagtggaagtgggccctcattgaccagagcagcaaccagctcaatcacccaccctttacttgtttttctttgtctcacactttccacttcctcactcgtgcactccgagatcagctccattttcaattacctgcacccaaagcctcgtctcaaggtctgtttggggagatccaaactaagacacacacacttcttatgaaatttacagagacagtgttgtacctgagcgagttagagaaaacgccactctttgagacgaattaagagtgcatttatttagccagcggccaagagacagctaacgcttaaagttctctcggccccgaagaagggactagattttcttttatactttggtttagaaaggggaggggagtctagttaaaacaattttacagaaataaagtaggcaaaaaagttaaaaggataaatggttacaggaaagtaaacagttccaggtgcaggggctttaagactattacaaggtgatagacgcggggctttgggcgttatcaatcagacgaattcctgggaattgcggatattgctcgccacagtatcttatcagttaattgtattcttggatgtgctgggagtcagcttgcacaagttaagtccttgaggaaggggctgccagtgaaagagcgaagatggagtctgtctggctctcttagcgaagggagagttaattcaggtggaaacaaggctaggtgattaaaggaaaagggagagtctaaaaacagggttagtaaaaacaaggttgggcattacaacagaatcaactagacttagcaatttgccatgtaaagaacaaggaagagccaggcgttgtgcgccatggttctctcatctgcagtcccaactactcgtgaggctgaggcgggagaatcacttgagcccaggagtttgagtctagcctgggcaacatagtgagactctgcattaaaaaaaaaaaagtgaaaaaagcacaaggaaaactaaatccaaaggtttgcatttatagggaactaaaagatgggcagtgcagctcagttatggggaggagaaagagaagtacaattttaaatgtgtatcaagtttaagatgttggtaggacatctgggtggggatactcaggtcatgtttggaaattctgtctacttctgttctactctgaaataccttctccttgattccatggcaacatttttcttcacagttattactgttatttaaacagacatataattatgggtatcagtgggagcgtccgattgcaaaagcagaaggaagggactgaaagatcatttcgggcctggcaggtaccctgctaagcagtcggaagtgatccttagtctagactagccttcccagccaggggtctattgtgtttttgcaaaggtccctgaatccccaggagcaacaaggattgcctgaagacaaagcaatcatggtctaataaaaaatacacaccactgtttttcaaatgtttggagatactgttgagagtaataaaataaccatttattgcagaactcacacctcctttaggtcacaatttctgccaaaattacaactactaatcaattgggttcacatgtgttactgacattagaaaaacatctttcggctgggtgtggtggctcacacctataatcttagcactttgggaggtcgaggtgggcagatcacttgaggtcaggagtttgagaccagcctggccaacatggtgaaaccccatctctactaaaaatacaaaaattagctgggcatggtggcgggcgcctgtaatcccagctacttgggaggctgaggcaagagaatcgcctgaacgcaggaggtagaggttgcagtgagccaaggtagcaccattgcactccagcctgggtgacaagagtgaaactccatctcaaaaaataaaaataaaaatatcttcccactgggaaatgatttgggtccattgcaggagtgagagggagagggaagccatttctaggtagacattggaaggcaggctaaaggggaagagctcagggcatctggtggccagtacaggtaaaagacaagggcctgagataaggccatcttggtggagctggagggtggagagggagctgagtggctttttattgttggttctatttaagttagggcatcatcacaaaatgacatggagaaaacaaagcacaggtttccagccttggccaggtcctcaggctcccctcccttctctgcctgtcccttttcaccctcctcttttcacacttgtcttcctctaccctctggcttgtcagggctggcctgtagcaagttttggccccctgacttcac

SEQ ID NO: 97550 - DNA, 12547 bp, Homo sapiens
cttgttgccgtggctggagtacaatggctcgatcttggctcactgcaacctccatatcccgggttcaagtgattcttctgcctcatcttccctagtagctgggattacaggcgactgccaccacggccagctaactttttgtatctttagtagagatggggtttctccatgttggcttcatcacgttggccaggctggtctcgaactcctgacctcaggtgatccgcccgcgtgggccccccaaactgctgggattaaaggtgtgagctactgcgcggccctcttggttctttctggacactctcctccctttgatttcctgcagtttgaacctgtacctctgggagtcgcttcagactgttttgtggctgcttctgtttggggtgttcattcatctgtggcttcgacctggtgggccctcatggaaaggattccccatctccagcaggggtggattttctggggctgtgttccacggactgaggacatggccctgaaggggaggtctcccgctgccacctggggctgtggagtgcatgacacatcccgttgtgatttcaagtgctgtggacccccgtgggaagccctggccctgggtccgatttcttcaggtgactcccttccttccttccctgcctctcgaggccccagacaaacggcatgcttccccgggacttcccaggcttggagcacggaagttttctagtttccttctgcagacagtgctgctcctcaggcttctgtgaaaaggtgggaaacgtcactgcactgtggatgctgtggacgcacagctcccgcgggcccttcacccttccttcctgggctgccttggggggcgtgcgctgagatctacagaatgtttctcctcgacacacccatgctgctctgggagggtcccagtgaaggcttcacttgcctggacatgtggcccagcacaggcggccgatgcagccgggagcaccgtcccaactctgtccacacaagggatgcacggccagtccatggagaggaggcaacagagccatcccggacgtaggacagacagtgtgaacgtagacgcagagtggaggcctcggggactgagactcacagaaaggtgggcaaggactgtgcgtgtcagggcgggaagggcactttgtcctatgagtgcggcccacagtgtgactggtgggggctgggggcccctggcaagaggcagaaggcaccgcagctgccctgacgcagggctgcagcagtaagaacatggcaatggtgcagggaagagctggaggaccatgaagctggggtcagggatgactctcagctccaaccccagctctgtgcggattcagcctgtctgcccggccctgtgtggatggggctgttgccctggccccgtgctgattctgctggtctccctggccttgtatgaatgagggcctgtctcctgggccccgtgcagaaggggacctgtctccccagccctgtgtggatggggcctgttgctaccgctggtgtccaggaggaccacagccccggagctgcaaacaactggcatttcactttgtatcacagaattggaggctgttttagaaaagaagatgtagtcacaacttcttaaaacaccttcacacaaagagctcagatgatctctggagcgattagttctcgcttttcctgtgaggtaaaaaccaagcttgtacaaatctgaataaagtcaaaagtacataatgaggcaagagataaaaggaagccgaacaccttccttatagttaaaaaggtttcctctcttatgcagttaaagcggaaataaagataactatagcttacacgtctagttaaacaaacacagcctttcgtgttttgggtttgtgttaaagatgatacaaattactttggcttaaagtgtactgtgggcggaaataccctggcacatccattcagaaaagaaaccagggcctcagcagcacgaacctcttttgcattccatctgggatactcacattttaacaagagacaattaaaaacggcaaagctgggatctaaagttctggagcttctgcctgagtaaatgcctatggtggcgtttccatttccccagaagacagcagacatgcccaggggcacacacggccatgggcctgcgtctgcgacatctacagtgcgtggtgacaccatgaccaagcccacggggcggcagggagaagctaaggagaggcacagaactgcacccgtgttgttattttcgtgtggagcggtgcttgccttccattgttgggggagatgtgggggaaagagacccagtgaagggtgtgtccagggttacttcgctttgaggtcctgcaggtgcagaaatgtgcatgtcatccgacagcaggggcggcgatggaagacctcgggccagtctcacacgctgtcctgtgctggaggctgggtctctgggctggagcattttgtgggtgtaaaagtctctgccgagatcctcgggtctttctaaaaatggacctttttgggtgagatgcacataggggcccccatacactgtttttcacggtggagcaggagggtggtcagaggtttccaagcacacaaatcctgacggttttaaggaaggagccagagaatgaagggaaaaagaaggaagctcactaggatgaccgacagccacggataactgtgaccagcagtcggacctgtgaaccaagcccagcagagccggctaaattacgctgaccccgtggacactgcggccagacagaacatgccccggtcttctccaaactgccgccttacccagatccctgcccaagggaactcacgcagacagtgccctcattcagcccagtacccttaatacacaggctgaggtctccacagcccaagccactgcctggaaacccttgtcggtcccgtcacaaagaggccctgggggaagccgggctcactctgcaggcagagaatgggcctgccgagcaggcaacgaagtggcctctctcagagtttccttagggcatgggagtgctgtcttttcactgcccaatttccttccccgttagtgaggtctggccacggaaaggagaacttctgcttggcttaaacattattcaatttcagagacacaccttcagtcattcaattcttgctctgctctttgctaagcgaataaacagtgtactgatgctatctaagaagaacgatggagaaatatgtaatgtactttgctgtcctgatctccggggaaggcggccgaacagaggggtggaagccctgtgcagtgagggttagccccggctccctcctgagtgatgcagagctggctgctgtcaaccaccactgcccagacaggaagagcaagcgtgatggggcccatgtgccccgaccttcaactgaggaaacaaaacccctgatcaagccacctgggcctggcacctcctgcagcaagagctcagctgacatctccttcagggttcgagggatgggacaggaaggggctgaggcgctgggtgagggtcttgtctcctgcactacctctgctggtgtcatgagctggcgtccgtggtggcacctggggctgcaggatttgggctccgaagcaaaggtgcccccccggcgaggatggagtggagcacaggggctgccgtttcagtggtgggtgagttgtacggtccccgggtaagactgggatgtgggattggttggcgaggcatgcacctcaaggtcagggttagtcttcaggactagcggggtctggctggccatcacaccccgcagatggggtttctcagggaagcgagggtacactgtgggagagggggcattctaccacgagagctgggaggttctgtgcccccagcaactgctcagactccagagttaggattccttcatcacccctgagcaaaacggggtgcacaccaagcctctgcccacgcgggcgtccttctctcatgctgctgagggaattgaaatgtgagctggctttcctagcagttcccactcttaaagggatatttgaagaatttttatagtagtaaaattcatcttaaattgattttttatgcttgtgctgaagatctcaacctctgatttactctgtagttctcctttttaactctttctctattggcattagataactattcatgggtgaaatgtaattaaacagctttgattctgaagcaatgatttatgatactacatttaaaatgaatggcattaaacacacacataaaaccagatttttaaagccatgacacaaatttccatttctacagtaaaatgaaatttattctcctgccctgccctctcctccttccctgccgcgctcggccctggaagaagagctggggtgatggcctctctcacggcggcgcttatcacgggggagttcctcaagcttccccactggcaaaccctgaaacactaacaattacgggctccgtagcccacgctcatggaaatgccacgtcccagtcttccccaggggccctgcaactcacccaccactgaaatgccggccctgtggtccgccccatccttgccgggggagcacctttgctcggaagcccaaatcctgcagctccgggggctgccacggatgccagctgatgatgccagcaggagccagtgcaggagacaagaccctcacctggtacctcagccccttcctgtcccatccctcaaaccctgcaggagacaagacttttgcctggcacctcagccccttcctatcccatcccttgaaccctgcaggagacaagaccctctcccagcattggtggggaaacactcagagcccatcagagtcgcacctcccctaggcctctcctaggacatcacgtgtcacccacagaataatcccgaggcaaatatcatgacactggtggctttcactttctttgacttggcacgagaggatggtggctggtgggtgaagcagcccagctttgctgggcgtgtgtacatgtgacaacagggcgtcgggcaccttaacacagcaaagctagagccatgtggacctggctcaaggatttctttaagaaaaacacaactgttggcaatgccaggggttccttaaaatcaaaccggacaacactgacctgccctgggtagaagctcccggggctgcggcagactggaaggccccggtgatattctcccggagttgccgtctgtgggaagctgccctaacccattcgccttccccggcttggaaaaacaatgtcccagtgatgaactgccttgcagatttattttgatttaaatcgccttcccttcaacccaaaccagggcacagaaaggtggttagaatgttccagcacaaactcatatgagcacagcagctattccagggaaaagcgtcctccctacctgcaagaagcttcctttcaagacactgatattatcaagaacgtgaaggaagagtggcagcggcccacctgaggcacagcagagctgggggtgatgagagaaatttaagggaaatggcccctgttggacacgggcttcctttgactgtgtgggaatcccacctggccacagacaaagggtagaggaagcaagtgccccaggagtcttgatctcagcccagctcagcatgaggaaagcagcaagcaggaagagtgagtgttcctggtaccacggctaccaggctcttcccagtttagagtgctcaacattctaaaacttgaccagccagctgggagatttgggtattcagatttttgggtgccttaagattccactggcagtagagaatcactaaatgtccatttctgaatgaattctactccccagagacattaacacacgatgtacttggcttgaatcctgtttgatttaagaaaatcggccaagagtccttcataagttactcacatctgaggcaccatcgggctgaccgtgggacactccagatggggagtgctgtgtaccctctgcctctcctgtgacccgaacacctcctctctctctccatggacgacgttttcatcttatggtctgggaatgctacctgaccaccctggagggtcacccaaggaaagagttcgttccaaagacaggtgctcctctgagttcctctggaatctggcaaggtgccgagcttggacgcaaggcttccatgaggctgtgaaggaggttgcasggaaacyggtggggatctgaaaagcttttagtggcctcrccacacacagcacttcagatgctcaggtgatgagcaacattttccaarcccagctagtgagcaccccacctcctctggcttccagaacctggtgtggagggccaggagaggcttcgggactgaagggcagagcagcagactcyggggctcatgtaggaaggaacatgccttcagccaaagattatccaygctgcatggagactcttgctaaatatcactggtaaatgcacaattatgtcccatttagagatctctagcagagtgtcttgtgtttgatggatttgtcctgcatttaattataacttcctgctaaagctcagatgttttctttcaggggtaagactgaagaaaagaaataaactatgctacctgctcttaataaagatcattttattttaaacaggaggctgaataaaaccttttgactctatatttcagacaaatgcagtggcttaatttcattcaatcatttactgaggatctgaaatgcatgcggttagtggtgagaatactgactcagggctgtcccttcctctggagttgacagccgactgcgcaggaagggaaggtgagggtcaaacacacaggtcaacatcagaaacagcacttccgccttccattggccccgatgtttcatggaggccccaaggaggctgcgaaggaacatggcagtgactgctccgtggctctgcgtggtggccagcaactgtttgggcactatgaccatgtacgtttgacaaagcgcatgcaattatttgaatattctatagttcttttaggaaactgagtagaaacggaaaattaaaagtgctgatgttagtaataggaaacatggatctcaacagtgcaactgtggcaaagataaaaaacaaacggcatgccaacgggctcatgacagacacaaccgcggccttgctggtcttgagctgccgttgctgatgacgatgatgacgatggcactgaccacacactgtgggctgttctcagtgattcatgcgccaccctactgatttccaacgcaacctcaagaacaagatgtgttcaactatgaaaggaagaagtgaataaacacgcacaaaacatcaaaaatatgcttaagtttacataacaaacaatgacaggtatgagtaatgtatttttttttttaaactttctggtacaagagggcctcccacttatcacaggtgagtctactgattgactgttatgtgtttagttgtagggcctattttaaagatgcattctgtacaaaaggacatcatataagacagggaagtaagtgatgagcacagcccattcctagcgcagaagtaaacaggaggtcttcctggagaaggccgggttccatgagtgcttgcaggagggctgtgaggagctctggctgtcaagtcagcagatctttactgcacttttactgtgtggttcataataaaggtggacataaatctcactccttgcttttatgccttcaaccccatcccaaaatgaatcctatgtttatgatcctattataggccaccaacgggttcatgtactaatgtcaataatgtgaagaggagaaagaggccatttaaaattaagttaggttccaagttactttctgggtggtcgtaggtatcttgctaaaactggataccgatttttaactggcacgctatgccctcaatatctggggctcaaattaatgtcagatcctaaacaaaactgcaaaggtatttaccatagtattttaaaacacccaccaaaaatacagagaacactttatgtaaattttcaactcttccccataaggactatatatatttttctttttaaaaataattgattcttaaaaatacaggaaataatgaaaatatttttaaaagacaacccaaatagtatacttggcagatcagaaagccttaaaaagcctatttacctcccccctccaaatgttcaaatcattaaaaggaaaattgtattttatcaacattttaacatatcattaaaagtctctactatttgacagatgaagataaaaacaccccaaaactatagatgaatgatcaggtccctaaagattccaaaacaattacaggatgcagagcaatctagttaaattttattcaaaagcttactgcacttgtgttttcttttatttttctatcaagaagcccatgaggcttaagcacaattcattatgtatgagaccccacttgcgatgcctgactgttgattaatagcaaagtttgctgtatgtacatttgcaacattagatgcatacaatatgctaacttattctttcactgaaactaattatttacaaaaatgactacgtgagactacaatttattaaatgcatgcatccagtctcaatttggcccctaaagacagcctggaatgaagatcttttacttgatgtgacaacttctagaaacgctattattaatattgtaaatgtggcaaataaagagttcaaatagccttatgtctgtgttgcacatgccttccaccaccacggcagtgaacagagctgctttctaacgttttacacacacatgagggcacgttcttctttcccagcttaaattagttgcttagaaataaagtgcttgtatatctgtaaagatataaacttttaaagagtcattccattagtctaaacaaattgttgaaaacttgcacagagtagctatttctcaaaggatctttgaggctaggcaactgtgcattattaaacagttctcttccccaaccctagagaagaagccacgtcgatctatacacagagatcaacactgcatgcctggacatgggcttcaaatggggcatttggtcaaccgctggtgtctgtcatgcaaacgctatgacgcacacagcccagagtagcaactgcctgccctgagtaccctctgcattctggtctctctctgctgggccaaactgcacaccttgcagtttcctcctcagatgccctcaaagcctctgtcctggcttgccctgcccggctgagggtgggtacccctgaaggctctggagtgagaaagagaggactcactctttcctgcacagaccagacatggagagtcaacgtccacgtccacaaaaggggacaacagtgcaagtggccgctacaggctactgaccgcttggtgccactggagttttccaaggaaacctgaggcaagcacctgtgtctcaaccaagaacctgctctgggatgtaagaatttaggggcagagaagaactgaaccaccagtgagagtagatgagacgggcacaagatgaccgactttgtgtcatgcaatttcacatcctcactctctcaggaacacagccaaggtcagccacaggcaaggtggctgactccagaagttccaggcaacatggcgcctcgacgtcacatctccattacacaatatggcaccttgggcaggggtacatgaacacggttgaggatcaatgcactctgggaaaacagctcgatgtaagctctcgcacaacactgcacagctgctatttactgagtgcctaacatgtgccaggcattccattataagctgttctatttattcctcccaaagacccttgggggaggtaccattatctctatttctaaaacaggaaactgaggtccggaggttatgtaataacaacttaccaaacgcataagggacagacccaggaatggaatgaaagcctgactccaaagaccttagtctggggcatctccgtggaatagaagcactccagctctcctctttgaaatggaagccagtggtcactcctcatcatgacaagtccacacgcccacatgctctgcccttgatggcatatattctacatagaatagcattttgatttactttcttttactctaaggttacttctatgatctctatgatctcttccccaatccacaggacaacaatccaggcccactgccccattattcaaagacaatgggaatgagtaaccaacctactttctattatacactagaagcttccagaaagagatactaggtgtccacatcatacagtctcaagctcccagactgctgcccaattgctcttaaaggaaggtcagatttacatttaaacacatcagtgacctgtccacacaacacacatcagtattccacataggcaggagacctgggtcccagaatgcccccggcctgccgtgtcccctactgtcaaccctccaaagcaaggcctggagtgattcaggccacaacactgcactcaatggcttgacgaatgcacaggtgaggtgtggactgggctgcgtaaagaagtccaaccaagggctgcccaggagggctgttccagtgagccctgggacaaacagccaggcaccatcctggggctggtcccaactctgcctccagccctcggctccgacccagcacattcccagtgctcaatccctgcccactgagcgaatgggtagacaagacacaagggtgctgaggctcctccggagcacgtgcactgaaaatacacctacatttcagatttcatttttccaatgaataatgtgctgaaaaccattccctagggggaagaaaaactcacaaagattttctaaacagtgaaagctacatttctctgccttttcagattttgtggtagactgcagaataacaaagtttgtgaaagcccaggaaatgggcatcacttccaattttgcttactttgataggactctgcagtcggaacctggaaatgctgcaggtttgaagacacagaacttggtgggttctcctctgtgtctgttccattccccacccccgatataatgcaatcgacttcatgatgagatgaaatgagaaaaatgaaacgaagcagcaaatccttcaagcaccaccttcatgctgtaactgtaaatagtctgttgagttccagcagccccactcgttacactaaggcatctatgctgtaccctcatttctcctctaggcttctgggcctctggggaggagccagggggtcattaataaagggggagtgaagaggtcccagtgaggaaaaccttgcctccccccatgacacacagcagacaccagcaggccctgtctgtaggcatgccttctcatctactggaaacataccgtaagaccacgaggacaaagccactcctgggaaatggaagccagtggtcaccccgaatcatgacaagcccacatgctgtcacatggaacagcccgcccctcccccatccaccggaagagcaaagtgccgagtaccccagaagcagagcacctgataaggcctgcaggctgtgccagagcttgggaagccacgcccgccctctgagctcctcgcctgcacgactgttccatctcccaggcaggcagcggtttctgatttgtcgtctctattaaagaacaggcttgctttctcctgtgagcccatgcaatgagaaataatacttttggtaccaacagggctaagatgtacctacccctaattgacacaattcatctccacacagcttacagactaactctgtcatcatgcaattcagaaaaaattattttttgtcttagcaagagaatatatcgtaatttaaatttaacaatcataactaaatgttctgaagacaatacttttctttccaaaaggcatggattatatgaggattgacctccacggggctcggtcccattaacttgtatacttgggctcattaataaataattctgtcactaaattacctgtcttgtaaattggtttgtacagttctaaataaataatagatagttccctattatgaaacacagtggagtttttaaaagaaaagcacagcttatagaatagtactgcaattttatccgggaacaactttctccagctcacttcatagaaagcccttgtttttcctgttgattgctgcagctggaacaagttagctggttagcagagttgagaatactgcatttaatctcagacaagtatcttgactatccatcagtggccaaaaaaatcctcagcaactattaaatggacagttaatataattgtattttaaaacactgaggtcatatttaattttgaattgaaactcttaaaacacgctttctggcaaggatatagagtaataaaacaacgttaactacagaaaaaaatctgaaactcacattattaaaataaatcttttttccagagtactaatatttgcaagaagtagattacaagaagcagaaaacatttgtactttttcaacaagtgtcgtcgctggcactgaaactcagggttttcagtttaaaggatgaaatcatgctggaggccagagttcagatgctgtccccctccctttctcctttgagctggctggtctcccggcatcttctgtcttccttccagggtgctcaaacttggttcagctacaccctcaggt

SEQ ID NO: 97551 - DNA, 12657 bp, Homo sapiens
ggcacagacacctcctagtcagcatggaaaggaggaagcaccagcagcgcactgttaaatgcctaaagtgagagtgtccccaagggccaggaagtccgctcactgcagctcccctgggcagtggaggatggtccaggggttacgtgcggcttctgtactattttggtttgttggtttaaaaatatatatatatgtgtgtgtaggttttactttccaattagaaaagcccacctggtgtaggagagtctttgggctttggggctgggccgcacagggtcaggggttggatccggcacctcctagctctcagacaatccacattgacttctctgacacctgtttccagtttctaaagccatgaaaagtgagggtgagctgttccttcctggtacataaaaaataaggtggtggggggtgcagcccactggccaggtgccttcttgggtaaaggcgaatgatagtgttgtccctttgctcacagctcgagaggttaaggaataagatcatccaggccacctttagcatctccgggaccaagtccttggccaacgagatctctgacaatgacatcctggaagccctgcaggtatacccctaagctcagctgcctctatccgggccccagacccccaggccagagctgtggtagggggttgtggggggcctagattccagggactctgttctcatcctacctgtgtcacctattcacttggaccccaggaccctcctttctctcagctcaggcagaggggatcaaatcatcctaaggcaggtgggggcatggcacgggagtcttagctactctcagcaaaacgggggacgggcatcagagaccagcagtaactgccacaacccatcctgagcgctgtggagaggggacaagccgctcagggcacgaagattctcccacagcaggagcccagccccggctttgtccagcttggtcccctccgctggtatcaccacccactgatccagggccctggtgcagacccctcccaccccggccacagcctcctgggctccttcctgaccaggggtccccaagcaagggcctcggagaagtagaggggtgtaggagaattcaggccttggggtcactgggcatgagggggtcaccacccaccagctgggggccacacactcacttttctgagccatagatgcctccctctgtgatggacagcgcatgctcacctgcaaggtgtcgtaagactcagagctctgggagccgggcaccggctatggctctgtgtggggctgtgtactacgaaggggtcacctctcaccaggagctgcttttgttcccaagacccacacttcaccctctggggctgcccttgaaccccagtgtgtgcccctgaccttccagcacccacgttcctggggcctggttcccttcctctgcagagtggggggccctggacagtgcctctcctgcagagctgtaatgtggagagaggtctctgcggccttggtactgttgtctgggggaggggaggaggaaggggagagaaagaggaagagaagagggaagacagaggatggagggagttattcccaccgcacagtagccagggaagagcacctttgcttgcttgccatagcctgacatgaaccagcaacggcccagagaggagaatggaagagaggtggggacaacattccctctgtacaggacagaagggacttgagggacagatgtgacgacctcaaagatctctaggagtctggggctcctcacaactctaagagggctgaagagggggcttagtgcaggcttctgcgggctggtggtgtgcacctgcccccggctccgcattctgtgacttcacttccgtggctgaaaatcagccactgtgggaatattcccaccacagaaactggcaacgccacaaagccgagggttgtttgttttttctccccctggagagccggttgtaagtattcaccagcacacccctgctgcagcaagcctctctggaggaggaggagagggtggcgtcccgggcagctggcacggactgtgcagaccggcctcaaggccaaggtgaggaactgggaaggccacctcgacggctgtgtttcttgtgtagagaattatctcagagagaagcgactactataatcagctgaagcagaaaggcgtcaaagtgccccccctgcaacagtcagaggccttcctgaccagcaaatccaagaaggggacctccaagtaggcccagccaggcccccaaatacggtcagcccagcagaggccggggcccagctccagaaccacccgcccccaccatgcgtcctgctctcagactcagaattaaaccccggtgttggcactgtcccacctttttcttctctgggatccacgcgggggcctactctcctctgcgaccttgagctacaaggacactccccattccaaagctcactcacagggagtcagcacaccagcctgtgcccctagctcctaacaggtccccttgcggcaccaggctgccagaggcctgagccggggtgtccgcccagcactcagcacagacctcacgcctgagcagaaggggtctgtgaccttctgccctgggggctctcctggctggggcactctcttgctggaggacccctctggaagatggtgagggtggggggctctgttcccatccccccgctcctggaaggaaagctttacgcacgggaacggtgtctgtggtccccgacgcttccccggcgcctctgaggctctgggcgcctgaacaccttcggaagggactctccccatcacccttctctgctccccacccacacctgcttcccttcccgccgcgagcaccgagcgtgggccacgtgcgggcgccacgcccctcaagccccggaggaggacggtccccgcggccgggtccccgaacccagcattcaggcccagacgcgcccagagcctcccgcagtctcgtcggcgctgcagccgggtccccgcggggctgggaggctcgtggcgtcggaggggctccagcaggggtgaaggaggtcggggaccctggaggccccaagggcgagccgtctgggggcagaaagtgcagccctctgcagaccctgcccggcccccctgcacctcctggccccggggctgggcggcctagagccccggccccttccggacgaggcgtctcccggccccactcgccccgcccccagccccttctggaccaggcgcctccccgctgcggccctagcccttccccgcatggccccgccccctctcgccccgccccctctcgccccgcccccggccccttctggaccaggcgcctccccgctactggccccagaccttccccgcatggccccgcccaccactctagccccgccaccttccggaccagacacctccccgctgctggctccagcccttccccgcgtggccccgcccccgccctcgccccctgcccaggcccggcccctgcggagcccagagacgcggggacacaggtgaggcgcgcggggtccgggctgcggcttcccggtgcggccgcagtgggcaggtgcgactgtgcgcggcctcgctggctgagaactggcgggggtgggggcgtgccctggactgacccccaccggcctaacccgcggtgcggggccagggccggaactgcccgcccggctccttgcccggctccttgtggctgctggggacccccgacaccagccactttcccttcccggcccttagcaagatcggcttctccggtcacctttatttttttaggctcgaggcgtctgccgcacctcagcccacgacctgccccgctgggaggtgcgggccgctggccaggccctgaccgcaacctggcccagaggccccagccctcaggcaaggttctccgggtaagtgtggggccctgaggcgctgtggggtgaagaggtctatggaggggcgcctgtgtacctagggccttcctgcactcacaagcccccaggaggtgccaggatccgggagcctcccagggcctggaggggagtccctgatgggttcctgccgccacacctgtgaccatcacatgagtgtggagagacgtttactgagcaagtgagggaggccagcctcaagggccggctctggtggctgtgcaccggggtgacttgggaacaacgtgttctacgtcagcaagacaggaacccatgatcccagagttgaacacactgggcttgacccctcccaccgggaggcccatggtgggctgctgctgtggacttggagcctcagcactcccgagactaatgctgcgtggatgtcgggttgcaaggcggctgctgcagctccagcagctccagccatcacgtcgagtctggaagaaggaggtggctgctgctgctttcacagaagcaaactctcccatcccctgctgcaccctggctcctggaccccagctgggtgacttgggaaagcaggggtggtggtattaagcttgtcttacccgggtcatggctgttacctggggctggcacattgctgctgggaccagaatgggattctgcacaccaggcaagagggcgtgaacctcgggtaggcagctgaccgctccacatgctccgggaaaacagcacccatactccagtagaggctgggcctctccgggcctgagtgccaggctgcactgagccagggctcccaccgaaggcacactttatggctttgagacagctccttctgcctctctgggctttgggggaaggcagacatggaagtgccgggagtctcagaactgcctggggcctgagtttctgagctggcttcttgcaggggagtggctgctgtgcctttaggcctctgtgccgatgacctgggaggaaggtcagccttccccgctggagggggcccagcaaagcctcagctcctagaagtgaggggcctgccattgcctgcccgaggaccccactcctgggggccagatgctgagaggggacactgggggcccagcagaccagagagctgaccccagtcccacagcctgggtgggttgtcaacttctcgtgccccctccaactcctccacccccacacccccttaggtaaataggaggtcgaaacagaggccagagggtaaaggaggtgcttagagtccgggctggctcaggccggccgggcagctgtgctagtgcttggagttcctgctcagtccccgtggtctcctcgcccctctgggcacttgggctgccaggcaccgagctgagtgccgagatgcaaagatgagtcccaggtctgcaggagttggagcccagcagggagctggccttggggccgggcccctcctgctctgggcagccacccagccctacgaccctcctgtctctgtagggcctccccaaggccttgaatccaccccggccccgtgctcagtgcatcgtgccccccaagccccagccctcctagaggtgtgggtgggggaggggctgcaacccacacaggctgaggacacagctgctgccactgcctggggccagccacgcatcctccccagacagggaccggtctagctgtaccagccgctgccccggacctgctgccctgccccacgcaccccccctcccctggccagcctccccagaggccagcaggcgccttatcgggcagggttaaggagggggacagttatcaggggctgcagcctaggttgggccacaatgtcctcgtctcttgagggtggcaggctgtgcaggctccctgataaaagcaccggggaagggaggctcctggagtgtgctggaaggaaacactggcctcccacatgcctgaggtcagggcttggcctgagatggaattctcgcttggtcccatcctcccggcctgaccctgggcaaatgactctaccactttgtgtctaggtcacctgttaagtcaggcgacagacccggtgagggagtcagcccccgacccttagtgcccctctcctaacagcagcctcagagggggtcttgactgccgccctccatccgcttgttttacagtgaagccacagcctggccacctgtcttgatctccccaccgagaaggccccgcccctcccgctgcagccccacagcatgcagccccaggagagccacgtccactatagtaggtgggaggacggcagcagggacggagtcagcctaggggctgtgtccagcacagaagaggcctcacgctgccgcaggtgaggggcctgagggcagcctgccagccatagcaggctggtgtctccctccagagacgcctgccctaacccctgctaccggccccatcaccctccaccccatcctggctgggagcccacggtccagcagctcagcaaaccgcagcctttggccttccctctggttggctgtgggcggggagagcttcctctyractccagcagagcgcccaggcccctccccctgacccagaccaacggccacagtccacttagggggcccctcatgcggccctggcctggggctcacctccagttggttctcaccccaggatctcccagaggctgtgcacgggcaagctgggcatcgccatgaaggtgctgggcggcgtggccctcttctggatcatcttcatcctgggctacctcacaggctactatgtgcacaagtgcaaataaatgctgccccgcatgcacgcggggggctggccgcacacgtgagagcacaggcctggagacacaccccttgtacacatggacccccccacagacacggaccctgcggcacacacagcgcacagggcacacgcgctggcagccaggcacacgaagacaccaggtgcacagctgtcatcggccccacacgggggcgcacaaacacctggcacacagcccttcaaaggacctacaaacagctgggcacacgtggctgggaggcctgggcccagcctcagcaggagctgcaggacacacccaggctgggccctgcggcctggagcccccagctacagcctcctctctcccagggcccagccccttcccttgtgaaggccaggatgaggggttccttcagcggacaaaccgagcccacctccctggcagccccccggggtgggatcctcccggctgctttcctccgtgggagcagtgtgcagagctgtgtggccctgggcaggcccctgtcctctctgggcctttctgactcctggttttgtaagggtggctgtgtgtcccccgcccttgtctcagatgcaccatatcttccttagtaagtgggcacagttcttcctaggcagcccaccacgcgcagaggctgggtgtgtccctcttggggccggcggctgccagggaggacccgggtctaccctccctccccagggatgggcctggtccctccaagtactccttgtgggccaagagcctgtgtacagaggcattaagtgtctgttgaatgaacggtggatgacagcccttgccatagttacctggccaggcgtgacatccaggaaggctgtgggaagggcttgtttccccggggcaggcccccctcccatgtggctctaggaatgcacccctaccaattgggccctctggcgaggacagccggcaggcctggggacccggatgtggctggacctcagctgtgtcccagggacttcggtcccattccccccaccccgatcctggcctccagtcccagcccccggtcccaacctccattctcttggtaggtgctttcctgggtcttgtgtttggccctcacctaccacaaaagatcccaaaaagccttgccagaaacatccccttagggaaggggtcctcaccccagggctgggggtgggagacacgggcagccactatcctcacgggcacagagaagggaggccacagggccagatgaggttattggagggctgaggctgcgcctgccccaggccaggtcccgccgaaagcatcaagtcaggtaaacaggaggggctgcgccagtcttggtagggaggcagactccacatcatccgcctttggggcgagcaggctcacttgagatctgcctgggccagccggtggcaggtggagctgcatggctgattgcacactgccccaaggctcctggctccaaacccaaggagggagcccaagggcctgtcctgggctgcggtctgaagcaatgatgctttcctgggagcctgttgttgggtgggctgctgcctgccccagccccatgacagcctggatcttcaaaaagagatccctacctctgacctgccactcccaaggagggaaaggagtagccagctggtaccctccctgaagcccagcttcacaggacagcactgccttggggctgctgtaaggaagtggcagaggccgctgggcccagcagtttggctgcatgggccccagaaggcagcactccgacctgggggtcctggggctgggcctccccaagaactggtgcggcccaggagacaggcgagggcacaggatggggatgggagctgtcccagttctacagtcagaggggaagtggccctggtgcttctgccacgggtcccgcatgccagtgatgcccacgcacccccacaaatgctccttcccacctgtcaggggctggcatcagatggcacaggcgcatgtcgggtctgccctggatctgtctggctgcatctgggtccgccctggcaggggcccagcatcttcagccaggggctccaccagcagccctgccagccccagcaggggaggctacaggcagacacccacgggtgctcattgggccaggcactcaagtaacccacagccgcctctcgggcacaccacttgtcccctaagtgaccatggtggagacagcagctccagccccagtacccccagggtcatggacctaggctgagctgagcagtgtccttacagctctgggagggttggggagaggatgggacaggaccctgctgagtggccgcctggcctaccctcccagagactcacgaacaggaggatctgctgtggatgcgtctggggcctgggctcctctgactgtgcacctggggtatccaggcagcccgacacctctggtccaccttgtgctccaggcaggggcccagcagggtgaggccagttcccaggacccctggtcaagggcaccagcttccccatgacagtggcaggtgcctcttgctccctgctggcaagatctgggtggggacaggaggccctcagcctccccacatagaagccaccactgggctagagtgagctttgtgacacttcgagcaacaacctctggcagtgccggtgggaaaggatctgctgggccaggtgcggagctgtttttattagtgagtcggggggtggggtggggtgaagaaaacatcagagacacctgtgctgcgagttaaatacatttccagcatctcacgcatcacaagctgcatcaggaaagggcacagcatgtggcagcctcatccacacccacgcagtgacagatgtgttacagcatggacaccaagtccccgggagccaagatggcagctccagcatccctcccttcctcccttcctccttcccgggctgggccgggccatgcagagaaagggcagcctctgccatggcagccccaaatcacctctcagagcaactgtctggggtccccagccccagaactccagcagagtcctggcctggggaagcccccgtgccgcctcaagcctccagcagggcaggcccctggccaactgtggcatctgccttgactgcccagagcagcaggaatcaggttttgggaggacacaaggcaaggcagtcatctgacacacccacggcagtccagctggcactgagtgtgtgggcctcgtcctgtctggagtcccctccctcccacagtgggcgagacgggaaggcctggcggtgaccagacaagtgggtccaggtctcaaggcagcctggcccatgtcctgcaaggctctgaagagccacccagctgttagtctgcccactgcacagggccccgggcctctcaggttgacaactaaaggtgtgtgggctgtggggctcttgcagatgcttcccaaaatcaccagtcatttctacagacacagaaatcgagacactgaacagagaacaaatggtgtcattcgataaagctgatgagtctgcttctcacatggcacccagatcgtaaggcagtggggtccgtaaaatcatcgcggtggctggccgtgtcctcatgagccaagcacactgactcccgggagtggtgtgcacgcacatgtggtgcctggacatacacgaagacacatggacgtgggggtctgacctggacattcacaacggaaacgtctacaacagaaggcgcccaggacccacctttctggcgcataaatgaagatttttggctcaaaaacctaagcatcctccagcttttgctaccatctgtccctcggctggctgaggactgccgatgcttcccaagcagaggcgtctggtccactcctggggctccacctgcctgtcactgcagcaccagcgtgcacacgatggaaaccccaccgatgccgctctcctccgcttggccccgctgagccagggtgaggtgctgccactgccttcagcctacaggctgcttgcctgaaggggtctccacatctccacccccacaaagcaatccaacagcagtatgaagagacgcaattctgccaattctaaggtcacattaaaacttttccccccaagattatgatcactgccagctggagaacccaacgcccttgcacatgccaagctgcatcctggcatgatatggttttacaagatgctgcgtcatagaaagtgaccgtgccgttcaaggaaacgcacatcggttggcttcccaagttttcgggtctccgaaccagtgacagtcacgtgtcgctcagtgacacatgagaaacgtgtgcttagccgctgctgtgtgatcacagagtctttacacaagcctcgatggtgcatgtagttttatttatgtgttttcatctggaaaaccaagtgtcccagcagcatgactgaacatcactcacttcccctacttgatctacaaggccaacgccgagagcccagaccaggattccaaacacactgcacgagaatattgtggatccgctgtcaggtaagtgtccgtcactgacccagacgctgttacgtggcacatgactgtacagtgccacgtaacagcactgtacttttctcccataaacagttacctgccatgtatctacatgattcagaacattttgaacagttaattctgacacttgaataatcccatcaaaaaccgtaaaatcactttgatgttgtaacgacaacatagcatcactttacgacagaatcatctggaaaaacagaacaacgaatacatacatcttaaaaaatgctggggtgggccaggcacagctcacgcctgtaatcccagcactttgggaggctgaggcgggtggatcacgtaatcccagcactttgaggggcagaggtggacagatcatgaggtcaagagatcaagaccatcctggtcaaaatggtgaaaccccgtctctactaaaaatacaaaaattagctgagcttagtggcacacacctgtagtcccagctacttgggaggctgaggcaggagaatcgcttgaacccaggagacacaggctgcagtgactcgagatcacgccactgcactccagcctggcgacagagcgagactccatctcaaaaaaaaaaaccaacaaaaaaactggggtgaaaatctaacggataattcagcattgccgcatagaaacctccgcaaaaccggccaaacaaacgcggacaggcggccctggcgtcagcgcacgacagtcacgtggggaggggcagtggccaggtcggccttggacgggtacaccaccttcaggctcccttccagatccaccacccggacctgctccaccaccagaagggagggcccgtcctttccagcactgggattcgttgtgggatctggaagttgtccagagactgcatcggcttcagtatctgagagtgatccttcctctttattttctaaagtgtactttttcatttctgccattttctgcaaataaaaaatacctttttaacctggagatgagaggtgacccagggaagacatgctgctgtctgccaacacagtaagcaaaaaagaggcaagcaggacgggtgggaagtcaaggagcagagcaccactcacgctcaaaagcgtttctcaggaggagccaccccacactcaccagaatgagggcatccatgacatccttgcaaatctgcagactggtggcacttgttacttccaaaaacaaatcagaagtcgttttcttaaccttaaaagaaaaaaacatttcagaaaagaacagttatcaaatgtagacatcagcaactgcaacatttgttctcaggaaaaatctacaaaactgtgtggccaggcacagtggctcacacctgtaaatccagcactttgggaggttgatgtgggaggattgcttgagctcaggagttcaagaccagcctggacaacacagcaagaccccatctctacaaaaaaatacaaaaattagccaggtgtggtgccatgcacctgtggtcccagctactcaggaggctgacatgggaggatcgcttaagcccaagagtttgaggctgcagtgagctatgatcttgccactgcactccaacttc

SEQ ID NO: 97552 - DNA, 69066 bp, Homo sapiens
aatgtttattgaagtactgaaagaaaatatacaaaaatgtattaattttagatcaataggatgatatggaaggtatgctatttcgtctactttacactttaaaaaattttttttacagtaggaatatattactttgataatcaggggaaaaatcataccaaattgaagtttctcataactatgaaaccaggttcattatgttccttatatatgtatgactacgatttcttagctacccttctgaacactgttctctccatttttgaaatcatcttgcatctaaatagcaaatgaatctttcttaaatacccactcatttatttcttatataagtctatattttccttttgcttagtcattttcagtactgaattatgtctatatatcaagtctcaacttctttggtcccataacacatatccaaccttgtttcctgtgaatttctaagctagttagtcacgctcccaggatcattaacaaggtcagtcttctggtcttggctcttttgtaagaatccaacagtatgccttgccttctgcctattgaaacacaggctaggcttagcttcttctctgagaccttttggaatattctagctctcaaagatgttttaactcttatttctgtagtcctgactccattccatgtaatttaatgtttgatcacacaaagtttctgggttcttgatatcaagagctctgatttatacttattttgttgtccctactttctgcccagaactagctcaatagtaaggaccctctaagcattcatcaaatacttgctcattaaaaggaaaatgcttgaaaaccaaatatcatatcacgtgctgcaggtaggtagcaattaagccttctaatttagtttttctaacttttcagagcaaattccagattatcctatatatttccatttaaaaataaatattgctaacaccattgggcaagtaagacatatggcaatatagaatgctttggtagcactatggctgtgacttaaattactgtggatcaaactgccagaagctgagaagataactgaattttcctcttcctttatcctctagtgaggacagaagataactatatcatgcctatcgatgaaaatatttaacaataaaaaactgaaaacactgctttataacttaaataatatagtcttactaccaaatgttttagtcataggatctcttggaagcttgaatggaagcaaactttagggttttaattatggatgaagccatacaattctggaagcaaagtataacaagcagccaaaaatgttacacatatgattctactccaaatgggcacattggccaaatggtgaggccccgcacaatcatacactttgaccactcctccatatccatcaagagggagctgggaaatctgttatcatagatatgaattctgtgtgtttacctagtcagacaaaatcaaattgttcttgtttttatgatgtttgatagttgtgagttggctctcaatatcttataggtactttatggcctttcaggatttcctttcaaataaaagaagatgaaagatggaaaggtacatcttctgtttcttacttcttgcaaaagggtgaccttacaattccttctgtagtcattgattttctagttgattgcaaacatttagcttaagcaaagttcaatttttttaatttaaaaaaatgaggatacatatgctacttatctaactgacatgggcttttaaaaaagatgctgctttagtaattctacttattactgagaaccaataagttatataaatcaattttatgaaacttacctaaaagatttttgagaaggtgggataaatctctatattcaagtcatggaaacttacctttaaaagactaaggttccttttaaaagcagtctcaacagtttggagttgagatgccttttctgtgtgttgatcacccaatttattctccatttgttgaagtaacattaatctttgtgatactctagaaaaaaaacgaagattatatagagttaaaaaagtaaaagcaaacattttactgcttgaccaatataaaaaattcatttcttaattgcacctcacttcaactctaacctattctgaaagtcaattactatgtcgactaataagacagtgaaaaatctgaggtagttcaataagtcttaagtcaatctggttaaaattatttttattttcattaacatattctttatatatgccataagtacatgcttctgtttttttagcctctctggtcttttgaaattattttagaatgttgaagatatgttttaatttttggtgaaaatgcaaactgtaatacatatccctttgtacacatagttatatatacctcccgacacacatacattgatataacttgctatatgaaaccttctgcttaacacttcagtacccctgaatctcatgttacacatttagaattgtgctaaacttccatatgtttgaagaagcaataaaaatattttttccctctttttccaagagaaagatgatggtttgatatatgagtgagaggctgtgtgtatgtatgcatactcacaacaaggtaaaacagtaattgaagaaagatgtaaaaaattacaagtaaacatcttcaaactacttcgttacatataatatactttaaaagtttcttgctggtcaaatgcttattttatatgtttttgttctttttaggacaatatgtaagatgattaaaagatacatacgttggtatacataacagtcaaactgtttcccaaatagttgtggaggttctcaagaaacactgtgtttcatcaggctgtcttaaaggtggaattaaaatctcaggtctatgaacagtcaattttttggtaaggaaagtatcttaggagccaaggaaagaacgtctggtaattaattaaagaaaaggaaaacctgaaagcccacaaacagaggaggaaaagagtgaataatacaaagcaaagagcaggactggctacacaatttgcagggtccagtccaaaatgatgcaagacaatggcatgagagcattaaaccaaatgcaggacctgtgactgtatataagtcacatacccaagaagccagccctgtgtaagaggtttagagaagcccattaaatgccaatgtggagcctagaaagggtgggaggaggggcaaatttatctatatattacttacaaagagtaaaaatacatagaacataccttttaatcttgcttattcataagaaacaatgaaattccctaacactaaaacctcttaagtgtcagaaaattaaaatgacatgcttgcaaatttttaagtcatcctgtgtatacaatatttcactaacaaagccagtccaatttctatatctgaatcatccctttaaaaaaacttacatttcttcatgtcttttagaaaggcgaatttcttgagcaaacaaggaagtcatctttaatcaaagctgtcataaagaataaaaacatttaaagttacttctaccacatgtcctcagctttgcaacatttgattattttagtaccttaatccattggttctctcagaagagaaaagaaaacttaagatgtaataatgtataaaatgaaaggatgcaattaaacacatttttattcagcatgccagatacatctaagaatactatgaattaggtaaacccaacatatttcatattgtcttctctttctagactctaaccttaatcagaattaaaaacaaacaagcagctggtactaagactactaaacgttttattgaatcaacagaaaaaaaatctgctctgtaaaattcaacacaggaacaccatcccttatgcatgtgcaaacacacatagacagaaaggcaggcaaacaagtatgagaaccaactggaaattcaaggtctttcctttattggaagagtgcccagttctaccatctctcttctaaataggaaagtacttttcatgtgtaactgcgaggaaaagcacaattagatagataccttccccttcccctggctgctaagcactctcatttgtggagtgcaggaaagcccattttcgtggcacacttcacaccacgagcaagctcaccttggctaaagacactggaccgacacagacagaggtctagtgaaatgctctgaaggcctccaaaactgcaggcaactcatctggttgggcttaaaaggttaaagtgcttgccctaagggagaaaaagaggaataaaattccttcctgaaatgaagctttcctaaattttatgaaattaaacatctatgcactctataaagattgtctaaagattgacacaccgcctgagtgtccagtcctgctagaaagcccacgcttattgagtgtagggtgctgaacccggccaaggaaaacggaaacaccgccctgccctcattaggtttcctcctctgggcgtggctgcctttccttcagcaccgcggacagcaatcgctcacaggcccgccctccggggtctaaattacagatattttccgctaacatcacccgcaggccaagtcttgccgccttcctctcggtttccttttgcaacgaggccaattaatgcagcgccaagggaatcccggaaagtcggttcatggtaacttttctgtgaggcccactatcagcactttagacaaaaccaaatcacattctccccttagaatcgaagatccgcaccttctcagagtcatctgccctccggccgccccaactcccgcttatacccaaaggactcatgaaccttcctcatcagcctggctctttacgttaacaacatcctccccagcggtcctgcaaggccctgcgcggccgtcaggcagtcagggcacccacccactgtccgactccactcaccgagcccgcctctgagcccttccgggaaggcaccagctactgcgccgacgccggggccttagcgcaggccagggcgtggtcacgttaccatatttgcgcacgcgcggcgcgcggtgacgtcaccgcatctttataaagggccgccttggggcgcgaaaagttcgtgaggtgtagtcgcggcaaccaggaggtgggcgtgtggtaacgcggcgcgcgggagggtggcttgaaagggtctttatgaaccctagggaaaggccgtctggtaggaactccatttcaagaccttttaaagtgagacctgcatatgttgaaagagtttcagagagtgaagctgggttcttagaagctggaatgtcccagcagaatgtagaaatgcgaaaaattcggcacagtagtctaaagtgagtcgagtttacagtcggtttattcaacgaatgcctgtggagcagtttcgaggtgcttcgtcctgggcgtcttatactgagcagagcagcaagagcccctgcctgctcatagttggtagaccctgtgttgacagtagtattgcttgatcatgccttgcggggtttctgagtgtcagtcgacatatttacgttggttatctcattgagtccccgcaaagccctgtgaaatgggcacattagcttcatttgacagccaaggagacaagcttggttgttaatttagcactttgtaatatctcgtttctgtaaagtgcgtttcttaattttcgttccttgaaataagtatatggtagtgtcagtcctctaatatacagaggaagaaacaggttcaagagaggtaaagttgttttctttataaattatactctgctggtaaaagacaaagagctaggactccaaaatccaaggtgttttttaaattttctcctcgtagaatatttacataaaacgtagctcttgcgtcaggacttctgcacttaatgtttcctttgcttggaaagccccttctgacatttatagatttgattccttgtatctttcgatctgtcacctcacaggaccattccttcaatctccaatataagaatatctccacctcctggctccctatcctccacctgctttatttttttccgtaacacagtaacattgcatatattgtgtaatcactcatttatttgtttagcaggtgcacccaccactagaatttgaacatcctaagaacaggtatttttgtctctgctttgctgatgtatcctcagcaaccggaactgcctgacatgtaagtgctcagtaaatatatttgaatgaacgaatgaaataattcctcccgttaacattcatcataatttcagagtactctaacttcacttgataggaactttgattttgctgttccttacccttaccacttaggaaagatgaaaagtagacccttgagtggtcctctgttctaggaatgaaatagagcttttgcatggttataaggaattcttgtttattttttatgtacatttacaaataaggatttttcttaagttggtaatgggttgcatgaaaataataactgtaggctcattacagcatttgtatgttgcttgacaaactgcttacctccctgctttgtgtaagtttgcatagtaacacagttgggacaaatccggctctttcaactttgagcccaacttttgtaggtcaccatccgccttagctgtgaactaaggaataccttgggagttttcttgcagtttttaagaacagcaatcaggaatatatcacagacacttgggggttatctagatagactttgataatttattttatagcatccaataaaggtggttactttctacttaaaggtctgtgatagctgcccttctcattatattgcccacagctgatcctttctgtgagacaccaggctgttgaggaagaatctatggcaacattgtatctattaatatacagcttctgtatttatcaggtaagtttggatactttctggagtgaggcattcacagccatgaaaattattgcaacctactaagtaacaactgacccataatgagataatctgcaaaggtggtgtgaaattaatgtttcctaacmcctggactagttctatgcaccagcatgcgataattatctcctcagcctcatataatgttctataattgcccccagcttcattatttagaaaacattgtatcatttagtcatacattctataaacatgtatgtattaaacatctgtaagatgtaatctgcccttaagagcctagaatctggctgggcttttaaagtatacacaaaaagctggaggatgatggctgacaacataaaaaatggtttttattgaatgtttattctgtaccagacactttccatgaatcaccttatcctcataaaaaccctatgagcaagtgtgccgaagtcttagtatcctcatttttatagctgagaaaattgagacttagagaaattatttacttaagatcacactgctagtaaatgaacttcaaagtgtttgatgttagtattctaaataattctgtatgttatcttgaggttatagaattaaaaagtatgccgattatgaggatgatagggaagacaggagagagcactatgagctggaatagtatagacagcattttgaaagactcaggtggaccttgaaaaatgggctgatttggaagtcattttgtgattgggtgtatcaggtggcaggagagtgtggtgtggagtgttctaaatgagggaagcagcttgcatagaaatgtgtgcatgtgagtacatctggtgtgaggcctaatggaaaggaagcattgggaagaatgttttctcctcattttccttaattttgaagatttcatttctgatgccatataatttgaaaatggaggtttgatagtaataaagagatgaaattattggaggaggtaagactggtgagtagaaaatagaaatgaagacagaaaaggaaggcttgaggatggaaaagaaaggacaagcgttaaagagtaagaaataaaaaaattgcagaatccttgactatttcaaatactccaagttattaacagtaaattctgttatagtttatataaaggccatctttttagacccactttgagttttctctggatagacaagtactaaaaaaataaagagctcatgactgacatagtttttcttcctatttcaggaratcctgggtgaaatttggtagtgggtccaattgcctgcgtactttactttgaaataaaataatcagaaatttaccttgttccataattatagtctgttcrttttattatggtaaaatattctatactcaaaatatatctgaaatgctttaaattggccctgatggatattgagtagagagaatttataagcagatacttctttagagcttttgttagtgaaccaggtatcaatttaggttcaatcagataaaatgctgcaatagagaaatcattctgacrgttgatgtttatgttctagacattctcagcggagatcttgctgataaaactatgctcaatcctagagattgccagtgagaatttgcatatgcctcttccttccttggaaaaacaaaaaccgcagtagttgtaaaatgcacttgagaaaacattagaaattttaaattgaaagcacgcatgttgattcttaggaagtcatttgtttgttgtattatagcaggagagggaaagtgtcccttctactctctttgaacctttgtggaaatgactgacaataaacaaattaataagagaaaaaggaatatgatatggtttggcttggtgtccccacccacatctcaccttgcattgtaataatccccctgtgtcaagggtgggaccaagtagagagaattgaatcatggtggtggtttcccacatactgtcctcgtatagtgagttctcaagagatctgatggttttataaggggtttcccccttggcttgtgcactcattcgcttttctgctgccccgtgaagaggtaccttctgccacgattgtaagtttcctgaggcctccccagccatgcagaactgtgagtcaattaaacctcttatctttataaattacccagtcttgggtatgtcttcattagcagtgtgagaatggactaatacagcatacaaatatacttaatgtgcataaacacaggagccatataaaatatgaggctcaaagaggggccggatggttgaggcttaaatactccagcggggagagggaaatggtgaagggggtgctgtagacaatttttagagaggtaatacatgactttagggaagatgaatggacctgggaggtagaaatactagcttgtaaatgtttttctttgtaatttgagcctaacaggcagaacaaaatcccttcaggtgtggttacatgcctcagtcttctttcctggtaataaaatttcaaggaggggatggaaggcagttgtgttctctttggtgggccaggtcttaaggcggataaaggaatattaagagttaaatttcaccctgttctgggggtggggagaagggaggacaggagagattagaaagtccttgattctgggattataggtgtgctgtggctcacggctataatcccagcactttgggaggctgaggtgggaggatcgcttgaagcctggagttcgagaccagcctgggtgacaaagcaagctcctgtctcaaaagaaaaaaaaaataaagaagaaagtccttgattctgaggtaatttctaaggccttcctattatggttcaaagtgttcagcatgccaaaacgccattcattttgcagtgttgttttctaagccccaacagtatacatagtaaatgtgtatgcacatgctccttaatgtgtgatgaggttacatcctgataaacttactgtaagtcaaaaatattgtaagtcaaaaatgcatttaataccctataagcccattgtaaagtcaagaaattataactcgaactgttgtaagtcagggaccatctgtactttttacttcacaaatttcagtaatttagagctcagacaaacccattgtcttaaatggacacttttccagacgtataaaatttatagaaggttttattttttttttcagtcctgtttccatgattttccagtggctctcagtacattcactagtctctatgactgttaatccaggcttttcttgaggtaggcgttttctcgttcacggccttcaggcttgcttatttttttttctctctgtttgttcctctttgattcttataatcctgtaataactttattagtccacaattgagcaagcaattaagaaccttcttaaatgcgtacttgagtactgtacttgataagtattctgctattgccatcttcttgtaatgctacagttgtgtttattgaaaacattcaaggctctttgcactagcctgtttttcatcatcattgtttgctgtgtgcatccacttgaaaacttgcatataatttcctttgaacaagagttgcagttttactggattgcaacttctttgtttcagaatctaatgatgtataaaaatattgttagaaaaagctgttgtggtttaatgcatttgggaaagttaatttaaaaaaacctatactctatttatatgagaacagtaatattttacctaatttttggaacacttcatgtgaatacatttcttctgtgctagggcatcaagtcttattttgaaatctaatttcatttttctcttcagtatccctttttaaaatagatttttaataatgcctttcttaaattgaaagctgagtaattgtactgatggcttattcttacaaactccctgctgaaattgggatttgaatgccacttttaacataagaatagtaaaaagtttagttagttgaatatgcagttgggatttagttaatttttctttttttttttaattttttttttgtttgtttgtttgagacaaaagttttgctcttgttgcccaggctggagtgcaatggtgcgatcttagctcacctcagcctctgcctcccaggttcaagcgattgtcctgcctcagcctctggagtagctgggattacaggcatgtgccaccatacctggctaattttgtatttttaatagagacggggtttctccatgttggtcaggctggtcttgaactcccaacctcaggtgatctgcccgcctcagcctcccaaagtgctgggatttcaggcgtgagccacygcacccggcctgggatttagctaatttttcataatcatatttttcatatgtgaaaaaaatgaagtaactactgaatatctttttatttgggtctgcttttcttggactcaaaaaaaaaaaaaaacaaattgtaggtcatgaaatagactataacctgaagtttttaatgtatttcccaaagtccagatgtgtattaggttgttcattggcttgtttatatcgtcaaaaatagcgttttaactagtgtaaatgtaagtcttaatttttagtcaacttaaagtatttgcagtaggtgtaattgctaacagtaatttgaaaaattgcatgaagttatccttttacagtttttttgtctgatgaatatttgtttgatgtgaagaagtgaaacatgtttgcctgtatgccaaaaattttgaaaagaagtagaggggaaaagaaatggattcattttaactctagatggcagttaaacacaactaacaaagaccaacttttttgaaataaagagaaaaatagtaaaacacacacacgttctgttttactatccagttaattatattctcaaaatgatgtctcagattgatattactaaataaacatttataagatgtaattacataaaggtgaaataaataatgaaagcctgtaattgcaataatttttttttcacctggtaatatggcatacacccatgcaacggtttatattgctagtattttattttgtcacttttactaacatttaggtcagtgtagtttcattttatgtacaattatttaccactatcaattcaaaccatatgccattgggaaaactattacacatttaatgttttgaaatgtttaagtagaagcaaagcttattttcatgaagtgtgttccataaaagtagacttcaaaatctgccatagatatccatgcatgtacatttgagatcgcatttttctttcctttgctttgcattaaaaatatatttttacatctgtttaattcacaattttagcttgttgctttctggggtgctaaaattatgtttctgatggtatttatgagggaaaagaaaagcttgtttgattatactttgttctcatctcgtggtctcagctcgttgtgtactgtcatttctatagacttgtagagtgcaactgtttcttgtttatgaacaccatacatttatgtggtatctagcaaatagtacaaaaataacttaaagtagacctaaggagtctcatctgacttgtcagatagcttaaaaaaggaaaggatgtgatatgttttaaaaatgctttattgtagattttatatgaaataacttaatccttttgagaggactagttgatttgattctcatttcctatatatagcaatttatgctctgagtatctgtctgaatagtggattagctcatacatggcagctgatgccctgggtgaagggacttgctctccacttttgtaagccctgtgaagttgtaagaaatgttactgtcatgcataaaggtgtggaggtgcaggtcaccctactggaaactaggaccttattggacacctcagatcttggagtcagcatttgcctaaatgttcagtagaatctccaagagttcctgtgcctttagaattatttacctggactccaaactcttcatagcagttattgtttcatamtgggttcttcatggatgctagtggaatatatttaagttggcaaaaggataaacactttcttttctttttaaagcaacataaaaagtcccatgttactcaaaaagtaacgtaaaagaatttatccatttatttttagagaagcttctagtagaattctataagaataaatagagttgctcacttccaagattgttgccttgcaagaataaaaggtgctggagawgctgattttttttttttttttttttttgagacagtcttgcactgtcacccaggctggggtgtagtggcacgatctcggcccactgcaagccccgcctcctgggttcacgcccttctcctgtctcagtctcccgagtagctgggactacaggcgcccgccaccacgccaggctaattttttgtatttttagtagagacggggttttaccgtgttagccaggatggtctcgatctcctaaccttgtgatcctcccgcctcggcctcccaaagtgcgggggattccaggcgtgagccaccgcgcccagcctggagctgctgatttttgaggtaaagacagaaacctggattttcatatgaagtcatcttacttctcagtgttagcaagtcattcaagtaaaaaactacaaagcaaataacttaaaacataccagcagactgagagtttgtaatctttaatgtatagcactctcattttttagctcatttaaaaataacatatattgtaaaattgattgcttaaaatcttttagttattggatacaatctggtgatatgtgaggttatactttagttattttaaaatcagattttggggtttttctaaaagacttctatttcgtatccaccatgagtgtcttgagtaatatctttggatatctgatcctatcctttacatttttcttcctaatttcatgatcaaagaataaccttaaattaagttatgggagtgtgttgttataggtacagtgtgctacctaccttgtgtccaaacatgcaagtactaaagaaatgtgacaccttcatcattagttttctttatcttacatttttccttctacagtcttctctatggtcttagtgattttttaaaaacataaatcagaatttgtaactcccctccttaaaccctatagtggctttccattgcccttataaaatacacactccttggcatggcctctaaggccctgcttgatcagatccctgcttacttctctaaactcatttcttaccaggttcccctttcttcactcttatcttgctgatgtacaccaagcttagtcccatttcaaggactttttcacctgatgttccctttgcctggaatatcttccacagagctttatgtgttctttgctagtcacttcccgagtgaggctttcctgtccaccctgccaaaaacaattcctttcaccatcattttctgtcttcttaccttgctttctttatttatttaaagtaatacttaacctctgtctgatatatatttgcctacttgtttgtctttcctctcactggcatatacatacatttcatgaagacaggaactttgtctatcttgctaattgctatatcctcaatacctagaagagagcctagccctattcagctgaagagaagtgtaaaataaatgaataaataaagtctaggtaaccatggtgacactgaatggtagaagacagacctcaaattggaaagggctgcagaagcaaaactatgaagatactgtaagtatgatgctggtacctcaatgctgtacatttgacatatttacccatcatgtaacccatctcacaatggctttttttcagtttttgttttagaaatttgactttctatatgatagaattaaaaactggtattttaaacatgctttctagaactacattcacataaatgatttactaaattcataaagtgtggtttttacatgtggactactataataatatgaaatgtattagaaagttatcctttctgaatcaacgtagtgttgacatttgaaggtcacagtaaatcctagggatgtgttttaaatgatacagtcatgcactgcaaaacaaagtttctgtcagtgagattacttgtaagaaggtggtcccataagattataatgccatatttttacggtacctttttaatgtttagatatgtttagatacacaaacacttactattgtgctacagttgtctacagtattcagtatggtaacattttgtacaggttcatagcctagaggcaataggctgtaccatattgcctaggtatatagtaggctatgccctctaggtttgtgtaagtaactctgtgatgttcaaataacagtgaaattgcctaacaatgaatttctcagaacatatgcccatcattaatgtaagacatgactgtactttgaattgctatcagataactaaggattctgagaaataagattaaataattatttgtatggtatttgctttgctttaaatatccttagtatgagtaagttcttggtagagaagtaattcacagtagacacagcacagaaaatatgttatatagttaaagtattttagcattgctgaaagatttttttgaatagtttttgttacagtttgttttgcatgtgaactctttatgtgtgtgagaaaattctctacaaaagatgttttaggggtataatgatggaacattcacttatttcatgtgcccaaaatattatttctctctcaaaaatatataattttatggttcagatgaatttctgacagctgtgaatgctttgtaattcattttaagatcaccagttcttattgatattttaaaatatagtctgttgagagtacttatgtgactttatgggaaggtttgtgaaaaaaattggtttatataaatttacktctctgccaactttgctgcatgtaaatatatccctatcaaatttctaccttcatcgggtaagggtagcacacccttaaacaaagtatgtacaggaaaagaaataaaaaaaatcagtaaacttcatatcccaggcatattccagtttatgctgtgaatagaactagggagtttgacctttacaattgaaatgtgctgagcccttagacttacatttgctagagaggcagtgtgttgaatagccatcttattgaatgagaacatgtagattccagctctagatttgctactgatgaactgtttcatcattggtaagaaaggcaaaaattaccttctttctctacgttacaggatacttgtgagggccaagtgagataatggatatgaaagtgcttttggaattggaagacactatgaagtgtaaggttttcattttagagtggctttaacagtaaactagatctattttcttagactgtatcacacatagtcttcttactaaggtggtgtaaaaaccttataaattgtttaacttagtatatgtgcctatcttatggactgagttttccttgatagcaagactgtggtgtattttagtcctgatttattctatgaatttccagcccttatcttttcaaagataatattttctctcatctttgtaataatatgagctgaaaagactgataagctctaaagtwtacttagcaggtgaataaaggtatttatacattgatttgacatgcaaataaagggttgttttttttttttacagtaaatcttgcaatagtgttcttagctttatttatatttttcattcagcgttgttaactaattttcccatgtcttttagactcagaattactgggtattcgtttttcatcctgraacttacacaaatgaattctcaaaagtcattgacaagtaaataatttaaacttaattttaaaacgttttaaactcacagagcaaagtttctcagaagagtagaattaacaaatcttggattttgaggtatattttgaaagcacaaaattataatactattttatctccacatgcgtggaatagatttcattatttttgacctattgcttaaaagagagctgtactatttgtattaaaatttcatgttcttgggatacttttaagtagagtgagctgtacaagaaaattctgatctttgagaagcagtgttttcaaggaaaatgtaaaaaaactgtactgactcaaatggtctgttttatagtctttattttttttttttttttaattttactttaggttctgggatacatgtcctgaacgtgcaggtttgttacataggtatacatgtgccatggttgtttgctgcacctatcaacacatcatgtaggttttaagccccacatgcattaggtatttgtcctaatgctctccctcccttttcctcccacccctcgacaggccctggtgtgtgatgttcccctctgtgtgtccatgtgttctcattgttcaccttcaacttatgagtgagaacatgtggtgtttggttttctgctcctgtgttagtttgctgaggatgatggtttccagtttcatccatgtccctgcaaaggacattaactcattattttttatggctgcatagtattccatggcatatatgtgccacattttctttattcagtctatcattgatgggcatttgggttggttccaagtctttgctattgtaaatagtgctgcaagaagcatacgtgtgcatgcctttatagtagaatgatttataatcctttgggcatatacccagtaatgggattgttggttcaaatggtatttctggttctagattcttgaggaattgccacactgtcttccacaatggttgaattaatttacactcccaccaacagtgtaaaagcattcctatttctccgcatcctccagcatccgttgtttccagacttcttagtgatcgccattctaactgacatgagatggtatcttattgtggttttgatttgcatttctctaatgaccagtgatgatgaggtttgttggctgcataaatgccttcttttgagaagtgtctgttcatatcctttacccagtttttgatgggttttttttttcttgtaaatttgttttaagttcattgtagattctggatagtaaacctttgtcaggtggatagactgcaaaaattttcttccattctgtaggttgcctgttcactctgatgatagtttcttttgctgttaagaagctctttagtttaattagatcccatttgtcaattctggcttttgttgccattgcttttggtgttttagtcatgaagtctttgcccatgcctatgtcctgaatggtgttgcctaggttttcttctagggtttttatggttttaggttttaagtcttaaatccatcttgagttattttttgtataaggtgtaaggaagggatccagtttctgttttctgcatatggctagccagtttcccagcaccatttattaaatagggaatcctttccccattgcttgtttttgtcaggtttgtcaaagatcaaatggttgtagatgtgtggtgctatttctgaggcctctgttctgttccatttgtctatatatctgttttggtaccagtaccatgctgtttccgttactgtagccttgtagtatagtttgaagtcaggtagtgcaatgcctccagctttgttcttctttcttaggattgtcttggctatactggcccttttttggttccatatgaaatttaaagtagtttcttctagttctgtgaagaaagtcagtgttagcttgatgggaataacattgaatctataaattactttgggtggtatggccattttcatgatattgattcttcctatccatgagcatcaaatttttttttccatttgtttgtgtcctctcttatttccttgagcagtggtttgtagttctccttgaagaggtccttcacatcccttgtaagttttattcctaggtattttattttctttgtaacaactgtgaaagggaattcactcatgatttagctctctgcttgtctattattggtgtataggaatgcttgtgatttttgcacattgtgagactttgctgaagttgtttatagtctttctttgacagtaacattattgatatatcttccttggttgtcaccttcaggcaaagtcaagtcccaactctttaggttgatatttaaggtattccatggtgtaaaccttatcttacttttccaagttcatcttatttattaagacaaaaagttttgtttatgcaagtctgtttccaacattcacatgaaccgaatgtccttcattacctgttttttttcactcaagatttatctgttttttaaggtccagctgaagtatcacatccttcttgaagcttttcctctgaactcttgtggcacttatttatgttaataataccagtccatttgtaatttatgtaatactaatctatttggaacctaatgataaattgtcatgtagtgttatttaacttttcaggtctgtatatattttattttatttatttgtgagacagagtctcgatctgtcacccaggctggagtgcagtggtgtcatctctgctcattgcaacctccacctcctgggttcaagcaattcttatgcctcagcctcccaagtagctgggactacaggtgtgtgccaccacacccagctaatttttgtatttttagtagagatggcattttgccatgttggccggggtggtttcgaattcctggcctcaagtgatccactcacctcagcctcccaaactgctgggattgtaggcatgagccaccatgcccagtccaggtctgtatacacttcgtgtgtgtgtgtgtgtgtgtgtatgtgtgtatctttgtatagaaactgcatattattttacattgttcctatcttctacagggcttggaatatgtagagataggtatataaaatatgttcaataaatgttaacatggttgtgatagttaccttaccaactattgtagttcttggttggaagactggtttaacatttaagatggggtgaccccaatccattcctagaaactaaggcatagactcttagcataagatttctatctctgaagaacagtactcttagaaaaactttcataaaagtgtttaaaagattatttaggaaagtgaacaatatttactcattatgcattctctttttatagctctcagttattgaaggccctcacctcacatagtcataattgggaggtcaccttccatgtcaacttataatgttaaaagaataccaccccatcccaaggctctttgggagtgttgagcattttgtctttagtagtggtttcatatctcatgtcctcattcacccatcaccttttgtttctcagagacaactcctgcataacaagatgaagaatagacttgggataatttgtcatagcaggagtataaaaccaagtggctcatcttactaaaaatagttacaggttatcaagtcagaaatagtttcaaagagaaggtcatcatctgagcattggagtgaaggggatagcatttcaagtgaggggtgtgacaggtaaacacctcagtgtagggatgaaacagtatgtgaatgaatagattggacttggctagaaaatgagtgtgagttgaagaaaggaggaaatgcaaagttggataaatggtagtagtaaagtgaggaatgatgatatcattaaagaactattgaatgctctaagcaggattgacaagattaaattagttggtttttaagggagattaattaacagaactttatatttgcatttaaaaaatgtttttccaatacatccgttaaacatattggctttttttgggaggccraggcgggtggatcacgaggtcaggagatcgagaccatcctggctaacaaggtgaaaccctgtctctactaaaaatacaaaaaattagccgggcgcggtggcaggcgcctgtagtcccagctactcgggaggctgaggcaggagaatggcgtgaacccgggaagcagagcttgcagtgagccgagattgcgccactgcagtcggcagtccggcctgagcgacagagcgagactccgtctcaaaaaaaaaaaaaaaaaaaaaaaaaaaaaaaaaaaaaccatattggcttttatccgttttgctctgtatctcatgtggcttacacatagcctgcatgatgcaaactcaacaatgtacttggatttctttgctgtctgccaaagtgttttttgaagcacactggttattccctaaagtggctttagtcttgtctttttgatttgttttcctgcttgcataatgtggatgtgaatctgaatgtatgtttctgtcttcatttgagctttattaacaaagcaacataagcattctttctgctaattctagcttagtacatagggattgtgctgactgcctaagcttttccctaaataaataccttaatgacaactaattaggctttcattaaaccatatttgtggaacatcaccttgagtacaaaacatatctattcaagtattgactttcatttggaaaacaaaaacagtctgtaagaatatggctctaaatagaaaatatttttacctgttcacataaatcatttagaagaataacctcctattcaccrggtatagtattctgagttgacagaagtgaacacaaatatgtcgctctgttgtcttctggcttgcatggtttatgacaagaagataagttctkatttacttttagataaagtgttttttaaactctctctggctgccttcaggattttttttttgtttggtttttactatttgaatatgatatgcctaagtgtgatttttttggggggggtgggaggggtagtcatcctgctwggtgttctctaatctccttggatctgtggcttgatgtcatgaatacaggaaaacctaagtcatyatttcctcaagtatttcttctgcctctttatctctttcttctccagttatacagtatgtacatcgtttgatattattccacagtgtttggattctttatgctgttttcattcttttcctctctgtattttattttgggttatacatattgacctgtcttcaagttcactgattctaatatgtgtattacattgtggtttcattttgcatttacttaatgactaaatatattgagtatatttttatgtgttacttgccagctgtgtatctttgatgaagtatctgttcagctattttgcctgtgttaaaaaattggattgtttcttctttttaaatggcaggaaataaggagaagtcaaggaagacagctagatttttagtttgattacctgagtagatgttactactattagaagactaggggaagaacaggttgggggaaaattccagttgtgcttttgtcatgttaagtttgggatgctgattagatatacaaatggagatgataaatgttcagctggatataaatctggagttcagggcataggtttggacaacatatgtactttgggagtcattggcatatagaaagtacataattccatggatttggatggaattacctgaggacagaggctatacatagaagaaaaaagggctactttaacagaagcttggggcatgccagcatttagatgtaaatccaataatgagatttgaaaagtagcaaatattgaggtagtgaaaaatcccatcaaactttttgagtaattttcactctgcaaaagcacctaagggagttgcattttttggaccccaggttgttcttagcatgttcctaaccagtgagataagagaaacattacatgaaaatctcagaaaagaactgctaaccatgttggaatgttctgacacaaaatccagttcacatattcttaagcaatgtgtcttaagcaaaaggtatcttaataacaaatattaatgataaattataagttctcatgattattgcccatctttctatggaaaatgttgcatttctaataatctattgtaagagcccatcccatatagctatttttaaatggtcaattttgaaacattgtcaggattcctgagtcatgaaaatgttaaatattggcatatatttttaaatttactgtttaaacaccaagtgttataagaaaaataatcataacttacttagtaagtcaatagtgttgacacagggaacagataatattatttatatagtgagatactttcaccatataaataccaaaacatgaagtgcctctaatttatggccacttcttcataatacaataatgaatcgctaatgaggccaagtaagcctaggttaagggatgatgatggttatgataatgacagtgatctactgaaagtagcgagagatagaggagataaaaattggctgaggagaaaggaattatcattgtttgtactggcttatagagttttggggcagagatagagcgctgctgctagtgaaggaaataacattcaccattttcgtagtattgtgcaatattctgtgcttggtccttgacattaacaaatattattaagccttctgttccacttttctgaaattatggagcttttttcttttttgaaaaaaaaaaaaactttcttagaaggcacagagtgacttaaatggttagaagagaaatattcaagctttggggcatcatgtgtatttatccattccctgcttctgccactcttgtttctggacagtagggtatatgtgttgctttcactacctaccttcatccccattcacctctcttggatcttacttgactttgtttttgttttgttttgtttttttgagacggagtctcactctgtcacccaggctggagtgcagtggcatgatcttggctcactgcaaactcctcctcccaggttcaagtgtctcttgcctcagcctcctgagtagctgggattataggtgtgtgccaccacatccagctaatttttgcatttttagtagagacagagtttcaccatgttggccacgctggtctcaaactcctgacctcaagtgatctgcccatctcgtcctcccaaagtgctgagattacaggcatgagtcaccacgcccagcctttatttgactttgtgagctccctcattagtgacagaaatttctcagtatttctatttaattgggcaagcttaggtaggttgactcgttattgacaaaaggtctgtcaagcaattaaataaagcagggttatatgatacttaaaatggctagtattaattgagtacttactgtctactatcccaagatctttgcatgcatcatctcatttactcctcagagcagtctatgaggtaaacattagtttctgtattttacagatgaagaaaatggcacttaggaagctgaagtaacttgcctcataacactgtaagtggcagaattgactggcacccttggctttttgaccctgttgtagtccttatctttgaacattttttactgtatggaaaaatgttttctgagttctagtaactaatatagaataaacagaattttgtcagcatactatgtaatacagagtgtctgtgattacaggttttacttgtttgctcacattgctgcacaatagtcttttttattctttccctaaaaaccatctctactatagtgccaactaaatattttggaataaattgaagacctaatttttttaagactaaattaccatctttgtctcatctgacttgaaatgcctctgccaacaactctacattctatatagagtataactaacatgtggtctgtagtagacatgcaggaaatgcttatggaatggatcctaacatagtgctaaagatgtctctggtttagaatgttctgctaagctytgcaaggcccactggatattgctacaaagcctgcctttataccctgcaagtgtagggtgtgggaaagggaaaatagtttataggccagtaamtacaagtcaaatgatttgaaattaccacaaattagataaagttaatttcttcttttcaacttttgaggaacataattgttatgttcagataaactgctggtgtaattatccttttctgccaaacttaacttcgtaatcacaaaagccaattttaacttgctagtaaccaacttctggttcccatcttctagtgcctttatgcgattttactaacataggcaggaatttaaagccattgtcttcaatcctgtctctgaatccaggcatggtcagtagtgatttgtttctaaatctcaaagttccacaattagctgtttaaaaatagagttttggaccagtagcttttttactctagtttatttctgccacttgtagtagcataaatgaarcttcctcgtctaaggttatgtcctgggcaagtaaaagtcatggagtagaaaattgattttttttaatgattttgaatagtcataactgctgcttaatggaatcatcttgggtggacttagaggtagttagtaatgtgggaacccactgggctgtgtgctggttgtctaggattttcatgatgaaagacttagagatacttctactgccactcttggttgttggtttactagcctgagatggaagatggtgtcagaattcatattggatgtctcagaggcaactgctcacaggatccaggcagrttaattaaatgactgatgatggctagacataatgtgatagggagcaatgtagactttggtgaactggagagcatatgtttcccctaaatgcaaaaactgctgttcatttccatcttgttactgtcatgggagagtgtgagcctgttacaccaacacccaaattttttaaaggagtttgaaacctgaatcttattgcaaaagttttcatgttttaaatattggtaactaatacaaactttaaaattatgagccaaatacaatatatctgtggactgaatgcaatctacgggccatcaattcgtggacctctggtgtatcctatgatatagggcagtagtttccccatggatataatttgaggaagactaggattatatcctaagagatttcattcttttgtgctagagttgttcttccacatactcttcacacattgtttcttaaattcctcatgacagcgagagtgaagtttcagctcttatctatatgggaagaaaaactggggccttgggtaggaagagttgagcacctgatatggagccactaaaagttaagacagaatggtaggccaaagctgccaagtttgggacttgtatacctgtttggaaatgtcaaaagttcttgttaagtagaagcaattgtactgatcttacacatatagattctccagaactcttgccaggatatatccttcatcctacctcgtaaatattaagagagttgttacaaacctagttgatacactagagaaaatagtaattctgttcacaacttagcagcagagtcataaactgaataaagtttgattccttagatgagcaggtaaaactgtcattgtttactctttaaaggagaaagaacgttgataaatcaacccagcaaagaccattctttttggtttgctgcctgtgtaaagacgactaccaatgttcattttactaccatgaaaacttagaccagagggttggtgggtattaatgtgatctgttaagggagactagtaacctattttattggatatagacattttcatagaaatgctcaacactactgaatacatcaaaaaccatactttattttatgtatagcaatacaatttacatattaaataacactataatagaatgatttgatatagtttaaacagaagaaaaagggaaaaatttcaggttacaaaacccctccccctgaacaaatttaaaaaaaaaaaawaagcacactttttccaaatgggtcaatgtgacgaatgttttcagtgactaattatgtctaattcctattgcacaaatggtcaatggaattaaaaagaaaacccaactttcacaatcactgcctcaaagaaataacacatgttggattcttttggaatgtaaagatggtttttgctacttcaatacacagaaagttgaattcacatatccaccacaaaaaggaaaaaaaactatgacggagttgaaactagaaaaaaattagctttatatgaaaatataaaattctatgattatataccatagatacaaagttcccagaagatgcttacccaagcaacaaaatatttacagttttaatgatttttagctatttcaaaatggagtgaaagaaacatgagtcaatgtgaagccagaattctttagaaacaatggctgcttgctagtttcaaatgtcctaacaaaaaaggagtcactaccccaaatgttggagagttgcgacattttataaaatcgactttctccttttctggagatgtttatttcttaaaactcaagatatttttcttgaaattaattatcctctgtagaaaatgcttccctttgcaaatatttaacaaaaatactaaaaacagtttaacagctaagacaaagtagaggccaaatatcattattacaattccttcctatttgtagcatgccttcttctttctagagataagtaaagccagtattgtatgttaaatgacaactaagggaaagcgcaaagggttaagtgaaattacatctgttaaaaaaaaaaaaaaagcaggcattttcccttcatataaaaattcactggcaccatttgaacataaactttagaacataggagttgaaaatgcatttccagtataaccactaaattcttaagacaaactacattttgattcttaaattatgatgagttgggttttttttttagttttgcttaraattagtaatatgtatctttggtaaattggtatctatattttaattttaaatacagtatatatgcatttaagaaaaattcataacaaggcagttgtgctgtgtcattataaaataattatttactgatttcagtatgtcactctgggctaaaaactccaacaaccagaacttgaacaccgtaacccttctttggcctcgctggactcttctacttgaatagactaaaaactctaaaggcataaaaattaggaagaccaattagctaatcttactctttttgaaattcagaaattaacttttttcatattaaagaagatatcttggctatcgcatataagaaagagttctcctgatggcaacagcatgtcttttctttgatgtccagcacagccacttggtctgatcattgcaatttatttttatatgatgtgtgcattttgcttacctagagctaaattcatatacacaaacagcttattttattaagttgcacacattaatttgcaatagctatttcctttcccctgagtgcaagtgttaataaccttgttatgtacttaagcaatgtgcttatgtctcaaagaaaaccctgtctttgaaactctgcctctggaaagatgcaagctatgtttttgccaataacacatgaataataatagtgaggatatgctgtctcttgcaggggtgaggacctgctaaatataactgtcctcattgaagygtgtttggactactttggcaagatgggcaagtagcaattgcttataattcagtgggtcaggatatgaagactttggttcaagctcgctgaagacacacagattgctcacagggaacttctaaactctttcttttattgtttctatcctatttactagctgttttttcgtgattctgaaaccactgtaagggacagccacagaattgcattggagggtatgcctttctacgaattgagccctctataaatagcacaggagggaatacttgctatttgtctttgaaccagtgtttacttttattaaraaaaaattactgagaaagggaccatgaaccctaactcgaacattacttttgaacatcaagcccactttgccatctactaaaaagtgttaactcatatcaatactctatacatctaaaacaacccacttaattgactaaaaaaagagtctagctcattgctttcctgattctcctcagcatctggcagttgtagtgttcctgtgttcaagctttacttgaactttacagagcttcctgtgtcacctctggttggagcggaggggctgtaaaggtgtctctcatctagcacatgcaacttagcatgctctcttgaacatcttatctcaggactagcttacgcagctcttgaaaagcagagtattccatgttgttaaatctatgtattgagaagatgagataaaccctggtaaattatgtagtttatgaaaactccattgacctggcctttgcattcaaattctttaacttggcccatagcttctttctccttagcacttctggtcctccagcaccattctgacaaactttatgaaagccaaatcaagataaatagaacctcagtgctgatcatcattaatgtttaatgcatacccagatggcatgacagcagccagcgtggcctttttgttgaagttaattgacataaaaagtaaataaaaccctattcttcctaacaggcccagttctggtgatgatttcacttttgacagaagctgtccctcaaaagcaaacatgcaatagaagaaacagatctcagtaagtagcttattttccttacaaacactactgaaatttcttattaatgctcctaattttcccattatgcactgcagcgtgagtatggctccagaggctgcacctaataacttccttgagctctaatgattattggtatcttttactaatgtgtatctgttctaaactacacaaaagcatacaaagccatctccctcttttaaaaacttgaaaatgtgggtatcacctttaattaaatattttaaatttctctctccaaatcagatttatctatgtgtgggagtttagatagtcccaagacttttgctaakacagtatttccaatttaatcttaagtagaaaaatgtatgtaattaagagatttattataaaacatttggcaaagaaggaaagaaaacagtaactatgtaggtagtttttattagattgctataggagtaatagggaatttttagaggactagtttcaaaattacacacctgcagaagttttcattcttctacctactgtgaggtatggtattacaaactaagaagcattaatggagaataactaaagggtctcataactgagttgtatataatattgctatcttgctattgttaaagatagccctgattttaggatgtagctattttagagagtcaaaatggaaataacacattgtccacatagctactgtgaaagctgtaatacagagttatcctttattttgacacatttttaaaaaactgtgaatataactttgtaactaataagggatgttcacatgaagcagttcttaagccttctaacttcttaagggatctcttaaccagcataaatggaactgtttcaaggccatgacattaacagacctttttaggtcccagtagcctgctagtctgtaaaagaaaacaatgctatccactccattaaaatacagaaggcatacagtattgaacagtgcctaaaataaaaaggagaggaggactgaagaaaagtacagcattgcctgctagtagaatgcaaccacttcagcaataataataataaaagcaatattcactgtcataacaaagaccttcactgtattgaactaaaaaaaagtagcatgtatgtcgtcatggaatgtcacatcagggtttgctgttgtataagattataggcagtaacactgatcatatagtgcaaactaggtaaaattgcgtttcactgtgtgaaatgaacagaggtgcaaatgctcagtaggataccattaagacataaaatggcaaaaaataaatatcaaaacttttatcagtgtaaaaaagtaactgggttattgtataacctagagtctggcaaaaaaggcctcaaaaaagttctcagtcttcagaagtttacaaattaagtgccctttcaggattccagtcacactagggactccatgctctcagcagggtctgattcatctgcaataagaacagcaccatttttgtctactgtcatgggaccatttccattttctttagtgctgaccaagctaagcattgctttatagatgaactggtattgttcctgaaaaacaagaggaagacagtttgagccaaagaacagtttagtgatttcacataaggtggaaataccaattaaaatggtaattgtgaaaaacacactagagaaacagcaatagcataaatgttatctaaaaaaactaaaaaaaaaatcatttgaatttattatagtcaagacctataccttcttcatgtccttttgatctctgttagcttggaaccaattctcagtgctgattgttaatgaacaatcattattggttaatgaagataaccaatatctggttaatatctggttaatgaagataaccagagaatactatcctctaaagcagggcttctcaacctgagcactactgayattttgggccacataattctatggtgttgagggctgtcttgtgctgtgtagtttgcttagcagcatctctggcttgtatcctctagatgcyatccatctgcagttgtgacaagcaaaaaagtctccagacatggccaaatgtcccctggggggcaaaatcacccccaattgagaactactgctctaaactgtgagtctgagtttcaactgatgyagtacaggttttacacataagcaaactacttacaatgtctgtgaatactccaggcctcataagattgatcatttttgcaacctggaaaacatccacagcattttcattctccagttgctgggacagggtggtaagggcacataacattcctgctgaaactgctccatacctgggggagaaaaaaaaaagatacgatttcagatgtacaaagggaccaaatatattgaaatgaaattactgtcatgtattttcatagaaactaagtagactgttttgacatttactctaaagacacgactgaatgaaatgctggtgggggagggatttggaagctagcataaaggtgagatttgtttatgaaagtggagtatcccaaattggttcatgagacgtttagcttgatatctaataggaaatgagaggttcagaagtagacttaggagagctaaagatgatttggtgttggtgatgagttgggtggtacaatagaaaaaacaataaagagaacctcttaactagacgttattggacaagcagccagtgatgaagggctctgaatttttttttaacaattccaaacagttaaattgaacttacagaatatgaaaaatttaaaaatggaattatatggctcaaaacagacaatttccaaaattaatttcatatgaaataattattttggcactgaagtggaactttcctaatgagagcactttctatgaaatccttggaaagataaatgtggttctctttgcctcacaaaaaagtcttagaaaggtagtaaatttccatcaggccaggttggcaactccacttttcacaagaatctgtgatggcacacagtttccacattagtgatgagaaaacagatggattaaatgaattgttcaagatgatgttgctggctggtggcagaaatgagactggagttcagatgccctgtgcccattgttttttgaaaaacttaaatgtcatttctgaattgttacataaaattaaaatattacatgttttatatctttaatacaaataagaccagagtcccccttagccaccccccaactttagaggtaacctctccagaggtaaaaattattacacgtgtagatacagccttccagatttaggtgtatcactacatttcagttcaactcattatttcatctgctacatgcataccaggtttaccttctagatggacatttagcttgtttgaatttgtgcactttagcataggtactgagtagaagggctagggtcacaggtatgcctgtttttagttttaaagacactgccatatttctttcccaagtggctgttacctgttcatactattcccagcacgagaacacttgcttctcctcatcattttaaacttgaaacacttttgccaatctgatgagtggaagactgtatcttactagggttttaatttacatttccttgattaccagggaggctgaatgtctttttatgaatactgaccatctatatttcctcttctgaaatcgcctaattaacacttttctactaagtttgcctcttccaaaatgatttatataggagttatttttatagtgtctgtagtacttgtgagtttttttgccccccgatctgtttctcttaacattgtttgtggtcattttgttatacggaagtacagtttagatgtaatcaagttgatacatcttttatttttggcttttattggaatcttgtttgagaatgctttctctaaccttgtattttaaagatactctcctacatgttctaattttacttttttacgtttaattgtctaattcatctgagtcttattcttgctttgatgtaaggaaggggtctgattacagttattttatttttccattggataaccagttgtcccagcacttcttattttacagtgtgatcttttctcactgacatcagcttcctttttatcatgtactacattcttatatatgcaagcctatttctgaactctgttttgaccttttattctgtttgtctattttttgtacctccccacgtgtatcccaattccttaataagtcttgatatctgataaagcaagtttctgtaatagtcttggctgtctctacatttacttcgtattgtttttagtgattcaaacatataattttcattttttactggtacactgatgtccaaataactctgaccttccacccgactccatcgtgtttcatagtaattttgaaaccagattgttaaggaacacaaacaaacatttttgttgggattttgattaggttgcactgaatatatagatggatctgaggaaattaccatcttttcaatcttgagtttttctcttcatgaacacaatgtcttttctccatttattcaggccttttatagcttttaactaggttttattgttttctttatagtctttgccaattccatttttggtaaatttttaggtactttagagtttattacccctattaatggcctccttttgtgataacattttctgtttggtttcacttcatgcatgggaaggttactgattttcacatggtgaaattgtatccggtcaaacagaagaaccctgcttaagttttaatagtttgtggcttctctaggtagttgaccacatctttatctgccaataatgcgaaytttccctctttttatcttttacgcttcttctatcttctgcttttactgtgttggctagcacctagataggcttacgtgctagaactgaaagcaagtatcatgtatcttaaatgttcaagcttctaagtttttaatattaaatttaaatgtttgctaatawacatctggtaaataacaattataaaggtaaagaggatgctttctatttttactctaagtgttttttttgggggggggggatcatgaatgggtgttgttttattgtacgcttttcaatatcgatttttttttgaaatgtctcttaaaatgtcctgaattcactgataaacttttgataatatatcaaaagcttaacaccagctctacattactaggataagtttttcatgatgtgtaattcttttaatatactgggttttattagacagctttttattgtcatttttgcatcagtgttcaaataagcaagacttggcctatacatttccattctggtgctaagccttgtttgtttaaatcaacattgcattaaatcttctgtgtgttactgttcatatgtagccttggccaggacttgtgggccctaacaggtggaaaactcattcttttattcagttcttagtgatcactaacgtgtgttgtacttcatgtgccatgttctcttataggtatttacatgtactgacttagtcctcacagtaaccctatggtatgggtaccagtattatctccatttcaggttgaataaataaggcacattctgaggttgaataaataaggcacattcaggtgaagtaactggccaagatcgcatagtgagactagagtttaaaattgagctgatacttgtaaatggctcagaacagagattggcacacaccacataccatgtgttcactaaatgttattttactatgcttatttataggcttaaacatttattagtatagagttataaagtcttaaatgcttattttctttcttttaaaatatgtattatttttagctttttattatagaaaatgttaaacagacaccaaagcccaatagtacagtagcattcatgtagtcatcattcagttataatgatcaacagctcatggccattctcatttcatttctgtttcgtccccaatatatattgaagcaaatctcaggtgttttagtcataatttagtatcaaactctaaaagataagcatttaaagaaaacacactatcacacctaagcaaattaacaactttcgaatttttttttttttttttgtgacggagtatcaccctgtcgcccaggctggagtgcaatggtgcaatcttggttcactgcaacctctgcctcccaggttcaaacgattctcctgcctcagcctcccgagtagctgggattactggcgcctgccaccatgtccagctaatttttgtatttttagtagagacggggtttcgccatgttggccaggctggtcttgaactcctgacctggtgatctgcccgccttggcctcccaaagtgctgggattataggtgtgagtcaccgtgcccggccaattcttgaatgtttttaatgtagctacagatatacggtaggttttttccttcatcatatttccaaaactgtatctcttactaaactatttattgcttaaattttactatcgccttctatttgcttttaattccttgtactttttgttgatttctctggtgctttttctggcttgagctgaatgcttggtttgtttatttttaacctttctaatatgtagagtttacacaggctgtttttttttttttttttaagtacagtttggctccatttcaccaggttttgaaatgcagtgccttcatcatcatttagttttagacactgtgaaatacttattttggttacatctttgatgcatgaattatttataagcaatcctagatgtaaggatttcagtttctagttgtttctagttataaggatttgggatgttatttcactggtggtttctaatgtaagtgggttgtaatcaatgaatgtagccttgtatggtatctgttttgggggaatgtattgaaattccatttatggcctatgtatataaataaaccatttgtgtttgaagagactctaggtctctctgtgcagwctctcttgggtgcgaacttctctatatcactattagatcacgcttgttaactgtggtattcaaatctctctgaatgctactgatcaaatgtatcctggtcgctcagtttaagaactgaatactttattctgtttttagaaaacctcagctgttatttcttcctctttaacctgtattttattgccccatggataactttttagacatatgttagaacttctgtatgtgacttccacattctagtttcatttcagttctacactccactagtatcctatcttttaagtttttagtttcatgaattaatgtattttctcattcttaggccgaatttgttcctatttcataataaatgttcttcatttcataaaatcttcctttagatctctgaggatatattttaataccctattatgatagctctattaactctgatttattgtggtttttggttcttgttcagcatgttgtcttccctcagattctaaattgtactgagttgacctcattttagcatggtattaaaaaaaagtcatttgtactgattttgtttaggaggggaagaatttaacatttgtttaatctgttctagtgaaatggttaaacttaagaatctccccttttttcttagctctttcaaagctatctgtggccagccatatagaaaagtcaggtaacatgtatgtttttacggagtatgcatgcactccatgtgagattattctcacctttccatgggttgcctttcctgtatttagccacggttaaataagcagtaaaattaaaagtatttatacaatatggcttaaacatgacaagaaactcgcaagtcaaatcaatcaaatgcacagrtacttttaaatatcttctgcataccaaacataatgacagagcaaagacaaaaagggccattctctttcaaaagtttaggaactaagtgggattaaagaatgctcatcgagtttcatggatttgcatttaaaactacagggacttggtgcaaaagtggtataagtaatctgtaacctaggtaaaatgacagtagtatataaattcactggctttgatattttgtttgccacttcctctaagggctccattaaaagtaatgcttatttaactagtgatgttaagaaaaaaaccctatttttttcatctttccctgcctttatttacttcaaagattttacaaaagaaatgaaagtactttaagctcctgaagtacagtaatgttttttttttaagtgctctgtctatattcattttaaaacacattgtgattccttgtatagtcaggataatacctgtgagcatttaaccattttcactatttcatatatttacttattattgtagcttttaatacgttgtttttaaaatcataaccaagattgctatccrgagttataaccctgacactgtgaagaaatgcagcttccttttgaaatcagtagggcagaaaggaaaacaaaaaaattgaagctggaataagtatcaatcttagggaagaagacaacatgaaagccttccataaggctctcaataaaagcgaaaatactggaattagttatgatttgtgggtgtctttgcagcctttgctattgaaaacagtccatatgccttgtgtcacttaaagaatatctcagcagtctttagactctttgatctcagggccaaattaaaataaaaaattattgaggacctccaggggatttgggctgtatatgtcaatatttactgtattagaaattaaaactgagaaaatgttaaaatacgattagccctaaaagtgatgttatcacatgtcatgtacttctggaaaactctttttaattgtccactcatgacagaatgggtatgaataaggcagatagtatttttatattattatgctatccagtagggtgatacatgtatctccagagtgagtaattaagtatttgcaaagggaactcttcttcagtctgtgagtgagtagagtaatttgggtgaggtctgatctacagctgtcttataagactatatgagaaccatgcctatgttctaaatatctatgggaacccrgctgtttttaaaatttgacaataatgatgtagatcagcctctgagcagaataatcttgaacagttgacaatagaatgctgagaatgaagcagtttgtctttaagctgtgcctgtcctcaaatagaagcagtttactttttggttaggaattttattcttagctcacttatctagaaatgtcatccacctgggacacacctgagaccccccccccccaacaaccacctgccacccccaaaagtaggtgttaaaaagatctctatgaagaccaaatagatgtcacaacatttgcacactaaaagttcaactctctgcctcacagatcaaatgcgtgcaggccttctctccaagcctgttgactcctgcttttgacagagcttaaaaacactttgaaaagaagaatttaagcagccaaaatgactttgaacaataaatgagacaaaaagcaaggctttctggggacaatttgttataggggtacatatacttaatagtttgtaagttaccacaatttaaaacacatacccgttcgtgcaaatacttgtctagtacccacgctgtcccaggcattgggtttcccccggtggagactgggatgaataaattaccattgctggcctcagcaatgtgagagtgacagtcatgtatacaaataattatggtgtgacatgataagcaggaatgacatttatctggtatggttgtcatgttaatgattttgcttagcacctctgggatgaattagagtctcagagagtgacttttgaactgtgtattgaatgaaagggtgctcagaggaaagaggatttgcaggggcaaggtggcatgcaggaagtacttcagtggcagattgggatgayaactggaaatgtaaactttacactagattgtaaaagattttcaaaagtctactgaaagaatcgatggcaccaagaagacttggtggccaatcagacttggaggtgagggagactcaaaaataactctgatatgtttctggtctgtacagttaagttgattaggggcaggcagtgaagatgagtttggttttagctatgctgaatgtgacgtgtttgtagcccatcaggaagtgatgtttagaggtacagaaagtaggtaagatggaaactgaaaaggaactggtgttcagagtatctcactagagctagcaactgttcaaaaattttaaagtttctcttcaataatttcaatggaattaacttatcccctacagatagtagataaatgaattaatacatttctactggtggcttttaaggcatctcacctatatgatatttgcagatctactggtttaggattaatttgctctttttgtatacaggcctaagaatgaggcctgtatacatctgattaattctggaggggatatattttcagcatgtgacataaaaatcactaaataagacaaatatactgaaaagttgaatgaagataagtgaatcaaacacttctgtttagtatttaactggtggttatttttcttttcctctttccttaccctaaaatataagattaggtgcattactgacttcaggacaaaacacctcggagtactaccgtaacagcaaaatcagtcatataactgggcagtaacgttagaatttgatgacaagagatgataagagctggtaaaacccaggaattctagaaaatgccctaactttatgctgtaactgtataccacaaagttttagttcagtagcaactccccagttattttgaggctgtctgtgctatttaaacactgttgatggttgtcacatttccattgatcttatgctatttaattaatgtttcaactgtaatgcttttcaaatcttaatttttcaccttactaatcaagagtcaggccaacattttgaaagactgtaaaattttttggaagcagctagtacacattacttcaagtaggagagtactatgatttgaggtgaaggtgctgagctcttgtgtacatcatgatacagcattagtgccaggaaaaaaagccttcacaataagcttcactttcaaatttattaatactttatgctacttgggtagctagttggtaatttaatgaacataatgaatgctgctgaccaagagctaccttggaactgaaataaaaatgggaatgtataattgattccatattggctaaaggtttgtgatttgaaacgattcaattatacaactgacttacaggccatgaagtttggctccaaatatctatatacaataagatatatctatgaccctttccttcttattaaagtggaaaggtgctgggctgggataccattgtgacacttagaagctttgagaccaggtgcaagttatttttctctttgagattcatattctttaaatcccaaaagacagtactgaagactttaaaacacatcatgaactttaaatattatcattaatactagtagttttatctctactcatcaactaagtcatatttttaaaggttatttccctaacaagtgtttgaaattcagtgtaaggatttttaaaaagtatttaattaaggtaaacagttattaatttactcatttgttactaacacataacacctctaaatgcatgcagatctacctctgtaggctaagatataatactttcccctttctagaacatatactctagaagaacctggagtcttggaagagtttgacatattaaaatgtaaacagagcaacaacactttgtacatgtccacagtagaaataacatggagttgtcacaagctgaggttgttgataggttttaaaattctggcttccttttctactgctttcaacaagaaattaaacaaaaaaacggtctacattttaaaattaagaaacagatacatactcatcatgaacaatggtgggaccatcccttgttaaggcctcttccttgatgacgttgataagttcaaaggtactacttatgggggcatctgggttaggccatttgggacactgaaagtgccgaacttctaagacatagtcatcctgtaaccaatacaacatgggtcaaatcccttcctttatttcacatatctacaatctaatgactagaacttgctcctgagaaagccatgtgttataggtaactctcaacaatgttgtgttaaccaaaccacagctggaaagaagaaaaataccaggaaggttttttttktttgtttttttgttttttaaaaaaagcatggctaggcatagtggttcatgcctgtaattcagtactttgggaggccaaggtgggaggattgcttgaggccaggagttcaagacccacctgggcaacacagggagatctgtctctaaaaaaattaaaaaaaaaaaaaaattaacyagtcatatggtacatgcctatagtctttgctattcgggaggctgatgtgaaaggatcgcttgagcccaggagtttggggttacactgagctttgatgatgccactgtgagtgagaccttgtctcaaaacaaacaaccaagtaggtcatgctagtgaaacaattcatttggcttagtcaaaaatttcaagtgacaataaattattaaagaccttatatcctactctattttcttatttataaaattaaaggaaaacaaggaaggggctcatcctttaaattactaatataagagcccccccatgcttactcatcccacaagaaggcagcaaaatatttacttaaaaaaacttaktattatcatctgtgcaacacattgcaaagcttacatttctgatggcaaagaaaatattgagttctagtatattgtttttataattaggtcaacagacctatttgtatgcatgctgaatcagaggaactgttacatttcatctagccagctggaaaaagcaaatatttgaaggaagaaaaacggaaaatgtacatatttaaaattaagtcttactcaaatgcctgagcctggcttgagggtggtaaattatttcattattacttagaatgatgatccagggcccaggtatggctattagtgaggaactgaggtttaggttacctgtgtagcttcaaggataaagtcatggatgataatttgttcttcattagagaggcacagtctgtctttgctgataagggtgacggtaaaggcctcacagttcatggattcttctcgacttggccagtacacaaactcatcttctgcctttggaatccaaaaaaaaaaaaaaaaaaaaaaaaaaaagcctctgcagttctgtcaaggatttgttttctatttcttgcatacggattttgtcatttcccatccctctcaagccatcgtttaaactgaattcataagagttatatgttcccatcgaactacaccaagttgaatggttattgtattctattgtaaaatatattttgataatcattttctagcatctctcacctgttagtgtagcaacctgaaacactcccactataggggacttattacagttgagaagtattctgtamtattgacatagtaaaaaagaaagcaggatctaggtcagttaattttgttatttcacaattgcttaagcaatcaagacatgctaattatttcctgtggattatgttaataattctgtagttgaactgcattttgcaaaggactttcataaacactrtaagttttcttgtatattttcagtatgatgttggatacatacagatagtaaaaaggttactataattaggagcaaattaacatacccatcatctcactttcatttttgtggcaggaacagctaaaatgtactcaatattggcatgattcccaaatacagtgcaattttattacctgtagtcctcatgttggatatgagatctctaaacttgttcttcctcatctgttgttttgtatcctcttgatttattttacatcttcccatttcctccctaccccacaaatttctttatccatttatctgttgatggaaacttaggttgtttccgtatcttggcgattgctaataatgctgcaatgaacgggagtgcaaatatctttacgaggtgttgatttcacttcctttgggtatatgcccacaagaaggactgctgggtcttatggtagttctatttttaatttatttagaaacctccagacagttttccatcatggctctagcaatctacattcccaccaacagtgtgtgagagttttctttgttatcctcaccaacatttggtatcttttgattgtttttaatagctatcctaatgggtgtggggtatcttgacttacatttccctgaaaattaatgagattgagcatcttttcatatacctcttggccatctttatgtcttccttggagaaatgtctattcaggtcttttgcccatatttaaatcaggtatttcatgattctactactgagttgtatgagttctgtacaaattttgtatattaaccctgaggagattttktatcacctgtctttacagatgaggacacaaggccttggggagggggcccataaattatctaaaatcactctgctaataaatggtaagggatagaacttttttggaagattgtgtgtgagtaagtaggttggctgtatgtacaaggcagttttaaaagaaatctgtcaatgttatatttcaagaggggataacatagaaagtctttcagccttgaatcaggcaagctttaaatgttcatccattttaagattaaaaatagatatgcaggcttggtccttgaattctatccctaaaaactatggatgcctaagagaaagttaattgttgcataggttggagactgtgagaaatatgattatgatgtacaccacgtatcctaatcaatcagctccaatggcaaactgtagttttcctgtagtatataggtttctacgggcattttcctgaggatgcctagctactatcattgaagtcagaaataattctgaataatgttcaaaacaaagaaggctttgtttaatcttacattgttgcattagaaatgagccaacgtccaatgagacttatcaccctttcaagtttcaatatagcttattgccaagtacatttttatttttaaagctcagcataaggggaaacagattagcaactgggtttagtctatacaaaagaagtctgtaactgtcgtgggttttaataggttttgtccaaggacacagatattaaagacataaggtaatgaacagggcatctaaatgtaacaaatatgcacagattaagcataggatttatgagtggatgtgatcctgggtaaattaatctgaaccttaatttccagatctgaaaagtgggaataaaaactacttactttaaagaaatactatgatgataacatgaatagtaaattaactagcttaaaggctaccaaagggatttgagttatggtagaagaaaggtagaaaaatggttcatcttgaaagtctaagaaaaataaatgctgcttcttaattcagcaggcacactggtctcatgactgttttgcttacaagtatatttataggtcaaagatatctgggcatctatatccgtactttgtgagttaggaagcagtgacttttgggctccttacagaattatgacctggtaaaggtatagcagtaataatacaacaaacaaaaagaactcagagatatcaatctttaggaaaaactgtgcaatgatgaaactctccatctcagaactgagaggtcagttgtatatgattctaatctagccttccgaggcctcagagagacactgagatgccatgttcctatatcctcagtgtctgcagaacatgtatccacttatttggtccagtctccctccagcctccccatacaaatgagctgctgggtagatgctttatggtgattgccctctgttaagtgacaataacaaaatactgattcatccaacaaatgaacgttttaacaaccctaagtgcctccaatttccacatgccaaacagaatagaccctattgccagctaatttgaaaatttacactccagcttttagtttaagattctcaactttgttgccattccatcatacagaagcagtcttggtatcctgaagctggagcaaaatgcgacaaagtgaagaagttcctactgactgggcacacagtcaaatgcatgtcaccaagactgggggttcagtcacatgctgttcttccttgattaaaaaactcattaatctgactatcataaaggcagatcctcactgttttttgtttttacctcatgggttcacatgtccacacagtaacttttatagacccagctaattccgaaacttaagtatccacaagatctaagcagaaacatttaagtctgttttataaacttgctcacccttctgtatagtttagagactgaaatagagaaggactaagggagggaaaagtagtagcagctcagtcctaaagacctttaagtgggaacaaaatagcctatccctgcagtagacctgacttgcctatggagtgggaaaaaaaaattcactattagtacttttgatacaatattttggggtaagacatacagtaaaatgattatataagcatggtctctggagacagatgactcaggttaaaatcctggctccagttacttgtgtgtgctctcttgagcaagtttgttctcagttttctcagctattacatgagataataatagtatgtatgtcttaaaattgttgagaattaaacaagttaatgcatgtaaacacagttacatactcagtacctgtaagctacaattatttacttttcaaaagtgacatacagcagggaagaggttggtgtagtcatatattaatgaggttactaaaaacattttcaaaaccttytaccacaccgccacagacagtacaattgaagggtgatatcaatagcatcagagactcaagtaatggaactgatagggacagtattgtgagactatgaaaggaatctccacagacttcaagatgagaatttaaaaattttaaattccctccctagcatatatggatactatagccctatggcaaagtatcaaagtaatttatgcttgtagcctcatgggctcattaatatatagcagatgtgctttacttaccaagctctggttgtctggcagcatgacaatgatctgtgcgttatgatcccaaatcattcgccagaaatctttcgtagtatgtggcagaggatgctgagttataataaattcattgctcctataatagcccttcagttgggaagacaaaaaaaatcagtgaatatgagtgttttattctaactttgtggtagtaaaatatattcatgaaataagatagcactgttttgactacactaaartaattgagaaaggcattcggtacatttggctaatttttagatgtacttctgctagcactgtgcagacarttttctctccatgtgcagttcacttctagttaaccctgctgttttcacttaagggaaatttcaacatttattcaaagaytagatgtgtgaaattaacaataaaattaattccttaagaagcattctgcttaatttaagcatttttgtaccagcactgattaggtatcttttgttaaaagtttcaagatacagaaatctctatacttttcatattacacattgagaaattatttcaaaaatgacatcagtcacacaggtggtatctgctctttaacacctttcagtttagttgactttatttataattaactgttgactctcaccatgatataagaagcattaatgtaatctgttcctttcattccaggcaatggtgcaagacccactcgagcacgctcagctatcatatggaaaaaacaaaaacaccacatttgccttattatacacacagaaccaacagctctttctgagatttgcttgatgaataacatatcctcctggcttccctttctaagacttatctatatttttaaacaagctaaagtgttatcagctgaggcagaatgtaaaatgaaattttgctgcacatacccagaaggacacaggcattgtaggaatacagttttactgtgggagagatttttacagcagatcaataacagaatactttatatggacacaacagaggattttagataacttttgactctagtttgttattcctacaattataccaacatatactttgtccttttaccaacccctttctccatgtctttctgctcatgatggtcttagaaaagagtggcctttttcattagagataaatctcccaaatgatcacccatgtctatgcctacagcacacagacagcatcctctgcaatgtccttagctatttatacaaaggtcaccaccaatcaacagtgccttgatctcaatagccacagtaactgaataaggtagttctagttgtacagattaatccaggattctaagttttagaggaatgttaatgccacagcaataacagctttattattattttttatgttataatatggtagaagtaacccaattcttgcattccaaggtgaaatgaagctgtattctacgtcagatagatggagcacttgctgacactgacaaccacctctcccagtttcattaaactaccttagttgaataagcataacattttcccttttggtagtaccaggtaagaggctggtataaagtcatacattaatgaggttactaaaaggacattttcaaaaccttctaccatacggccacgtacagtacaattgaagggtgctatcaatagcatcagagtagtggctgccyctgtacctaacatacaatccagtataaaagatcrctaacaaactgttttaaagtcttacatggcacaactgaagagtttctgttcttttctttgttacactctttctgagcactgaaacattccacatattttgcattacactgtgtgaccagctgaaaaagaaaaaacattttagtcttcattcaaagatataattgatagcatttgcttgatgctttggcaaaaatcccaatcagattactgataaacaagaccatttctgtgccacaaagaaccttttaagacacagggtcttgctctcttgcccaggctggagtgcagtggcatgattgtagctcagttaactgtgatcctcccacctcagcctcctgagtagttaggaccacaggtgcatcagcacaaccagctaatttttaaaattgtttatagaattggggtcttcctgtgtttcccaggctgctctgggattacaggtgtaatctaccatgcccagccccagagaacactcttgtgctttcctagtggtacttctctcagtgaccttgattgtatctttcttatttctactatcaggtagaaataggtactgtgtgcaatagatatttctagaactatgtggattcttctgttatgtgatgtcactgctgctgtgaatttttttctgtgattcctcactggcataaaagacctacgtgagtctacattaaaaaagattgcttaatgctattgattacgagctaatcaagtttcttgaagataaaggagtacttaactagttctcagtacatttctgttgaactgaactaacattgttctaaggcttttataagtaaccagcccagtagtttgattattattcctgtttatgtagcttggttgaaccattttgtcaatcctattttttgggggctggcatccatcctaatggagtatatgagatcagtgttcttctccagatgctttagtaaaactcatggtccctggatataattttcattttcaagtttgattcttgtttttttcttcatcttgagctctaaaatggttagtgcctgtaaaagaaccaactacctggtcgcatttcttaaatgaagttttaaagtatgtataaaaaaaaattgaagaaacgaaaaaggcagaatttaagaaatgttggtacttaatattttgtaagaactcatgttaaacatttaaaatgatacactgtgtcctcattattaattatctcatggttttatagtagaatgttaatggggagctaaaaatttttaattttatgactgaactcagtgaaattaaactatttttcatttcatatcacttggtataatttgcttggcagtctcatttcttcagctgagattcaaatgaaagtttcagtctatggaaagttttaccatgaaaactaaaactgtagattcatctcattctttgaatcttgatacaaagggagaaactatttacatacagaacaatgtgcaaaatagaatttaaaagacaaagataaataggaaagcacttggtaactggagagacaggcgatgtttgaaagttagaagcaattttgatttattatcagatgactgagccctaattattttaatagtccttataatctctctttttcaccttcacttcagtcaattccatataaaccttaaccgcttttaagcttcttcatgtccctatcaaagaaaaagaacaaccatttaggaaaagttaacttttctctagtattgtttagtaattctttttaaattcctaaattatcttctgaaatagtttttgaaataggcatatttttaggacaatatgtctacaagtcatcattcttaataattaaggtaagatagattagttcagaaaaaataggacattttttggactaaacgagttactttaaagtactatgtcattatggccaggggctgatgtttatattcagataaagtcataaattgctcagaagaaaatacaacactgtatatctacttgaataccaacaattcatacataggtcaaaaccgtattttctttttcatcacatttaaggagtacaaggagtacaaatagtaatccatttcggtgtatacattaatgcaaagaagacataacccccaaactcaaggcatttaaaacattttcttgctttatgccaaagaaactttttcaaagcactaccttgaattgcttttccagtcgtgtctttcctcctactcctggtataaggatgctgttaacatagctgtgcagctgatttgaagatacttcagtctcctttccaagaatggcttccaacaaggcatcatggatgaaaatgtactgctcctaagaggtacaatacatggtagtcactgagggagtgttaagggttagccactcattcatgaagtgtaccttagtttaattctgctgctaacagggacctcccagtgatttccttcaagcacttacagctaggtgatttgctccaatactcactttatcagtcttaacttattttacggtagagactgtgttaagtttagctctgtattctatactgtgcctggatcacggtattctatactgtgcttattgcttcaactcaataagcaaacaaaaaatcgtgttcaatgaagggttttagaaccatcctctcctatgtatttctcaggccagacaacatgtttaactccccctaccatctaacacagctcttgaaacaactgtatctctttcgtaagtacttgtgtagttatttaggaatccaaatgttaagatccatacagaaatggaaaactgtgatccgtagaataggatcattgtcagaatatcttctaatacaaayctgtaaattactgcaagccctaaaagaatgaatctgtctcttcattatcatttaacaaatttcagttacagcatttgccagaatgtcgtgaggacgctggcagctactccttacctcagtctggacgaggtagttacgctgtgtcctgatatgcttcaggaatcccaggacgttaactgtgcttttgtcttttatctgttgcagcatgctgtctattacaatataggtgcctgttctgcccacaccagcactgtaagaaatgaagacactcaactggcacttttgttttatcatactgttaactttggattcgaaaaattccaatctaaaccccatttattttattatttttctgagatgagatggagtttcactctgttgcccaggctggagtgcagtggcgcaatctcggttcactgcaacctccgcctcccagttcaagcaattctcgagcctcagcctaccgagtagctgggattacagatgtgtaccactacacccgactaattttttatctttagtagaggtttcaccgtgttggccagactggtatcgaactcctgacctcaggtgatctgcccactttggcctcccaaactgctggaattacatgtgtgagccaccactcccagcctaaaccccacttagataaccttagatgacgtacgttattcacttagcattgcaacataaatcacagaacaagcgacatgtatttgagtaccaaagtttaaaacaaacaaaaaagaggcaagaatgcattttcaaatgaaacagaataaaagcatttttaaacaaccaactaaagtcatttactgtggctgacaaaaaacaagctttatacaaggatttcccagtgcttttgaaaaggtattttatatggaacatttaaactaaaaatttaaaaatgaaatattttcatatatactataaatattgktatttagaagaacctttcagaaaagccatttacaaaaacacaatctctattctagtgtggaaagttcttgtgtttaacgtcatatttttatttattaggatcaggctacaattttcctataaacaatggggattttgtaattttttctttttttttttgagtcatgatcttgctctatcatcacccaggctggagtgcagttatgtgaacacagcccactgcagccttgacctactgggttcaagggatccttctgtctcagcctcccatgtagctgggaccacaggcatgtgccaccatgctggctaatttttttatttttaatttttgtagaaatggggtgtcactttgttgcccaggctggtctcaaactcctgggctcaagtgatccacccacctcagcctcccaaagtgctgggattacaggagttggcctccatgcctggctgatattattaataagaagattttataaaaactagggattgatctagttttttaaaaatcacagaagcagcagatgatttcttaatgttacaggaatagagcctctttaagactatcataggtcttatccatcccagtttccagtggaagattcagcttctaagtgaaagcagtagcaatcattgtggtccaaggtcactgaggcctaagtcccctgccccatctatttcacatgttgaatcctagaccctacctgcagtgcaccaacacagggcccgtttctggcatccgagctgctgaggatctcctcacgaaagtcagtactggaagggcatactcgggaactcccatgtcaggccactgtgtatagtgatactggatcactaccctttcattctgacgacccttgggatttcccttctgaccctgtgagaaaagtgaaaaaagatgtctttaagcsggggggtggacattctggaaaaaaataatgtaagggtgtcaggacacatgaccactgatcacattcaccctaatcactgttcccaggctaggttattcccccttgtagccaactttcatgccattaaattggagacattaccaagctggatatgaagtgtcactatcacttagaagagaagactgtttaagattgtactaagaatgaacatttagtatcagttttttttggatttggaactatccaaagcacttgtacttttcctgcaaggcctccatttcctgactttctgccccaagtccagatcttagtactttgctttcatgtctctgtgggctgtgattcccattccttctccactgtccaggctggacctttaggagccagagtgcttgttgctgctgtaaactatccaggaagtgatgggaagattttaaatgtcaaatacttctgtctttagagtcagaggcaatgtctcatttacctgtcactttcataaatgactttttcagagtagttttcctttaagtgtctgaactttttacattttaactactttagatgaaatattccccaaatagattatttgctatgatacgatttcttattatcaatacctaatttctaaattttttttggatgactcagggtcattaacactgaagcttgaagtgtgtctggtcctgtgctattgtacaaaggcccatgatggctttaatttaattcttctgttaactctcatttttctactttttcctattagtatgtaaaacacctaaagttcctatttgacttcttcctctgacttaagctgtttctaaaacaagagtaagtgggccctgtttaaatacctgaaatattctcatcagttgggctttgtaagttttttgctggttattgatcatcttgagccagccagcagctctatttcatagtagagaacacagatgtattgctatgctactgatattcatgttatttctgccattttgggaaataaacatacatagaaaggatagttaacctgggatcacagatgggctttggagccactgaaattttacataaaaatgtgagtaagtgtgaatataaatggggcaaggaggctacagttttatcacattttccaaaatgtccaagacaccaagaaaaaaaaaaaattatcccattgctgcaaacaactgccatacctaagttctgtggaataactacattttttaatgagcgtctatttacagttcttaatacagtatttcctccttatctgcagtttcacattcccgaggtcaaccacagtccaaaaatattacagtattttaagagaaacagtatatattcatataacttttattatagaatattattgttctatttcagtattgttactctcttgctgtgcctaattgataaattaaattttatcatagatatgtatgtataggaaaagacattgttataaataggcttcagtactacctgaggtttcaagcatccaccgggggtcttgaaacataccttccacaattaaggggagactgtgtactgctgtgatgattgatmtaggatatttgttgtgacagtggattttgaaaaagaaactgagataacctgaaaacagtatttccacaaaaatgtgattcctagggtattagtagttctatagagaagggtattattgttaacaccagtgctctggtcacttatgttcactgtaaatttctaaaatgctggggggatatatattatgtagcattcatttcccattcttgaacagcagaatctgatgtttacaagaatcttacaggacaagtattccttggaacatactttgggaaacaatgctttatatctgtcagaaaattggaataaaaaagctaaatcaaacagatgctgccatatttgctgagtattaccaaaacctaagaggatgattttttaaaaaatgaagcctgttcatgtagagattaaaggctcaatcaggccagttaaattctattagatgctttgccaatacctttcacaccatacactgatgtcaatcaaaagagttatgaaaaaatgttttaaaaatactttttaaaaaccaagttggttatgagatttggccttggttgtacagtaattttcatacaagtataaaaaggggatgccctggcagcctacccaattccttccatacctttttcacttttgtatttctgattgaaaaacgacgaacagtgtagcaggcatgtatttttgtgctcttcagcgtgacaataatgtttccatattcctcactgttctctgttggccaatactgatcacattttcgctgcagaaagaaaaaagttgtaaagtataactgcaatctatgccacaattctgttgataatgtaatttcaaacgacaatgttaaaacacaggtgagattgccatttagttgactgaaaaaggaatacgtgagtttaactgcttaaaggcaggtgtgacctctgacaaggctgatggcttgggataagtttgtgtgagaccatgtgagaaatgggcctagtatttatggtcacctttcaatatataatgcatttttatttttgcattataatgcatttttaaaagggactaagaaagaaacctctatgtctgacctgtaagaaatgtgggtaaggtttgttataaagggagcttaagtatcatttggaaggccgggttggattcatggaaggttctcttctaactgtgagactcttcttattgtaacttggatcatcaaaagtaaaacagtgactccacaacatgaagcagtggtgattttgagcagggaacctgaagcgtaggttcttttatttatttttatttttgtttgtttttaatttttagttttagttttggggtacatgtgcaagatttgcaggtttgttacatagggaatcatgtgccatagtggtttgatgcacctatcaacccagtgtggtgattccttgaagtgtagcttttattccagcctaaattagcatcatctaatgtaaactcataatccaataaattctacagcactaatcatttttttaaaaggtcctcttaatgatggttaaactgtttaggcaatttttgcttcccccaatcttaactattagtagttccttgtctacaccacgcttctttcaatttccctgtttactgttgtctgtcccctgtacttagaacaccctttccttctctttttagcctgtgtaattcctcgtaatcattgttcaagtctcaagtatttgctcctttaaaaaatctctgtacagaggaatgtacagaggatacattgattcattttgcagcattccactgataccctgttcatctctgtcatcacatttactctcataatgccttagctctctttccttctgaatcataagcaagataaagcagagagaacacttttcatttccgtaactctttataccttgtcaagttcctaccctaaagcaggtactccacaagtatcttttgaatgaaggtgcattattaagatagtgagtcaaaaggctcttactcttcctttttccacaaggttcgtaatcatcacaatgattccagtgttttgttcccaaatcatcctccagaaatcttcaaatgtagacttcaaaggtccttgggtggcaatgtaggcttttgctttgttgtaacccttcaaaatgacacagcacaaagtgagatgaaagcagttatcacagaagaccagtcaataattcaaatgccttccatattgaatgggctttgtttttagtgaaagctctgtacagtattaaaatatattaaacagtttctgctgcagtcttcaatttctagaaacaggtttataataacagttctgacttacatcaacatagtttgcrttaatgtagtcgctgtgcttagagtcttttcctggtaaaggtcttaacttcaccctactgtgatcatctatagaagataagaaaaaaaaacrgaaataaaatggataattcagaaactagcaccattctaaagcacaacacaaggcaatcaggtaacatgacatctcccaaggtagtctgagaaaacttttggcagaacaactaaatagagcattcaaacccatcccaaaatacagagccactcctacatctcctgctctcaggatgcaaactcatgtaaaactattacaaattgtagtcctctgtattttaaagccaagttcaaaggtatttgcttgttctgtattttaaagccaagttcaaagggctttgattatgccctatgcccctgttccctccccattaatacaaatataaaagggtgactgatctgtcaagtccaaaacatctattaatattttcaggcaattccattgctaattcacttggattccctgctaccctaacagaacctaaggaattgaggaaaccagagcttttgttaagagtaatctcattacaggaatctgaagttaatgttcagattttaggatccacttaacctcagttaatgaacaaaagttgggggtaggtgatgcatgacatgtgtatctagttgcccagcagattgtgcctgttttttttaggatagcaaaataagtaaaaggaagctgaggttataattttattttccctaggtagaaacagaatgggcaaaacccaatttatgtttctgtttatagtcattatcataaaaggctagttgaaaaagaagtccaatgagtggatcagcataggcattactgacctcagaatataccaagcaatttttgagagccctctatgtttttggaactgtgaactgtttttgttgttctgacaaactttcagtttacagttgacatgaaacaggtgttgcttgatataaataggccccaaaggaaaaatttctcctaaggcatctggatccaaaccgttatgccttagtagtcattaattgcatattgttatttcttagactgacaaataagacattaatagatcaatttgggaggtgatttggtaacatccacatataccttgaaagttgtgatgaatctgagagaaggtttttcatacatcatgtttctggctcattcacggtctgattttacttgtttctatgctattctttgctatgaaaaggcattaatatagagggtagatgaaggcaggcaatgtgcccagaatctgagtggccaagagaacaccaaaacctaactccctgaatgtttaaaaataaaattacatctaatttgaaattgtgaaagtaaaatcacaaatgaagttgtgaaagtgcaattcacatttaaccagagatgatggttttctagcaaaacaccatgacctttgggcacatcacacattagttgctttgattttctcctcctttttttgccacaatacttttagcaaggcagtaagtgatgtttgacattagagaagtaaaggatgctctggtggagagaatggtgtgtgtgtgtgtgtgtgtgtgtgtgtgtatataaggcacagatgtatacgtgtgtgtgtgtgtgtgtgtgtgtgtatgtatgtatgtatatataaggcacagatgtatacatatccttgcctgatttctctggttagaaaggaggtgtatctggatagagaaatcctcatagtcacagcagtggtgagccttgattgagctggccaacaaatactgccaaagtcaatccaaagactagggagaggtttgactttcttccttgttctccccctggcttttttaaccagttcattttctcagaaaagtagaacaaacaatcctattcaaaagtaacttggagtttttgtaacattttatttagaaataaaactacctttgtttatagaggacatcatgtatacagaaattcaaggaatcaagaaaaaactactagaaaagacggattcagcaaggttgtaggatacaacctacaaatgtatttatataaactagcaatgagcaatccaaaaataaaactaagtaaacaatttcatttacattaggatcaaatggaataaaatacttaggaataaatttaacaaaagcagtacagtagtacaattcagaaacaattgttgaaagaatagccaaaacaatcttgaaaaaggaacaaatttagagaactcacattaagaaagtgaaaagacaatgcacagaatgagaaaatatttgcaaactgtatatkcaataaatgatctgtatccagaatatataaagaactcttacaactcaacaaaagacaaaagtaagccagttaaaaaatggtaaaggatctgattagacatttctccaaacaagttatacaaatggccaataagcacgaaaagatgctcaacatcactaataattggggacatgcaaatcgaaactacaataggataccacttcataccggttaggaaggctgtttttttttttttttaaatagtaagagttggtgaggatgtggaaacactggaccctttatatattgttggtgggaacgtaaaatgaatagccactttggaaaagagtttgatagttcctcaaaattttaaacatagaattaccatataatctagcaaattctactcctacgtatacaccaaagagaagtgaaaatatctgtctacataaagacttgtacatgaatgctcatagcggtattcatactagctgagaagcggaaaagaaasaatgtccatcaaatgatgaatgaatagacaaaatgctgtatatccacacattagagtattattcagccataaaaaggaatgaagtattgatatatggtacaacatggatgagtgttgaaatcattgcgctaaattaaagaagccagacacaaaaggtcacatatagtatgaatctgtttatatgaaatgtccagaatatgcaaaaccacagagacagaaggtagatacagggtttctaagtgctggagagaaggaggaattgggagtgcctgctaacaggtttcttgctgaggtgcaaaaactgttctaaaattagattgtggtgatgatcgtacaactccgtgaatatactaaaaccccagagttgtataccctaggaaatttttttttttttggagacaaggtcttgctctgttccccaggcttgagtgcagtggcacaatcttggttcacaacaacctccccctcctgggttcaagtgattcgtgtgcctctccattagctgggactacaggcgcatgccaccacatcccattaacttcagaattttttttttttttttcagatggagtctcactctgtcacccaggatggagtacagtggcgtgatctcggctcactgcaagctccgcctcctgggttcatgccattctcctgccttagcctcccgagtagctgggactacaggcgcctgccaccacgcccggctaatttttgtatttttagtagagacagggtttcaccgcattagccaggatggtctcgatctcctgacctcgtgatccgcccgcctcagcctcccaaagtgctgggattacaggcgtgagtcactgtgcccagccaagtttagtattttttgtagagacagagtttcaccatgttggccaggctggtcttgcactcatggcctcaagtgatccacctgcctcggcctccgaaagtgctgggattacaggcgtaagccactgtgcctggccttaaatgggtaaatttcatatggtatatgaattatatttcactaaaactttaagaaaacattatacagtactgttcaaattttaagtggtccaatttaaatgcactattgtatacaattctatgtaatgtccttaccatggtatatgttaactataaatatctatgcccctacccttagtatcaaagcatatattatatgccagtgagccaagccccacatgtctgtgaaatgtggtcttctagccatagaagtagcttgtgctcctagggtattccttgaggctctgtatgaagaatgtccatttgtttgagtccctaacctacagaatattcctgaccatggaaatgtgatagataggagtaagcacatggaccaaaaggcctggaggctcatcatttaaggtacaagccaattatgtagtctttgaaagaatgctttgaaattcagcttgcttgattcaattcccaatattttcatttgtattaaaagatttggcccttacaggttaaaaacaatgtcagtgtaaccaagtgacattcaaattttggctcccaacatgtgatatgacatcacttcatgtgaaaatagcgaagctccaaacattttctttcagtcaccttattaagctcgctgagccctgacagcctaatgaaaggctaagggggaagaaaatgtcccaacttctacactgttgaagatgggctaatgagaggttagcttgcaagaatcattctttcttggcatcctgcttctgactgcttggctttcagcttatacccagcatgaaaatttaatttcctcgcagttgaaggtagtttaaagcttattactcacatgctaaaatgttgatgtatctgtttttgtgcttgttttctggatgattggaatgctctgcagtgatgttcatatcagcagtacagcgctggacttcctagtgaagaaaacagcaagattatagacacagtttagaaacaaaggaacaccatatacatttaaaggcataaagtatttactcactccctggccacagccaccgttaccttctcaatcccaacttcggatataattattgatatatttataacgagtttatgaagaatgtgaaaaaggtataaagatttcattatttactatttcatcaatcatctacttttttctagtttttgacctagtccctgagatgtaaaacaatatctctttttgaatacatcatagtctatgggtgagaaaaatattcaaaaagatagtcaaacatgatgaatacaaaagaggcctgagaaagctctgatgggagcacagaacagaggaaggctttagacaggtgaaaaaatttacctaagtcttaaaggaagaaagggaatttctaagaagtataatctctaccatgatttgcaatatgcttacaggccttatagcctcattttataattgtgagggtgcattgactctaaagactcagtgctgaaataaccctaataacagcccaactaatggtcatatctcatatatacagtcttgacaaattatttgtgaactctagtattttaaaagttatccttctttggaaaaatagcagtagcagaaataacactcttatcctaccttggccgtggatttaaacgtcatccattagcctaatacaacgttgctgaaaagccaaatttttctacactatatgcttcaaacccaagaaagtactggagctgactaataagggaagtcattagcagtacacagctgctacaaagagcctgaacaaagtaacacaaaattatcaggagaaatgttttacacagaacagatgtagcagagtttagaagcatgcagactttttttttccacaaaggagttgcctagtaattatgcatgttttccatagtatttacattaaacataatgaaaacaatgaactggttgtcttttatattcacaaagtacttcccagggagaagtacacttcttctctagaaggaggaagttactgtactcaaagaatttaaggtataaaagcaaagaatttctgtgtgttcaaagaaacagtattcaatgactctccaattgttggacactgtaaattgaagtttccataattatagtccttcccagctgtccatttaaaaaaaaaaaaaaaagccccacaggcattaattcaatccacctttctgggaaagtgtgtttaatgacagttcttaccctttccttactcttactaaactccaatatattctgttctaacatagtttataacctatggtttggaaaacactggtttaaggagctttaaggctgccctttggctcttctctaaaatgagataataaagtgtgatcacaaatcagtctacgtaagaacatgagcaatgctagccaaacttagcacgttgggacctgccttttgaaactgccttataagctctgagccatgctcttttgaagagtttcaagggcagacaacttttgaaaatggatttgaaacaagttagtcttttgttttcgggttttgaaggtcacacctttggcatgtacttctttagggttgagttgttcaggtatcttatgctgagagattttggcttttagtaccttagtctgagatttactttgtttattgatttttttttcctgttgtatagatctgaccaccctagctatggactgaagttggagcctcttttctaatataatgcaattgaccaagactgcttgggagcagctgtcagtattgtttaaagctgtcattcaatatggccaaactctttgttatctaaaaccccttgtctgatctgttgcctctgtttcacttttccaattagatgaatgacagaaacaaaaaatcgtaataaatattgtcaaatctgattttattagaacccatggggtttgcctgaggccttctgattttgtcatgtagataataatgtcatctgtaattccttgcagtactgcctggctcatttagatgctgataatatcatctgatccgggagtggcttttctctatcagaactgccatttcaaagttaacaggattttagtgtgttaaaaaccctttaaagagacactggccaatggagtatgcattgtaaatttacctattcagaacttgataaatagtttaagcttgtttatattttactccctatgtaacaaagctagaattctcaaaaagaacagtttgaatcttaacaggcacataagcataggagaaggccaacataaaacaggtgtaaaataaagcaaaaaatcgaagactgaacaaaccctaaaaattgatgtaacgagaattttagggaggtgatgtaggctaaatcacttcctacctacagtcattgatgcaagaggctatttaaagagcacttaaagacctactgtcctactatactgtggctcaattcaaaaaaataatgcaacaaaacttctagaaatctttcagattgctcagttccaaaaaggtagctgagaataaattatttggatctggttaccaagtattacaccaagtaggggtaacattcttagtgcctgagttcaggcagcctacaattgtggtaaagagactgttctacagatgactgatgggtttaggtcatggtagtgacccagtgcatgtacagtgtcggacacagaactggcctttgacaggtgctggttacactgcatcttccagcccctactctctcctgctcagggtataaattgctgccagactgattttcctcaaacgttgtgctgactttgttattcccttcctcagaaacgtgtggagagattccacattcccttagccaggctttcaaggtcccatcttatcttccccacccttcccaatcccagacaatattaactccataccctttgaaaagaccatttgatttcctgcttattgctttattgccatttaccttggtaagaatgcctgttctcttcctgtatccaaatccatgtatctttatcaaaatgactgcatttgccccctagaaaactaacctatctttggagagtataacacagcattattatcctgcagctggtctctagcataagaattatttttcatgaaatctggctatctcccttttatctccctcttcaccaaaatctcaaaaaactgtgatttacctcataaccgtttaaaaacgtttttcttaagatatttaagacccaaactggcatttttgtcaaaaacgctgaggaaactaactctacagcaagcttatccaatccatggcccacaggccacaggcggcccaggatggctttgaaagcagcccaacacaaattcgtaaactttcttaaaacattgagggttttttttttccctgcaattttttagctcatcagctctcattagtgtattttatgtgtggcccaagacatttcttcttccaatgtggcctagggaagccaaaagattggacagccctgcctacaggctcattttctgccctcttgcaggcagcagtcggtgcagcattacacctctgaccagagacttccctattatacatcatcagcagccctggacatctcccttcatttcctaaagtgattgtggccactggtccctcagagcatgggctcaggtggactaagctttgttcttttgatttaagatgaacaaccagcccaaatttagcacagctggttaactgtaatagaggcagtcccccaaaggatcttgtccaggggctgtggacttctggcctcatcctgcactcttttagacttctgattctaccagtccctgcctgttaattcttctgactcatggagctttggagtgccttccttttgaaagagtatgctagcactggtcttttggaagccttctgcattatgtttgtgggggccaaggaagaggctgtcaatcttttaatactactctgggaaactactccctgggaaggacaatgaggttgaagttagctcaggtagccaaggtaatggtgtcatccaacgctatcacaagaaaaggactgatgttatttctagtgactgcaaatactgtatgatgttgcttttcacggtctctagaatttatttgacaagaacaaaaagctggcttacagcaacacttctagacaaagagtcaaaggtaccagtgaattgtttttctcattctccaagcagtaaagttctgaaactacgatagttattcaccaacatttttttacttccgagatgtttaaacatgatggatgagaatttttgctgaaatctccaatgaaaatacatagatgcctttctcctttgcacttcttcagaactttatgcctgtacaatagcacttattttgctttgtcctgtttctgttttggttgtgtacactctggcctcccccagtaccagattgaactctttgagggcaaggactctaattcatatttgtatcttatattatgtccagagaatggtagatcatcagtaactgttagatgggttgttttagctcctcttaatgtccagttgttaacttttcagttgtatttctcataattttaagactaattttaggcctacatgttggataagatttttataagtcgtattctcagctatcttagaaggctcgagaccataaagatcatgtaatgggcagctaatactcctagtggggggggttcctaatttggctgctctccccacttttgtattgttaaggcaccgaggcatgatcatttctagtcacttgcaagcttccttatttctccttctgaccttggctcattacaggacattactctggctttttggtgttttttcctgagacagggtcttgctctgtcgctcaggctggagtgcagtggtacggtcataggtcactgcagcctcaatatcctgggctcaagtgatcctcctgcctcagcctcagcctctgaatagctaggaccacagttgtgcgtcaccacacctggctaattaaaaaaaattttttttgtagagacagagtcttgctgtgttgtccaggctggttgggaactcctgatctcaagcgatcctcccaccttgttctcccaaagtgttgggattacaggtgtgagccactgtgcctggcccaggacactactttaatgagagtctggatggtgtcaaggtgaaccatgtgggttcaagtcagataccctggtcttaaaccctactcctgccatttcaaaatgtagccacccacagcctcagttttctcatgggtagtttcgtcatcagtaaaatggggacaataagatacacctacctcaggaaatagaatgatccatgcacagtgctaactagtaaatgctggccatcattattccaggtaaatgggtctggaaatctgagactaagattaccttaactctcttaccataatacaattttgtttttaattacacaaaatctttttctgtcctttcttataaagcctgttactatctctgtttataaaatagccgtaatagcttcttatgtagcctattaccagttttcccttttagcagttacccaaaaggaatactactcttttaaaagtacttcaaattttcacctaattataaggtgacagtagtattggtgagcttttctattttcttattctcccctttacgttgctgctttgctgttctttttagaagaaagcatattcttcctattgtgaacagctctgattttaaacctttcaaacctgaaaagacagtgaaatcacaacagccctttcaccttcctgcctgccctccccattccactcccataagtatcagctaatactatttaagctctaaagttcaatgtaggcgattaaagcttttagctgcagtatatttttttaggacagaaatagggtacagatgcccaggatttgttaagaagcatgattttgatgcagcaaagcccattttaagtcagatcaagtttacagaggtgtagctgattattttgaataattaaatggtgtcaaaaccagctgtgatgaatagcactggggtctcaaatcataaataattgagaaactggagttgcatttgatcatcctgatcaaattcggctctctagaggataaatgtttgtcctgaataccatcaacgttgttaaatgcctcaatattcttgctcagtcatccagccaacagtcaattgaactaaatcactttaacaccacacacatttgctgtcctcatgaatacaaaatgtttgacttaaaccatgttctttgtagttgaataggcaccttttttagtaagcatctaatagcattaaatacttgacatgcttttgttggttccataaaacatatgacttcgtagaataaatcagaggttctttctaccacctttgttttcattctgctcaaaacaacaaaaactaacaaaaaaactaagagaaagacttaatttaaaacaagtcagcaatataactgcctttatgatagccttttgggattctaaatttgcatagacaggggcttttcatcctgtttttatttctcattgttcattcaaggtaactgcaccttccagctgtatgactcctagatgatcttaaagtgcttaccttccattacttcattttgccctgtaaccaattttgttgaaagagatgggtaggttagcatcatcatcatcatcatttccattttaaagtagaaatgagacagagaaaggaaccaacttacccacagagctagaagacagctgagctgccatgaaaacttggcctcctcgacacaactcttgctgccagagatgtgccttagttaagcgcctcagtgaagaaaagggcagtctgtttaatagctcctcattgacaccctgtcactgctgaactggcacagaacccagagttggcagggtggtacatgcctctctctaccttgtttcctacacaccagttcttaaaatcagaaggctgtgttaacccaagtcttctctccaaggattaataatcatgaaaacaacaacagtcaacctttgcatggttcttaacaatgaacttggcacttttaaagatgttaatcatttatttttccaacgacgttacaatgtaggtgacattggtgccatttttcaaaaatgggaaaactggggatccgagatgaggtgattggtctgaggattatgaagctcactactgatgaagccagcacccagtttctcagacaccaaacctgctatcttcactataccatgtgcattgcagaaaagacatggaattagggagccttgtgttatgactgctgttcccagttagaattagatgtagcaagaacctgaaaagcaatccctaccagtttgcttcttttctatcactaagtcggttcttttgtagaaatacatattcaggacaggtacaatcaactcccctttcacctaaattttatttggaaaagaatgcctattaaaataatagatgaaaagaaaaactccactttccgtagttactgttttgttatgcttggaatgaattcagttcaagtttacaaaaatctgcataaagtaagacttaggtttctggaagttaacttccagccttgaaacatacctcaaaatcctcagagaacccatgctggttattagaatagagctcaccgatgtgtttgacaaactgtttgacaggaatggcttccatgtcatctggggggaataaaataatattcaaagttacatagaatacttccataaaacaaattacactgataaagcaaagcatccttaagacaaatacttgatttttgcaaagagcaaaataattgtatcacacaaaatagatgtcctgaagaaaagtctcagaatttattttacattaggatctcattatgactttaatgcctacaagccaggttaaatatggtttttaaaaaaaggtacatagagaattccccttatttttatattcaac

SEQ ID NO: 97553 - DNA, 82392 bp, Homo sapiens
tgctcttttttttttccacaggcttcctatttccgaactgcctcttgctgcatttggtctgcctcccaatgaggatagcttaaacgctcctcatggtttatgtgttcttaaaaatgaaagaagggccttggaagccctaattattttctctattgctgcttctgtttttaaatcattgctcacatgcagctgttgcggcttgcctctcgcatttcttgctgaagtttgtaagattcctcgttacttttattagtgacccccaaatctgatttcagatttcttgtcctactaatggttaatctgtgaccttccccaaggccatgatcccatttcttaattactaataccagcccagagaactgcatcaaaatgaattctgtgaccattttaccttctcctcacctgttgcatggatgatcttttctaaatagagctttcttcacaaattgcataaggaataagaaactcatattagcaggtacaaaatttagtaggtgaagacagatgttttctggtggaatttaaagagatttttctgagagttgaggcaaatgaatgaatcagtaagtgactataaaatggttattctaggttatttttgtggttctctttaaaaacttcagtttaccaatttcagggagacttgtctttttttcatgctatttgctgtcctcatgctgtgaaaatgttactttgccttattttttcaatttaagtggtctcccttttactttattcttttcctcttaaggccctgaaggtagctactttttatccctgccatcctaagcggtcaccctttttctttattcttttcctcttaagcctctggaggtagctactttttacccctgccatccttcagtaatatcctctgatcgccatgaccctcaaaatcatctttagtggattcctaggagctctgagacaccctttcataaatccttctgctctcagagttaggcagttgttaaaaaggtggcaaaccaggaagatagtaagaactccaaatgatgggatagggatacccttcttaaaaatttttaaaataaagtagaacatgagactttagatctctccactgagtagtgagcctggaagtcagggtttgagagtttgttctgtcattctccctgacttgtaatttgaaaacttggcagtgttttggtgacctaaccatgggctgatgaaggagtgacttttaaaaaatagtgtggaggtcttaagtggcaaggtgcctctgcaagattgttctcatttttataggtttggtttgattgtacagcttctcaggaggcctgactgaccctcactgattagccctgtgcggttttcctggaacctgacatctactctgcccacttgggacgggcccttccttaatactgcgccccacctcaatcctctaggctctctgatcctcattcacgttttggcctcacgtgctcaagccaggatacttgcttttggtaatttgcatttttatattttgctagatatccctggtgtacatgaatatatttgggggtaaagacacaggtatcaaatagaaaatactctgcttttgttgtgagtgaattacagagagggggatttttttcactagacatactttgtttattttaaacaagttaagaatttatttggaagttctggaaaagagatgataggtgtagaaaaatgaaaggtgggaagctacaaatagtaattttacctataaattaacatcagggcttttgttttgtttttgcaatgaatttagctccttgataatcttgctgaaagagtagctattagtgttaaagcagacctaaagttaatagaaaaaggtaaaaaaatggagagggacagtgtatccaggaaagagaatggggaaaattgatgttagtgggaccctatagaggctgttctgtgaagtatattgatttggaaggtaggtgttgcccatagaattggaaggggcacattcaccaggagtaggagtgaaaaagaagcctgaattggcagactaacaggctgctaactgcatgttggaaagtggtttctaaaccgtgggtagaggaaagcccccattgcaagtggtctgaacaagaatgactctctggaaataggtatgagttactcctgcaaatctcttgccagttttttggaaatgcaaatgctgtctgtcaagatgaagttgataaagctttttggtattaacgcttcttaggtattaaagaaacaactacctttttttgtgactattttatagtgggagttgggttggcaaggaggactgaagtcaatatgtatttttatatgcgttgtgctccggggaggaaatttttgcctacgtgtgtaggtcttaaaatacagttatttgaaaagattcaggtaaagaatcaggaaaccaattttccaaactttgagtctaatgtacagtcatgagtcaaacagcgggagtatgaatgtctcagaaatgaaacgctttttgatagtagaatttagcaggacacaaatacgtgtcaattgagattgtgaacaaacccctttctaaagttgacagatacgtagggacaggaaatgtcctccagtaggaaggtttatagaacctcccccagtcgtcgtccttaaaacctgttcctcattacatatagctcgtccgtcctcctacccgcagaaaacctttggaaaggaaaacgtatcctttgtgaattagattgctctgtgtgtgtgtttaaaatttttttaactacagtgctgcctcggtgagatttttaagttgtaacatagccccattgggctttatatgataggaggaggaaaggttataaaattaggcaccgtttagaaggtggaagaagcttagaggccctaaactgtcgtattaattgatgctctaagtgcctaggtaagcaaaagacaaaggccagggcttggtgtgaactgcctggtggcttcggcctatgagtgggggatggggccctttgtgaagtcgagggttggtgcggagggagaaaactgcaggtctccagtctatccccagtgtgagctagagagcggaccatgaaggaagtgggcagaccccgggaagttagaggacgcccggggaaaagcaggtccggggaggtgggccgagagtcccggccagcgtgcggggcggaggcagggtccggtgcacctgtgcggccgcgggccggccacttggggtctgtggtgcccgagtggcgggcgggggtgttcgcgccctgctttcgcgcgcggtctcgggccaggttctgggcgccgggagaggagagctggggcggcgcggagcagcccccgtgcgggcaccctgttcccctcccccgcccgcaacttcaccggcgcggcgcgagccgtcgggggcgcgcgcggggtgggggcggcgtggccgggcggtggcagcccaccgctggggagcgacctgcggtctgggcctcccgggcaccccgccacggctggcaggtcactcgggcccgaggggcctcgtggggagcggccatgttggcttcgtcactgaggactccgggcgggtcgggtgttgagcgaggcctcggaccttcggcctgtcgggggcgccctgccggggtgggcatgggggcatctgaggggtgaaaggggcaagggaggctggaggctggcgtccttcccacgcaccgatggctgtgatctctccgtgctggggagaggtgcaggggagggactgaggaaaccggtcggcaagtgagaaactttaaaattaggtcctacatggaaaacaccgaggaatagaactgccctggtgtgcgaggcaaggttggaagccaaactttgcagatgagaacaggagattccaggctgcctcacttcctccgtgaaaagtttttttcctaaactagggacctgaagttcttgatgtgtagttcctctttgcccagtagaatccagtgatcgcgcttaggtttatctgcagacctgcacgctacaggtgggaggcttccgcgccttaatgcttcttgtgtttgtctttcccatttctcccactccagaattcagaaggagctggcggacatcactttagaccctccacctaattgcaggtgagttgcttttcggattttttccatttttaaaattcttctaacctttgtcttgggtttttctttttattatatactttttctttgattctttggctaatgcttgttatggcactaacatcacgtaacagctgaaatttattaacctgagtataatgttttgatgagcctctgacaagctcagtactgttgagaagaagtaatggatttatttggagtggatttttacatatatgaaacaaaactaaagtaaatttaaaggtgtctccttgcctaatcatgggtctttgatatgccattaaagatgatgtaaaacctttcagatgcgaaggacattttggtttggaaaactgctttgctacagtaatctcttattcaatctctgctaagctaagagaacattagagttaaacactggatcttcaaacttactccatagcatatagattttttattagacttttggcagagcaattcaggaaacaatttctggctttgataaaggttttcttttaaattgtagagttaaactttcatggggtgtttttttcacttgctttattcagactgtatacatatgtgtgtttcagtttcaaaacaaattgaaaccagctttctaagggtttgttgatcacagctttatttagagaagccattttgctactgttgagtcaaggtggaagacttgatgactttactagatcaacaatgaagtgagggtaacttacaactatgtattagaatagaaccatttatttaagggaggtcctgtaactcccatactttaaaaattaagtataacatttaacctagttctcaagatcggcgttggaaagggatgtgagatttcagaaatactctaaacttattggtaggagtagaagttactgacaaagtattcagcggctatacacaatttttaagatgagtgtgtgggaataggttgaaaagctaaatgaagtattttgtttagtaacagtgaactttggaaactaattagtggattaaatacaaaactattgccgttttggttacattcattcttaatgttgattaggtgtgggatgctcttccgtgaaactttgtcctgttttgtaaggaaagtcattttgagtttgaaatgctcttaaactatagtttataattggaacacttaatcattctggggaattctttcctggctaataatctctcaagatggttgagaagtggaaaaaccataagacttaggcctaactcattattttgatggtggtggttcacgtggaagcctgtagcttcccttggttgtttgtgtggaatccatgtacattccccaaggtggttctgtgctgtctagttattgctcctgcttggtattgtgtgtctcctatgtgtgtgttattaataacattgattaaaacatataatggctttcttgtgaataagcacagtcaaatctaaaattgtaaaccatttgaagattttcatgggattaagcatttaaaaaaaaaaaacagtgtaagtacacttcagtttcacatcgttttaactgagtttatgtgtgaaagatttatgctcctgaggcatgtggaacttttttatctttgggaaaccctcccaattaccccttcaaggtgaaacgtttgggaattacctgtggtcaggggatgcaccaaactgggtggctgttgggtgattggtgttacggagtcaaagctcaaaatactaaattttaagaaaaatctctgatttgagagaaaatacgaggcatcttcattttgcaagagaatgtatattacattgtcttttaacaataaagatgactttattttctgaagatattttccagtggggccgtttgagtaatgtgaattaaaatttttacttttggttggctaatggtgctgtcttaatgttatatagtagtcccaatattcagctctcttaaaagagttcggttttacgttttgtgctgttaccttttggaatttaattatttagtattttaatgtactttattggagataaagatggattatttatttatttatttatttattttctttttgagacggagtcttgctctgtagcccaggctggagtgcagtggcatgatttcggctcattgcaacctccacctcccgggtcctggttcaagcaattctcctgcctcctgagtagctgggattataggcacgtgccaccatgcccagctaatttttgtattttgggtagagatggggtttcaccatgttggccaggcaggtcttgaactcctgaccttgtgatctgcccgccttggcctcccaaagtgctggggttacgggcgtgagccactgcacctggccttggggatactttttgaagtcagcgtccaatgaaaatctatgaattaagtgatatattaagtgcgtacatgtttaaaattaccctcagcatgaaagcatgagatttgaatgagttaaataattggttttcaattagtctgtcttatatttttaccctttgccatacttcctttcttcagtcagcattcagtgtgtagttttaaacacgttattaaaatatggcacttggcacatagtaacttctcagtaaatacaaaaattagccgggcatggtgatgcactccagcctgggcgacagagtgagaccctgtctcaaaaaaaaaagttgattattgcaaatcagtagaattgctcctcttgaaggaaggtgcactgtttgtgttcactaattttggcacttggcaaaaatatttgaagttactgagcatcaaaacttatgtgaaatgcaattgctcaatatgttataatgtatgaaaacataaaattaaattcttaatgttgtatattatgttgggtggatattttttagaacacagtacagattgtgttcaatgacctggtccaaagtcattttaagtaagtattttcaaactgctttatgttgccatagaaatcaaattcttaattttagtatctgtgatttgtgtgtgtgtgtatatatatgcatacacacacacacaaaatagtttcccaactcactcttcattttggttaggcttttattcccatatcatttagctctattcttttagggaaaaaaatatgttaactttgtaatgattccctaaagcgtgccagatcttagattgtaaaattatgccttttagatagctgatgaactctgggccaccagagtcagttttgcagctgttatttatagcccagggctcaaactttgctaaattgactagttataactagcctgtagacacgaatatctgtagacagtatgtctatacagactaaatggcatattttgcctaagtcctttaaacttcagattttatttaatggatatatttgtttcatgagtaaatgtctcagtgacttaacctagaaattcagatggggtgctattttaggataaaatgtctgaaaagtcattaaacacttcaagcatgggtgagaataataaaaatacatttctttctttctcactttttttttgagacagggtctcattttgtcacccaggctggagtgcagtggtgctcactgcagccttgacctcctgggcttaagctgtcctcctgcttcaggcccccaagtagcaggaactacaggcgttcgacactacactcggttaattttttgtatttttttgtagagaccaggttttacctattggccaggctgatcttaaactcctggcctcaagccgtccacccactttgcccttccagagtgctgggattacaggcgtgagccatggtgcctggccctgatactagtttttctgtatgtgacagaatttccatttagccttcttttgatagcttttttttccctaacactgcctatattttaaatagttttaagccattatattatacaagaatgcatgtttttgaaaaattcaaatacagaagtttgtggagtaaaaggcaaaagatagtcctgatgacctcttctgatcctgctccttgcacacagatgctccaagttagcactttgtatacttccacgtagtttctgtgaatttacattgtgtttttctggcattccaatacctcctcgaattggtggtaatggtaatgagatgtcagttcagaagtcccaggctgctcatcatggttcacaatggaaagagatccttttcttgcaacagtggagtgttacatacctcgtccaggttcagcatgttttaaatggttgtttgggtataagaaataggttcagcagaagtcatcctttataaaaccctgtatcttatgtgctaaaaagtattcttccttttagcatctttcatttatctgatgttactaaatgcrttaaggatagaagtgtgacttaaacatctgaatgatgtttagtttcaccattgcagtgtgtatacctttatgcatgtaaaggcagtgttgaaaaattgtgacaaccaggagactggggtttcagcacgatcaaaacagcacccatactagggtcaggctgttgggaattagatcatcactggggcctttcctattagagaggaaagaaaccctatctggagatgaattgcctttcaaatgagcaggaagtcttgtggcggttgtgtttaccaaaagactatatctggattgtaaaactgtactattgttattcctcagaaagctaaacagaattaccgtatgacccagtaattttactgctatctatgtaccctgaataattaaaaacagaggctcaaacagataacctgtatgtcagtattcatagcattattcatagtagccaaaaagtggaaaaaacccaagtgtctgtcaacagatgagtggataaacaaaatttggttaatctataaactggaatattcatctataaaaaggaatgaagttgtgatgcatggatacaacatggttgaaccttaatgttatactaagtgggctgggcgcagtggcttacgcttgtaatcccagcactttrggaggctgaggcaggcggatcacgaggtcaggagatcgacaccatcgtggcgaacacagtgaaaccccrtctctactaaaaatacaaaaaaattagccgggcatggtggcgggcacctgtagtcccagctactcaggaggctgaggcaggagaatggtgtgaacccaggaggcggagcttgctgtgagcagagatygcaccactgcactccagcctgggcaacaaagcgaggctccatctcaaaaaaaaaggttatactaagtgaaataaactagaaccaaaaagacaaatagcgtatgattccacttacatgaaatacctagaataggcaaactcataaggacagacagtagattagaggttttcagggactgaggggaggggagaatggggagttatttcttaatgaatacagtttctttttgaggtggtgaaagttttggaaataatggtgatggttgcgcaatattgtgaatgtaattaatgccactaaattgtacacttaaaatggttaaaatggcaaatttcatgttatatatattttatcacaataaacagttataccactgttaaaatattaatcagtattttgagaaaaatgcttatagcttagaaggcaatactcacagtttttggggattcttgttaaattcctgtcacaaactttgagggcctgttataaatgaaaaggcacaagctgggcatggtggctcacgcctgtaatcccagcactttgggaggccaaggcgggtagatcacctgaggtcagcagtttgasaccagactggccaactaaaaatacaaaaattagccgggcgtggtgacgcgcgcccgtaatcccagctacttgggaggctgaggcaggagaattgcttgaaccctggaggcagaggttgcagtgagccaagattacgccactgcactccagcctggttgacagagtgagactctgtctcaaaaaaaaaaaaaaaaagaaagaaaagaaaaggcactgccttcaaggagttcataatctagtcaagatgttaagacatgcacacacatattttgaatggtacttggaaatataaatattatttggaaaataataaaatgcagatatcaygttataaagtttcagaggagtgagagattactttgacttgggtttgagggattgtggctggagtacttagtgatctgggaaggcttcatggaagaggtgagaagtggggtggggaagaataagggatattcgtgatggaacagtgtaagccaagacagcagagggaagacagaaaaagggcactattgggcagaagtgagtaaaagctgtgtctagagaggaagaaacattagtgggagaataaatagtaatagataaagcttgtgttcttcagtgtcaggctaagtctttaaattttattatgtagrtgctggagaatcattaaaaaccttttgagtaggggctgtcattcagatagagttggctatctggatagagacagagtaaggattgagtggagcttggtaggaaccaggagacttggagattgctacagtagttaaggtggaaggtcaagagggtctggggtgtaagtggtggccttcaaagtggagaggaaagagaggtagaagacagtagaatccatagaacttagccactgatttcgatatggaggacttgaaaaggagtcgggttcttctgggtgttggggaagttggtggtgcattaacagaaataaataaggcaggaggatgaactggcttgagggaaaaaggttttgttacttgcttcgttgatcacatgcaatgcttagcatgttgctgccacttagtaggtcctcagtaaatatttgcagtttgactatatatttgagtttattattaaatcagtcattgaactcccagatctacatggcctacttttagattagattagacaaattaaatagattataaacttcctaaaagggaaggacaatgatttctgtctttgattctgaccctacatgttcttcccaactgctttagtttgacgattttcacagctacaggagaagttaaaagaatgatacagcaagcgcccacccttcaccgtgattcctcagcaaaattacaccatgtttgctctgtctctctcttatctctatatgataattttgtggagtcatttgaaagtgagcattttgatgcttccgtgtgtttagctttgcacacattgaatctgaggtggcctgacggtggagctgaggctggaactggttttggtagtccacattagatttgaaagtttgggtgatgttaaagtgcacaagattgctgagattggaggaggaaagaattgtgctctgaaggatgtcttcagatggaggatgggaaatgaagaggacttggagaaaggagtaggaggaaagccacaaggttgcaaaagtccctagagggagatcaaggaaattttctcttggggctctaaagtrtaagaacttaggtgtatgttttgtaggctgagaggaagaagcaaatatagagagaaaaagagtaaaaattgctagagagtccgggcacggtggcttacgcctgtagtcccagcactttgggaggaagaggcaggcggatcatgaggtcaggagattgagaccatcctggctaacatggtgaaaccccatctctattaaaaatccaaaaaattagccaggcgtggtggcacgcgcctgtagtcccagctactcaggaggctgaggcaggagaatcgcttgaacccgggagacaggggttgcagtgaaccaagattgcgccactgcactccagcctgggtgacagagcgagacgccatctcaaaataaataaataaataaataaataaattgctagagaggcagatgtaatgttttataacataattgtagagaaactgatggccctagagaacttaggccctaagtgggagaatgtatgtttagaaaggctggtagcctggaattttctagacgattagaagcatttttggtgcttgagtagcactctaggtatttgtatagaactgaaaagaagcagcatctttctggtgttatttggtttgtgttctttcccagcagactttaagttcctcgagagtagggattattatgtctttatatccctacagtgtccgagaaagggtaggtaaacaatacatatttgttaaaacacaaaaacctaatttggtcggatggtttaatagaacatcttcattaccctcttcagaaaatagtggaaattgctggggaaattgctgtcacattttacagctgtccattgctggcagtctttctgagttggcacccaagcagttttagcaattttgaccttcctgcaatcacagagaagctctggacgtcagtgtggcaaaaaagatgtgatctctgctgcaggctcgattgagaaaagatgtattggagaaaatataacacctttgaattgcttgttttgacttcatgtaaggtttatcatctatgtaatgtggcatagactcttagtctacagagttacaaatggtaaccttattataaagttaccttatgttaacaagtgagcaagggtctaggggtgctaaatacagtgggttcctagagatggtcccccaagtcctaaagctattccagatagttggttatgttagagttgctggcacccgcctgagacatctgacacatcccatgtcaccagtgaagtgaaactgggtttcataataagcccattcttattcagcctcttttatgcagccatgctctaaagtgaaacaaaagacctagtaactggtgtcagaatatgyttctaatcctctgggaaacctcctcctttataggctaaaagctcatcaaagtccctgcttgagaaccgtaatccaggaactttgctgtatgctaatggctcttttcttgaaacatatacacagtgattatggattgctttgtagagtccatgccacattacatagatgatcaacctttggaaggccaagttgatgtcccatcccactcaggaaatcttacaaagccaaaggttttcacatacagaacatatttaagttgtcactgggttttgctacagtgacagcaaaccaytggggcagtgtrttgttcactaatacttttaacagagtagttaaaaactgaattctgtctgctctccaaagtacatgctgacccaaatatgacaaagtgaatgcaaagccctcttatatagcattcaaaggcagatttgccacaggtgccacatctgacttgtctgtagtgatctgagtcattattaaattttaaatagtaatacaacggagtagtcttagtagagtctactagcattgaaatgatgatcattatccatactgccagtacattggccatttgtatttattaaaattgatcgatggaaaattggtgtgggatggacctctagtaaattctacagaaaaaggcattgaggcacatttccaaacagatgagagtaaatagagtaacttgggatgatcttacttggagaaaagttytagatgtgatgcagctcaaaaagtcagcattattatgaagcaatgttgtacatgtgacagcagcatgagtagatcagatcgtaatcatttaaaacattagagtgtctgctgtgtgctaggcattgttctgtaggtgactaaaacagacctggcctctggcttgtgaaacctgaattttagtagacagtgcaaacagcagctaagcaaaaggattagtacaagttgtaatggctagtaggaaagaaattgacagagtgcagtgatggagaataattggggagggtgtgagggttacctagagaagccttacaaagacatttggtcaaagacctaaaagataggaaaggaaatggccttgtgaaaagtaccagaagacatctgggacagagggaaggtaaaaacaggccctgaggcggggacaagtcaggtgatgctgattatgtaaaccgtrctaagtagagagtttggatttttctcaataatgctttaaaagtcttttcccaccctccctgctgcatggaaaatagctgggaggaagatgctagtggaagaagggagaccagaaaggagggtattgctctgtttcaagctagctggtgcaggtggctaggattaaggtagtggcagtggagatatggtagaacactgggacctgttgttggattgcatgtgagagatgagggacaggaacaaaaatgactccaagtttctgtgtttttttgcaattggctagatgatagtgatgttttactgataggtagactcctaggcctagaatagggccgtagggcgcgtgtgtggtgggtggcaggggagatgagggcagggtggaaatgactcctttttggacttgatagatttgaaatctgttcccatgaggcatccaaatgaaggtgtcaaaaataagttagacataggtaattggagctctgagatacatacacatttgtaaaggagaccttaccaaacagaggctcttgggtgtcttgggaatgcctttctctctcctagaaaggaaaggcatcatgagaagagtgcccaggatgaagactcaggcatctggcatttagaagtgtacactaggaaaagccagcaaaggagacagaaggaaaatcaagagagtgtggtattagaaagcagtgagtggaaagttttgaggtagagtgatcaagtgggaaatggtgctgtgcagtagaaaaagatgaagaccagcaagtamccactagattttacctcaggtttgttggtgaccttcacgtgtcaaacctggtttagaggagagacaatggaaaaggaggaatgattttcaagaatgaaaatgtgtttgtattactcttcctagttaaaatatttcattgtatttatccagaaaagtgatctggtgttatctactttctacactttagggcagaatttcttaacacagtatatataattttgtggggaggatggggaaagggcccaccattttcagtggattctcaaaggagttttttttttctgatctcccctctttcctcaccaaaaaaagttaacttctactttacgagattcaagtcctttgtgatctttaggttaacgttgtaccatgcatgttacaagtaaatagtgtcaggttcatgtattacatcttgatgaatctctttttcaagacttggtttgaaattactggataaattggaaaatcagtaaattgctgctgccatccttaaaaatattttacatgctttgatttgcatcgaccttttgtattctgttcaagctggagaatgcactagaatgagttggatatatgtatttacttttaacacagcataagttactcatcatatttaatgtttttcatcccctcccccatccccccacccccaacccccgccaccgcccttccagagacggagccttgctctgtcgcccaggctggagtgcagtggtgccttcttggctcactgttacctgtgcctcccgggttctagcgattctcctgtctcagtctcctgagtagctggggttacaggcatgtgccaccacgcccagctaatttttgtatttttagtggagatggggtttcaccatgttggccaggctagtcgaaaactcctgaccttgtgatccacctgccttggcctcccaaagtgctgggattacaggcatgagcctctgcgcccatcctgtttttcatccttttaatatgggctgttatgttaatgctttacattggatatacttagaactcttaaagcaatcatataagcattgtctttttaattgtccactgatcatgtcttaataatttgtttcagattatgccagatactcttggtcctgcttaccttgataattgagggtagaattaagaaagttttaggattaggaatcattcttctaattcagagagtaattagttggaatcacaaaagcattaggtgctgaactgccagagacaagcaacaaataatatgtggaaccacaactgttttggctacgtargaattttgctccacaagtaatttaaattgttcctactaccacttacaacctttcctcctctatgggggtacatctcaatttttaagttaatatattagaattggtgttataaaaatttatttcttagcagactttgctacaacacatttatcctaaataaaaggagattgttgactttgcagagaaaaagaccctaaaagaaaacatttgttttattacaagcacccaggaggattttttataaacatgaamgataactttcctctaacctaagtaaatatttcagaaccaacgtatgttaagtgattatagtaatgtgtgtgcagagactggcagtaaagttagcagcgtcatatactacttgctagtatatcacactgctttggcctttttctgagtaaccctctctctggaagtcttcagaatgcctaacttcatccttcagggagactggtagcccccgaaaagacatttattttttgtagcttggtattctgagatgttctcacatccaaagtaaacactgtcaagtgatttggaccagtcctaaagtaaatcatatattgaggacacagttcttgttaaaactgaaatttgaagttgttgccattttctgcattcacactactggattctttgtagatgcggggatttctacttctacattttactgtaactatttacatttacctgtattgggaggaaattctatattgtagcaagttaaaacacatgattttggtaaaaaagtaaaaactgttaagatcttggagcccagacttatttgttatggagatttggagctaggagggacccgatgctcccttctctgtctctgtgtcctgtttattgtgaggtgtatattgataatgaatttgtgaagaaaggcattctttgatgacttagcagagaaaaaagtgatagtaattttatccattctgtctccagatgactggtactatgttttactttctcctcttttctccagagccactcttaaaatctttctgcagttaatggtttgttatagtccaattttcattgctttccaagatttgaactttctatctgaatgtaagtccccctccaaaagcagtcatctttcagttctgtagctcctctgatactcttcaagcccctcaaggagcattaggtttgaggatggtaacatttactcgttgtcctttgacctgaagatgcgtagaaagaaatgctatgttggatctcagtatacctaataacagtcttgcaggctgaatttgcattttcctttctggttgaaatcttgtcagtttactcatgcatttctgactttctcccattctggtgtgcttcctccccttcctgctcccttaagaaaaaaaaaatggttagccagttcggtgaagttttctcagaaatttcttgtggacagtgctaacttaagccggaaaacagtttgtgacacttgacttttcaaggaggagataagattttgtgtacccagactgtatatatcaattattatggggctaaactttgaaagtatgactagttccccaacaagtatatacgaaaccttgtaggattagtaattatatttcttgaattaattttaaaaatatgtaacatactacacacacatcatttgcaccatgagaattgtccatactaataagagatttttgtttgttccagttaaatcttactcctagttttgcaagtgtattcaggcctgcatggttgtcagtgactcaggtggggtgggcagggcagtctccaacctgccccacctgtgtttctctgcctgtttacttgtgaccttggctgagcagtacaaatcattgacaacactggcagtgctttggtctgtgcctgccctggcttattccattttttggccctttgattgaagatgcagttacaaccagtggctcctgactgtatttagtcattcgttctgatatttatcggccatttattgttgtgccaggtactgaagatacagcagcaaaaaagacactgtctctgtgctcatggagattttattcatatagagggaggtacaataaaagaaacaaatgtacaaaagtaatttcagaaaacagtaccaagaaattaaaatagagtaaaatggcttggtgagtgactgcgcaggttgggacattggttggtgccacattggggaaatgaccctgaatgatgacaaggacccaaccatgagaagggcattttaggctgaaggacagcagatagaaaggtgctgagtggggtaggccagtgtggctggacatagtgaatgagggtgagagtggtaggaaatgaggtaggcaggggtcagattttatttgaatttcagtagaaagccgtgggagagctttaaatggaggagtgaaatacgaggtatttggagaatacctcacgtaaaatttcctactcatgaaaagagagaaggcaggtgcagtggggcatgcctatattccccgctgttaggagactgaggctggaggatcactcaaggctgggagtttgaagctgtggtgtgtactatgattgcacctgtgagtggccactgtgctccagcctgggcaacatagtgagatcctcatttaaaaaatagtattctgttcagtgttttgaaaaaattgtattaaaaaatagaggttatgcagatactctgtaaaacttttttggcattatatgcagttttactgacctttatgtaacagttctattatatctagatayctgtgtatctaacaaatttagacattttgcaaaaactgaagacatgttaccaaaaattggtgcctcaaccagtgaaaggaagtatagcattactcagctggtcttgacgtaaaggttggatgaagtgtgaatgtttgtaatgcatacataatatttaaagctaacagaaacaacttcttagttgtctttgtagtgtgcttgccttggttcctggctgttcacctgaagtgaagacagcctgagtctggcagtagggaagcatcaagagtttggcttcctcctccttcagagcaacaacagcaaatgacacagcagggaaactaggagagttgggcagcttggaaacagggaacctcagcagtctgggaggcagcttgccagaactcctcccagccctcacttggttatctgtgatatctaaaagatttatctctacagtgtgaagccccaaatctgtgatatgactatggagggagaatgctttccaattttcttgatttggtagatacttttgtggagttgtcattttttcatagttttttgttatgatagctgaaatatttgttctgaaggggaggtctaaacacatgtaataaggctaatgaagagattggagtagcagtgtaatcattcctacacgtgtattttaaactttaggtactaaatccctttttgatatatatgctataaaaatgacttataaaatgaaatgtaattctagcatatcttaaactgttgccaggaggtttttgggttgcactgataagaaattacatgatttcttgcagaagggtcatttgtcttgctaaaggaccagtttctcatgactcctccctctccccactaataaacagctaagaaaagggcccttaggacattttttttcacttatccattataaaaagttattcacaattcttaaagggacaaaatttcaatgcagacataacatggctatttgctcaaagggaaaaaccaccaaataataaaaaaaatcaaaatacaaaaaaaaaatcctgtattttatattttgctttggggtgaattttggtaattctaaaatgatatgaatgcatgaatatatccagtattctgggtgttcattcactttatacagaataatgaaggaacagtagaaagcctgatttatgatattctggacagctttttagatttactatacaaattttagcttagtttctttttgcttcacactgtgtgcggtggagattttaaaaataggataaagctttaataataacagctaactttattaagtmtgtcaatatgattgttattctcattttataaatgaggaaagagaaccttaaaatgcttaagtaccttgcccaaggtcactaggctcttaagtggagaagctggtatttaggccctggccttcaaagcctaaccattatactctactgcctcttatagtggctttatgaattatagaccttcttttgagttgttgatgttaaattttactcatatgcagagctgtatttaaatttaaaaagaggcttattttataacatagccactaatatttttcattggaattgccrtctacctctacttgttctccagtgtagatttaattcttatattcttttgtttaaaaatctaaggtcctaactgcccttagaattaagtgcccaaaatcttatgtagtattcagatcccctacaacctgatcccagcttttatatttccatcttatttcctctctctgtaacttgctgttttcagtatgccccctaggatgttctctctcccagcttctttsctttttatttttcaaagctctgataaaaatgattcactccacacagctctcatctgtgtcccagggcactttaaatacatacctctttaaaacatttatcacattgagttacggtcatttgtgtttgtctctctgtcaagaccgagtttttaaaaaatatgattatttttatttcttgtacctaacaccagaagakgcctaaaaagtatgaatgattactgaaacaaattaaaatacagcatttagtagtagttgtataaatgttaccagttacttcatttagatgttaccatcaatcacagaaacatgtaggctgaagcaatgaaatcataaatacagtgttttaatcttccattgtgtaaaaagatcaatttctatattgtatgtaaatgtaatataacattttaaatataggtttaatttttgagaagatacacagtatacttagtgattaaaaagttaggtatttaaatctatgagaaaatgggatcattatttggatatttaccagtgctaatcgaagcagttgctggtaaaggcgttggagttgatgcatatagatagaagttacttttgcaataaaacattagagtcaccatcagaacagaagacttgaaaaattttatttgactcaaattacaaactgagcatttatgggtgtctgtgtgtgcatagcactgaattagatcatctggagatacaaaagtgtgatagatgctttcaatataaaataaacgttacatagctactgaacaagacattatataaaggttcgttaatgacctaagatgtaaatttgtttataatttttatcatagttcaatttcatctaaaccttatgtgatttcagtgttttcctcagatttgtctcacactctagtctggtgatttccaggcttgtgcctgtcccagcacacctaaggaagagggaaaatgtccatcaataagtaacaggggtttactttcagtggacagggtggatggaaggagagatkagcaaatttggggtgaaaaataaaagccctccagtggttctgacaagctgtagctagaggggggtggcagttgcagaaggggcagtttctccgtcttgtattttttatttttttytttgattcttgaaaataagttcttatttttgataagatggaggattattattattattattttgagacagggcctcaaaaaaaaaaaaaaaaaagagagggcctcgctttgttgcctaggctggaatgcaatggtgtgatcatagctcactgcagccttgaactcctggggtcaagcgatcctcccacctcagcctcctaagtagctgggacaacaggtgcactccacaaagtccagcttttttttttttttaatagagacaggatctcactatgttgcccaggctggtctggaactcctaagctcagatgatcctcctgcctcagcctcccaaagtgctgggatwacaggtgtgaatcaccacacccagacccagctgttttctaaatttttttggagaggtggggtcttgctgtgttgcctgggctagtctcaaactcctggtctcaagcagtccttctgcctcaacctcccaaagcacggggtttaccagtagcctgagcccccatacctgcccctctcctggaaaagtgctgaagtgggaaagtttacagatttagggagtccaaggaaaaggttgaggtcgagctaataagagaaggagaaaggaaagaggaactgagaaaggaaaggggtctagaagagcggttagaaatggggactttggttttcccctcaggcttagctcactactttctataaataagagatgtctgaaagagaagcagataaaaggagaaagccttcagcaaatttgtgagttgataagcatggattgattggctctgttggcctgggttcttgaggagtttgctgctatttcrgaatttctgtagagaaaccctggcattgtcaggatatgggtatgccacatgtttcccttcctcccccttccctccactccttcttattacctagctagctacacctggaattttggttctagaataatttaaaagatactttgtcaagaaaatatctttggaaaaatcatgcatatattatttttccttttttctttttaactacttcctggttctttaggctcctctaattcttacatgcatgtgcttgatctctgggccatgcttgcttctagttaagtagcctttcaggatggtgtttaatttattctgagccctttataatatmccctgacaagagcatggagtggatagagggagtcttagtcaatatgtattataaatagatttagggttcacaaaggtcagcagccttcatctcttgccctacccccatcacacacaaaaataaaaatcacaaataataaaggattttaagagttataccagtcgggagtgggttcatttttttgtttttktttttgtttgtttttggcaagctgaagtcatctgttggatccaaaaatgcataaaaatcttcaggcttatagaaccaacagcatcaaaggaagagcagtgtgactcaatattggggtgggggcaggtttggkgttttggttgtgtagaagctccttatgagagaacagtgtgatgcttggagctrtggagaatccagccactgctttttctctcttccttaccttattactcttcttgattcacctggatgtggaaactgtccctgtttaagagtggccttgtcaatgctctctgtgtatcatgtgtacagtagggaatgtgtcaagccagatgagtggtctcattgaaacatcagcaaatcagtatatcgtagaatttagatcccccttggaggtggtggtgatagctaacttctgttgcggtcttaactgtgggtcaagttttgttctaaggactttgaacattagaaactcatttaaaacttaaaccattcctgttggtggtcatgtaatcccattttacagattatgaaatcaacattaaggttatgtgcagcttagtaagtggagaagccagaagaacccacgtgatctggcttcagggccgatactcaaccactgtactttggagagaattagtcattctgataccacttttgttattagctaagactctttatgttgcaggtaacagcagtctaattaattcatttaaataaaaagataatattatagggatatttgagtgtgtgtctgataacccaggaactgaaatgttctggatatcagaaacaacagaaaccaggaattctctccaactctcatctatgctctcactccaagtgcgctttattttttctcacatcgcagattgctcctggctgcccacagcctgcctgaagaacatgaccacaggcacccagagagaaacttacttttggccagttgtaaaactcttgggcgagggaccagttagtctaacttgattgagttttggatcagtcagctattttggtaattaaagtgaaagggtccagatgacactaatattgggagctagtttgacaaaatatttaacaaaatgaatactttttttttttttttttcgagacatggtcccactctgttgcccaggctggagtgcagtggtgtgatcacagctcactgcagccttgatgtcccaggctcaggtgatcccctcccaccttagcctcctaagtagctaggactacaggcgcgtgctaccacacccagctaagttttgtatttcttttttttttttctgtgagacagagtctcactctgttgcccaggctggaatgcagtggtgcgatctcagctcagtgcaacctctgccttccaggttcaagccattctcctgcctcagcctcccaaatgctggaattacaggtgcccgccactatgcctggataatttttgtattttttgtagaggcagggtttcaccatgttggccagactggtcttgaatgcctgactgagctcaggtgattsgcctgcctccgcctccgcctcccaaagtgctgaggttacagacatgagctaccatgcccagccaaatacttttttctaaaggaagaaaacttagtcatttatttagctttaataattggctttttgagtttgttcaatactttaagctctgtgagcatatggatcatgycagccatctagcacagggtttagaaaacagtaactgctcaaacttttgctgtgaatgaatgaaggagcaaatgaatgattttcctgaaagggaaataaaaacagaattcagtttctgatcattgtccagggaatggcttggacacaaatagttgacctgttggaagagaatatacatttttaataaaggagaagggactgtgtttttcctggagggaggagacctgtaaagaaaaatatagaggtgtggggggctgggcgcagtggctcacgcctgtaatcccagcactttgggaggccgaggtgggcagatcacctgagctcrrgagtttgagaccagcctggtcaccatggcaaaaccccatctctactaaaagtacaaaaattagccaggcgtggtggtgggcacctgtaatcccagctactcaggaggctgaggcaggagaatcgcttgaacccgggaggtggaggttgcagtcagccgagagagaatcgcttgaactcagtgggtagaggttgcagtgagctgagagagaatcgcttgaagccgggaggcgaaggttacagtgagccaagatcttgccactgcgctccagcctggacaacagagcgagactttgtctmaaaaaaagaaaaatacagggatgtggtgactcacacctgtaatctcagcactttggttagctaaggcgggtggattgcttgagcccaggagtttgagaccagtctgagcaacatggtgaaacccccatctctacaaaacaaattttaaaaaataatccaggtgtggtggtgtgcctgtcatcccatgtacttgggaggctgaggcaggaagattgcttgagcccaggagattgatgctgcagtgagctgtgtttgtgccattgtactccagcctgggcgacaaagtgagaccctgtctcaaaaagtgggagaaaaagaaaaatataaagtattcaagttaattttaactatataacaccataccttttggtcaatttttcaatttttgtcccttttctcccatttttcctcagtctccatatatttgtctcttagcacttccttttattttccataacgtacctctcagtagagtataaaatggagatattttttatttttaaaatatgagttttgtgttgcttgttcctaaccttaaaaaatgattggtatatggtatgtgcctttcttgacagtgaactatttgatagtcatatatttaaaattaagaatttaatagaccttcccactagggaagcatttgtttcctaggcacctttggaaggtgctacattaatgaattwgttttattattttagataaattgtttttccctatttttagaatattaatagagtcaggttggaagatacaaataaacactgattcagaacgccacatgagagtctgaaagccatgtcatagcagtagttaaacagagtattaaatgcagatgaacaagatgtcggaaagcaatggtaatgttagcaaagctagagagaagataatttcktatattttacagcaaatgttgttgtctrtgtaaagaaaattataggcatgactgtgaagaaatgaggtttatttaagatgccaaaagtggctgggcgtgatggcttatgcctgtaatcccatcgctttgggaggccaaggcagaaggatttcttggggctagaagttcaagacaaacctgagcaacacagcgagaccctatctctacagaaaatttaggaaattagctgggcatggtggcatgtgcctgtagtcccagctactcgagaggctgaggtgggaggatcacttgagcccgacaggttgacgctgcagtcagccgtgtttgtaccactgcactccagccctgtctcaaaaaaaaataaaaataaaaagatgccagaagttttgtatcagaaaatttcaacagtgcaaaaaagccttatggtaaaaaataaataaaaagaaataaaataaaacttcaagaggttaactcttggtccattatttaaaacattttttgaagtgtctttggacaaggccttttacagctcatttgtgatagtcatacagttttctttgctgtaataaaagcttggttttgagtctcaccattgagttcaaatcttaactctgcctcttgatggcactataatcttgggcagatcatttaacctctagcagctttattttctcatctataaatcagagctaataacccccatcaaattctccttcagaggacaaatgtttgtcaccatttagggtgatttttctaaaatatgtctaattgttctacttgcccacttaaaattcccccatctttctcacataacctctgtagcatgtcccattactctgtagcttttctgtgtttgcttctaaccttccttcctcctgtgctttttccaagttcttttccctgaacagcactgctagctgctcctggcagctttttatttaaaaaatgaaaaaaaggccaggtgccatggttcaagcctgtaatcttagtgctttggggagctgagatgggaggatttcttgaccccaggagtttgaggctgcagtgggctgtgattgcatcactgcactccttcctggatgacagagcgagaccccgtctctaaaaataaaaaaggaaaaaaaaacttacactgctctttttaatactaggaaagctctttgagattagaaattggctgatgttttttcttacagttttgttttataaattttttaacttaaaatattaatgtaatgaaagaaatcactttggaggaaatttaaaactaaaatgaattcatactgaattatgttttaagacttgtggtattccctgtaatgcataaaaagcaatgtgaggaatcactgctcaaattgataatgtttaaaatggagaataagagcatagaaaaaaaaatacgggactaattgtacaatattttaacatttttaggttttacatattgagttaacctgatcacctacttgaagcagtctagcattaactgttaaatgtttaatgaagtagttctcaaccttggctgctatctcagttacatgtaatgttttaaaaaaatgcaggccaggttgggtggctcatgcttgtaatctcagcactttgggaggttgaggcaggaggaktgcttgagcccaggagtttaagagcagcctgggcagtatagcaagatcctgtctacaaaaaatttaaaaattagctagatgtgctggtgcgcacctgtggtcctagctactcaggaggctgaggtgggaagatcacttgagcccaggaggtcgaggctaagtgagctaggatcatgccagtacactccagcctgagccacagaacaagacctgcctcaaaacaaaaaccagaacaaaaaacagtcacaccagggccccatcctattggaatcatctctaggggaggttcccacacctgcattaaaacaaaactcagaagccaagggtaagaaccaaggaagtaatgtatacttttaaatgtatacttttaaagtaatgtatacgttttaaaatttgcatacagtgtacctctggtaatttccaggcttttatgacatataatcatcaattattcaaaataaaaagtgaatcaattttagaaactcccctcctcccccctttttttagacattagaagttaaatctcacggtttacctgtatcaatttgcagattattgtttgaaaaattctggtgaattgagactgcattaaatttctctggataatctacataaataatcctcaaaataaaaggttcatttcaacacgtaatagctttatatttaaaggcattaggaaagggggaggcagggagggaaagttagcatctgtttcctgtgagttttaagctatttctaataacttcttttcagctgctgcttttatgatctagtttatggcacagataagatatatatttcagaaaaaatgttttgagcttttgctgttgatgttaagattacgatttttctgttaaataggacatttggaacaagaactgtttaggatatagatgaaatacattgaaacagcaagaagttaaagcattttaaaaagccttgtgaataaatctttacaagagagtttttataactaaagttaataggaatatctaaaatgaatatccagctagtaaaattagccatccattcatgaatttaggaaataactgatttagaatgctatataaaaaaagagtttctcttttcacttagtcctcacaagttttcacctataatgtatttactcattaaacatcagatgtcttccacatgccatgtgctgtactggggaagacataaacaggagagactaggtccagactctgttggagcccttagtctaggggagtaagggattttaagtaagcaatagaagagatgtgtgtgttcctctgaaaactgcaaggtatttcagtgaggcagctcttttgttctttttccaaaagagtgacattggcttttcttggaagttttagagctgaaagggaacttagatctagttcagttcctcattttacaaatgaacacactcagatctagggaagtgaggtgactttcctaaaatggctcagctgaggactggtatggttgggatagaacatgggtcttctgattcttaaccattgtacactctctaccgtgtccctcaggggcatgtgaaagtaaatgacatatgacagacagaatcatgcccaggaatctattcattctgcacactatgattgatctagtttatgttctctttgtgctagatggtggcatcactcatgatgaagaagataaagctcttgttaagtagtttatggtctatcatgaaaagatgggcaatttgggaaatctgtggcttgttaacttgtttggcatattgagtaacatggcaggttctggagccagactgagttaaaatcctagctctcacataatagctatgtaatttggggaaggaacataaatctctactctgtttccttatctgtaagatagggataataatgcctacctcatagagtttttaggatttagaaatgtatataaagcacttggaacagtgcctggctcacagtaagcactaacactaacaaaaaagttatactattattttcacctcagttatacaggtgaggaagttgaaacataaaaaagttaagtaacttgcctgtgatcataaagctagaaagtttgggagccagaattaaaatacaggagtctcagtgctctgtttagatttaggacctgagccagggagtgtgttccaaacccagcactaatacttgagaagctctcaaaactgtaagtatccccaggatactggtgtctcaaaaagatagtaatgtgttaactgtaagctatttagtgatacatttgctttcttctgcagagaggagggactgaattttgggactgttgcctgcaccatcccagtccaacttgctatgtgtttttatttttagycattggctgattccaatttgaaattcagaggatttgtgatatattatgtgatatgttttaaaaattactagctccttgctgcattttataaagcgttggagatagtttttctttggttggctgattggttttggtgttttgttttttagaggactagcctacacctggtttgagtaagaaagttttgtttgagaagcagcgtttttaccaccttcaatcttttgaggaacttttggcatgtggaaaattaaatactacaaactttcaatagaaggtagacaggtaatatggagaactgagaattagaaatcttgaccatgctgttgggaatttcccttttctttctgcttgtccactaatctgcattgcttattaaaacaggttgatacttttaaggctctgcaaagaagttcttttcattggttagtatctaataagtgatagctggtacaggactttaaaaatatataataggggtttattttctttatttttattatttattttatttttttttgagacaaggtcttgttctgttgcccaggctatagtgcagtggcacaattacagcctactgcagtctcagcctcccgggctcaagtaatcctcctacctcagcctcctaagtagctgggactataaacgtgagccaccacacctggttaatttttgaacttcttggtagaaaatgtttcgccatgttgcccaagctagtcttgaacttctgggctcaagtgatcctccctcctaggccttccaaagtgctgggattacaggcatgaaccaccatgcctggactagcggtttcttttaaacagcatataattgggacttgcttgtttttccaatctgacaatctttgcttttaaattggaatggttagaccattaacatttaatgttattgttgacatgattggatttatttatttatttttattttttgagatggagtcttaccctgtcacccaggccggagtgcagtggcctgatctcagctcactgcaacctccgccctgcagggttcaggagatttctcctgcctcagcctcctaagtagctgggattacaggcatgcaccagcactcctggctaaattttgtatttttagtagaaatggagtttcaccatgttggccaggctgttcgcaaactcctgagctgaagggatctgcctgcctcggcctcccagagtgccgggattacaggtgtgagccactaccgtgccaggcctgatataattagatttaaattaattttcaatttatcctatttgtatttccttttttcatgcttgcttttgggttgagtttttttttttttaatgatactatattaattaatttctcttctgtattaccagctataactttttttgtttgttttttagtggttgctttagaatacatctttatagaatacatctttagcttatcacagactacgttcacgtgataattataccccttcacccacagcgacccctcaacaatccctctcccagcattagtgctgttattgtcatatattttattctgcatgttataaaccccaaaatatattgttactatttttgctttaaacattatcttttaagagatttaaaaaataatttagccgggtgcggtggctcatgcctgtaatcccagcactttgggaggctgaggcgggtggatcacgaggtcaggagatcgagaccatcctggctaacacggtgaaaccctgtctctactaaaaatacaaaaaaattagccgggcatggtgacatgcgcatgtagtctcagctacttgggaggctgaggtaggagaatcacttgaacccaagaggcagaggttgcagtgagccaagatcactccactgtactccagccttggcaacagagagagagtctgtctcaaaaaaagaaaataataataataataataataatttaaaattttatattttccacacatttattaccatttctggtgttctttttttctttgtatagtttcagatattcactcactgtcatctccttctgcctgagagacttcctttaacatttcttgcagtcaggtctgctggtgacaaattctttgttttattatgtctgaaaaaaatctttgtctttttttttggaaatgttcctgttggatataggattttaggctgacagttttgttttttacttaaagatgctatgtaactgtcttctgacttgcattgtttccagtgagaactctgtaatccttagtttgtttctccatataatgtgtcatctttttgtctggctacttttaagaattactctttatcactggttttacacagttagattatgatataccttttgatgtagtttttttattttttgtatttcttgtgcttggtgtttgttcagtttcttggctctatgagcttatagtttcatcatatttggaaagaaagtttgttttctgtgtttcatttgaataatttttatggctgacttcaagtttcttatttttcctttgcatagtctaacatgctgttaatttcagtatatgtttaatctcagttgttgtatttcttcatatctggaagtttgatttggatctttttataatttctatgagtccacttaccatggtcaggtatttatcattttaaatttatgattacagttataacaagcgtttactgtctttttgtccactaatttcattatctgggtcatttctggatcagtttctattgattggttttttaccttatattttcaagcccctgcacatgcgtgataattttttgttggataccaaacattgtgaattttgcctttttgagtgctgcctttttgtattcttaaaaatattcttgagctttgtcgtaaggtgcagttaagttggaacttagtctgatccttttgaggcctgcttttaagcttttaaggcctccttttgaagcctgcttttgagagtgaccagaacagctattaaggctaatttttaccattcactgaggcatcaccattctgagtattctgctggatggcccataagttaccagggtctttttctttctgactaatggcaatgcaaactattctcagccctgtgcgagctctggggagtgttctctctgttctctggtgattctttccctggcattgcgtagtgtcctctcatgcatgtgctaattcatgcttaggtaaatacttgacgggaccctctacagatctccggagttctgtctctgtgcagctctggtacttgtgaactctgaccacttaggttattccttcctgcaccacaggcgattgtaggtctcaatatatttagttttcctttctcagagatcactgccttgcactacctgatgtccagtgtatggaaactgctgttttatatattttgtcagtttttttgttgtttaagtggtasggcagatttagtatctgatataccatcttggttagaagctgaagtgactttacagcccatgatactttttgtaaataaagattagtcgttagaaaacaatactttcatgctgtttcagcttttatacatctataatgatattatttacttttagagatgcgggtgaactgtttgaaaagattgaaaagatataaagagttattggattctttacatcatgagcgaggaaaaaaattaagctcgtcttaaatggctatgtttcaattttatctgctataaatgggtaagagttagattttatttaaaattcatcttggcatttagagactgatactgtttctggccatatcagctgaactgtgtyattagaatttttaattgttttagggttttttttttaagaatagatgattgatttttttctgtctctctactcttcttactcagaattagatgtgctttgagcacgtattaattctaatacgattaaaggtcaagccataccacaagaatatttatattatatgtgttgattagagttggacttgtaatggccgcattgttagagattgcatttctactttccatgaattctgttggatttgcagataaaatgttttctgtctaatagggagaaaatataaatatcatgcattcatctctcatactttttcatgtatcatgccattcacagttctaggattctggagccacatttgtagccaccattaaccaaaacaaaaacaatcccacatgactattacctttgaattcagtattgtactgtattattctgacacagaaatttgaaatccaatgggttggtgagtgaaaaagtcacatgcagctgacagtcacagtttttatatgactctcctagatctttttgttttgtggacgtatgtttgggggtagatggtttagagttctattaggagagagatgaaggtattctaggtgagtgttgagtggctgactgctgttagagggcaaaatgggataatcttttacaaaaaacttgaggtacatgatttagtactttgattatcctagtgattgttacactgaatcagaaaatgcatttaccttaaaacctttattgtaactaggtgaaagtaaatgtggtgtaacttttggtttgactataatgggcagtggaatctcagatgttaggatcaggtaagaagaaagattgaactatgtcatgacccagtaagtgaaggggtgtgtgtgtgtgtgtgtgtgtgtgtgtgtgtgtgtgtgtgtgtgtgtgtggtgttgttgttgttggcgacagggtctcaattcgtcgcctaggctgggatgcagtggtgcagtcacgactcactgcagcctcaacctcatgggctcaggcagtcctcccacctcgcctcctgagtagctgggatgacaggcacatgccacgattcccagctaatttttctatttttttgtggagacggagtcgtgccatgttgcccggcctgttgttcgtttttctttgaagaatatacctttttattttattatcatttgctataaatatcactaaactttgtcatcctaagtgagataataaggcaagatatttcaaggcctccttttgttatgtaagctgaattcatagcttgaggaaataagtcggagtctcatacctctgtgtcaacactgaacagcattttttgtgacgtaaaatctcattatcacaaattacaagtgcgctattcggtttttaaaaattttaattttggtttttgaagtcacacataagtttttatactttttgagggaataaagatttctaattgtacaacagtaaatggaataaacaataataactttgagtcttctggaatagatgttcaaaagatcaaattttccatatctctgtaatctaactataacctctgagggcaagggcttgttttatttgaataaagaaccctatagtagcatgattatggtagttatggtataactttataccataaaatatcccatgtgctattatactgtggcatagcatatatactatatatgttacagttacatataaaaatatatattatagtagtatatagtatgattatttggcttaaagctttttttttttttagcaggagcatagttcaaggacaatttttttcagattaaaatggactttctttgggaagccatctgtccccccagactaagttttgttgagagtagtgacagggacagaggcaagaccattaggttaccataatacctggacttagtttgtataatcgaggttaatgccagtcttgttgactgcaggacatacagttcctaacatattgcttagcatataatatgtgttaaatatttgttgacattcggaactgtgcacaatgttttatgagtcaggaccattgagttgcacaactgtggcacaccattcacataatgataatatagattttctcagttctgagtttgcttgctgcataaatgtcttaagtctttggcacctactgctgttagaatatagtggcatttgaacacacaattaagtatttagcttatgttacacataatcaactttcaataaatgagatctataataatttgcctactccactctcaccttccacagtcatttctcccctgcttcctattggttgttttgttttgaaccagcacccttccaactcccccagagcatcccacatcattagcttcacaagcatcttccataccagtgtcatctttaacaactgtgtggcagtttggacaattgacaatccaaatgaccctcagatgtattctagctattcttgactgccttctggagtcagtattttcagccaaacagtgaaaattaacaacaaactgtgtctaaaacttaaaacttaattcttctttcacccaaatgcttttcctgtgtttttatatttttatctctttaatgtatttttttctggttgcccgagttacagatattgccatctttatcctgcagttgtactgacttaacgatatcttcttgatatttcttccaccatgtgtaattttttatgctcttagggctcctttaatgaaggcaactcatatgtaaaatgggagtatgtaaaaataatttgtgggagagccatgtgggtggggtttgtgagtagtctctaaggcgcaggctacagctagctagcctagtgtttgtgagccctccccttcccccagtaaaggttgattcctttttctcctctttcctgcttgtttattttattctattttatcctcattttctacttctgccccaaaagcacccattctaatgcctttcactatattgtttgtgttcttgtaaaatgtatttagtgtttgtatttttaacttacataaatgatgcctaattctttcttacatttttctaagcacaatgttttaagctctctccctgttgctatgcaagcatctaattcattgcgttgaacagccacatagtattccaaggggtatactcattttatcttayagaagaccagatcgtttccagctctccatccccactaacagtgaacattctggtccgtaatcttttttggacctctgtaagaattaagcagaactgcaaggggatcatagggcttacttaaatttgatttgacttaagttgtaccagattgttccccagaatggctgtactcatctccatgcccaccagtagcagagcatgagaattcctgtgtcctcttaggtgcgttctgattttctaatttttgccaatcatactctacacttacatatggagaatatgttcatgaacatgtaggtcagtcttaggtgttatgcgtgggagatgggttgttgctctcccagatatgaagacgtgctccaataatactacactgtatttattaccgtagccctgtggtaaggtaaacagaccaatgaagctgacttggagcacccagagatggacatgtgtatatgtaggattttaatatataatatataatttatggcagcaccaaacactgaggacaagatgggattgttcatagatggtatagggaaattgactcaccacaaggaggtaaataaaaccggattcctacttaataccatatatgaaggtagactaggtagattaaaagctcacatgtgaaattttaaaactatacaatgaagaaagaaaatgcgacccacaggccaggaaggatttcctaagtgtagcttcaaaatcacaaatcttgacaataaactaaagcaaattttatgtgaaattaaaattttcttcttaatggacaggatattttcttctttttacctcaagatctgtgtgtctggcagaatgcattgcacactcttcaggagtggggaggctgaattggctatgcacatatatactctcttgatagaaggaagaaagcctctgtttaccaagttgcccccattttatttagcaatgaaattgtaagccacatgacaattccctttttctaagcatatgtaggagtagagtgtagatcagtgttttctgaatatattgtctgtatcagaattacttgaggcagttgttaaaaatggaaattcctcttttgtccatctccccactgttttggtttctctctctctctctctctctctctgtgtgtgtgtgtgtgtgtgtgtgtgtgtgtgtgtgtgtgtatgtgtgtgtatgtatatatataatttttctttttaaacaaaacctctctagggtggagtttggcaaagttatttagcagaagtccaagtagtaaatattctaggcgtcataggccatttgatctctgttagaaccgttcaactctacccatagtacaaaagcagccatatacaattcataaatgaaaaaatgtggttgtgttccaatacagctttattacggacaccgatttcaatttaataattcaatataaaatttattaatagttttcacgtgtcataaaatactagttttctktagatttttttaatcacttaaaaatgtgaaaacctttcttaactagtagaccaaacagaaacaggttgagggcctgatttggcccatgtgagtcatagtttgccaactcttgctccttaggcaactaaggttttcaaaccagtgccctagcttatctgatagttaactgtcattctctgtattatttggggaaaattcttacatcagtaacatgaattttcagtacctgtragagaaagtagttcttaatggtcaggaagggataattaaataaatgtcttacataaatctagtttaaggtaaatgtaatgttgaaacatttggttttttaaattccttttaagcctattcaagagtgggtaatagagctgggtgcagtggcccattcctgtagtcctagctacttgggaggcttgaggtaggaggattgcttgaggctaggagtttgagttcagcctgggcaacatggcaaggccacagtctcttaaaaaaaagaatggggccaggtgcagtggcttgcacctgtaatcccagcactttgggaggccgaggtgggcagatcacctgaggtcaggagtttgaaaccagctggccaacatggtgaaaccccatctttactaaaaatacaaaatttatccgggtatggtggcgcatgcctgtggtcccagctactcgggaggctgaggcccggcaatcacttgaacccagggggcggaggctgcagtgagctgagatcgtgccactgcactgcagcctgggcgacagagcgagactccatctcatcaaaaaaaaaaaaaaaaaaaaaagggaatgggtaatagagatggaaaatggaatgtttaagctgtatttaataagtcttggagtataccatttgagatggaattgttaaagatgggacatagagaaacagtctttttaactgcctatagtaaaaatagctaggtgtttagctacttttttttttctttttaaatcgatttatcaagatgaataaatagctgctatcttgaaatattctaagggcaggggccaggtaggctgtgcgaggtcaatatgttaatcatgttattacacgttttaagaagataagctaattcttgaaactcaccaaagaggaattcattgtacaaaagaatatagtttatccctaaatttgatggaatggtctttgattgatgttataagaagaatagacttattttccctttggttcatcagtagggcgatcatataattactaataattacatcagggcagtaggcataaaccaagattgtcttgggcaaaccaggacatgtagtgatcttatacaccagtcacatatagtacttttaatataaagggtagataagtcttttaacttcctagatgaaaagaagacatccattaatgtcatgacatcagtagtacgtagtgaaaagagcattttcaaagaaaaaaggtgataaacattagtatgataactatgactgaaatgaagcttatttttacacccttaagggtagaaataccctgtggtattaatagttttaaaaatatatttcatatctgtgtgtgtacatgtactttaaattttttttttttttttttttttttgagacagagtctcgctctgtcacccaggctggagtgcagtggtgcgatctcagctcactgcaagctccgtctcccaggttcatgccattctcttgcctcagcctcccgagtagctgggactacaggtgcccaccaccacactcggctaattttttctaatttttattagagacggggtttcaccgtgttagccaggatggtctcgatcttctgacctcgtgatccacccacctcggcctcccaaagtgctgggattacaggcmtgagccaccatgctcagccttaaaattgttatttggaaataatgcacgtgatagacaactcaaaacagtagaaagggatatatagaaaaagtaagttttcccatttccagccccaaaggcaatagctgttatcagtttcttgtgcatcctgtgtgaattactttagatatacttaatctataataatagattatacacccctttcccctacctccttttttaaataaacacaaatggtaacttgctgtaaacactgttctgtaccttggttttttaacttcagatatcttggactttccccagtgttttcacaataaacctgtgcagtaatttccttatttacaaatgaagaaagtcaggctcagagtttaaagtaacttgctttaaggaaaaacgtatattaaatatctaggctgggcgtaatagctgatgcctgtaatcacagcactttgggaggccaaggcggatggatcacttgaggtcaggagtttgagaccagcctggccaacatgatgaaaccttgtctctcttaaaaatacaaaaattagctgggtgtggtggccacatgcttgtaattccaccttcttgggatgctgaggcaggagaatcacctgaactcggaagatggaggttgcagtgagctgagatcgtgcccctgcactccagcctgcgtagcagagtgagactctgtctcaaaaaaaaaaaacaaaaaacaaaaaactttagctaagcaggtacttagtaaatgttagtttccatcacgttctcttacccaaatatgtccttatgcttaataagcttggaggaagatwatcacaattttagaaaaaaaaatacaatatacttaaatgcccacataatgtgatataatcagtaactaccctgacagttcagatatgggagaaatcaagtggtttggttggggaaaacttcatagaagaatatagagagattaggaaagaatttaaacagaaggccaaaagggagggcatctaagaaaggaagagggaatagcattagcaagaaagtcctaactggaatcraagggggagaggtgttggtaagccaagggggcctaataagcagtgaagaccatgagttcatgtggtctttagtgagtggcttctttcacttagtacagtgttctcaaggttcatccatgttgtgtcatgtatcagtacttgatttctttttatggctgaataatacatatttcattgtagggatataccatgtttatccatatggtggacatttggttgtttccaccttcagctgttaaaataatgttgccatgaacattcatgtgcaagtttttgcatggctatattttattttatttttttaggaacctgggagtggttttgctgggtcagatgttaatgattatgtttaacattttgaggagctgcaaaactgttttcctaagtgcattgttttacattcccatctagccagttcccatcttgctattatccatggtttttattgtagttagcctagtgagtgtgaagtgttgtttcattgtgtctttgattttctttctttttaaaaaaatttttaaatttctttttgaattttactttaagttttgggatacatgtgcagaatgtgcaggtttgttacataggtatacatgtgccatggtgatttgctgcacctatcaacctgtcatctaggttttaagcccctcatacattaggtgtttgttctaatgctctccctccccttacccctcaccctctgacaggccctagtgtgtgatgtttccctccctgtgtccatgtgttttcattgctcatctcccacttatttgtgagaacatgcagtgtttggttttctgttcctgtgttaatttgcagaggatgatggtttccagcttcatccatgttgctgcaaataacatgaactgattcttttttatggctgcatagtattccatggtgtatatgtgccacgttttctttatccagtctatcattgatgggaatttgggttggttccaagcctttggtattgtaaatagtgctgcaataaacgtatgtgtgcagtgtctttatagtagaattatttataatcctttggatatatacccagtaatggaattgctgggtcaaatggtatttctggctctagatccttgaggaattgccacactgtctccaacaatggtgtgtctttgattttcatttttaaaaaatgacattcagaattgtatttttctaatagcaatgatgttgaacatctttttcatgtgattattgggtatcttcattggatcaaaattgacatattctcattggaaaaatgtcttttagatattttgcctgttttattaataaaattcaggctttttaatggctgaattttaaaagttcttatttatctatctaatatatcaatctattaagacaaggtttcactatattgcccaggctggtattgaactcctggcctcaagtgattctcctgcctcagcctcccaaagtgctgggattacacgtgtgagccactgtgcctggccattaaaaattatttttattccagataaaagtactttattagatacatgatttacaagtgttttctaccctgtctgtgggttgtctttttattttcttgatggtattgcttgcagtacaaaagtttgtggtttcaatgaagtccagtttacctatttttcttttgttgcatgtgttttggaattgtatttaagaaaccattatctactcctctttttattattattattatttttttttgagatagggtcttgttcagtcaccagagcagtggtgcaatcctagctcactgcagcctcaaactcctgagctcaggtgatggtcctgcctcagccaagtagctgggactacatgcatgcaccactgcatccggcacacctgattgttttttttttttttttttttgagatagggtctctttctgtcacccatgccagagctgtggcatgatcatggctgtctgcagcctcaggctcaagcagtcctcccacctcagcctctccagtagcagggactacagatgtgcgccaccacacccagctttttttttttttttttttttttaagagacagggttttgccgtgttgcccgttgcccagattggtcttgaattcctgggcccaagcagtttacctgcctcagcctcccaaagtgctgggattacaggcatgagccaccatgcccagcctattcctatattttcttctaagagtttcatacttttagtttttcgatttggatcagtaatccattttgagttaatttttgtgtgtggtgtgaagaagggttcagtttcatttttttgtttgtggctattcttttgttcccaacaccatttgataaaaaagactattctgtctccattgagctgatttggcactcttktcaaaaatcaatttacctgtaaatgtaagagtttatttctgggctcttaattaggttccattgatctttgtatctatccttttgctggtactacgatgtcttaatttttgtggcttcatagtaagttttgaaattgagaaggaagtcctctagcttcgttctttttaaagattgtttggctattctatgttccttgcatttccatatgaattttaggatccgcttgtcaatttctgtttttcattttgtttttttttaaacagtccagctggggtttttacagggtttatgttgaatctgtacaccagtttgagaagtattcccatattaattttaggctgggtacagtggctcatgcctactatattcccagcactttgagagaccaaggtggaaagatcacttgaggccaggagtttgagatgagcctgattaacaaagtgagaccctcttctctataaagaataaaataagccagccatggtggtgcacatctgtagtgccagctagtcaagaggctgaggtgggaagatcagttgagcccaggagttcgaggctgcagtgattgcaccactgcacttcagcctgggtgacagagaccctgtctctaaaaaataaaaaaaaaattaaaattcagatctgtacagtttggatgtttgtcccctccaaatcctgtgttgaaatgtgatccccagcattggaggtggggcctggtgggaggtgtttgggtcacagggacagacccttcatgtatggcttggtgctgctctcacggtaatgagtgagttttcacttgctttgttcatgcaagatctcattgtttaaacaatgtctgggacctccccactctctcatgctccctttcctgtcatgtcacatgcctgctctcccttcatcttctgccatgagtggaagcttcctgaggcctcaccagaagcagatgctggcactatgcttcttgtacaacctggagaaccatgagctaaataaaccttttttctttataaattacctagccttagatactcctttatagcaacacaaaatggactaacacatgattcatgaacattaaatgtcttttcagttatttatatttcccttaatttatttcaatgatggtttttagtctgcagtgtacatattttatgcttatgttaaatttattcttatgtattttactcagatactattgtaaatttgaatttttaaaaattacattttctgattactcacgggtagtatatagcgatggttggtttttgtgtattaattttgtatcctacagctttgttcagcttgtttattggtcctaagagctttttagtggatttgagttttctctctacaagatcatgtcatctgcaaatacagatcgtgttacttcttttccaatctgaatactttttatttctcttttttctttttttgagacagggtctcactttgtcatccagactggagtgcagtggtgcaatctcaactcagtgcagccatgaccttctgggctcaagcgatcctcccacctcagcctccccagtagctgggacttacaggcacgtgccactgcacccagcacacccagctaggtttttgtatttttgtagagcaggggtctcaccatgttgcccaggctggtcacgaactcctgggttcaagtgatcctcccaccttggcgtcccagagtgctaggattatgggcatgagccaccatgcccagccttattttgttttgtttttttttttgttttgagatggagtttcactcttgttacccaggctggaatgcaatggcatgatctcggctcaccacaacttacgcctcctgagttcaagtgattctcctgcctcagcctcccaagtagctgggattacaggcatgcggcaccacacccagctaattttattttttgttggtcaggctggtctcgaactcccaacctcaggtgatctgcccaccttggcctcccagagtgctgggattacaggcgtgagccaccgcgcccagctgccttatttctttttcttgctgtaattcacctggctacaacttccagtaaaatattgaatagaagtagtaagggtatcaagttcttttgctctgaaaaaaatgaaaaataaaataagtagtagtgagggtggacatgtttgtcttgttcctcatcttagtcctcagaaatcattttcttgtcaccattaagtatggtgttggctgtgggtttatcattagtgtctgtttaagagccaagcattttaattttgatgaagcccagtttgtcagttttttcttgtgtgattcatgcttttgtctcctcagaaatctgcctacccaaagattacaaagatttttcttctgttgtttttttttaatataagttttatggttttagctgttaaatttaggtctcttcatttctgttcacaattcagtctttaaatgcatataggagagttggaggggagaggagacacttgtccctcttaacttgtttcttggtaatgagtgaattggtgaaaataactacatgtacacctgtagtcttgctttgtacaggttttgcatttggtagtctgccagtgctcaaaaattcctggtggtggtttttcagggataccacccagtgaccatctgtggtggtcatatgttatttgttcacccaacatccccctggggtaccaacactcctcattttataataattcgttttatccacatggttcaagtgggtctttttttaccctccagtggtgataggctgacccaagcccaggcccatcagaatgctttatcwtggtcaggcatggtggctcatgcctgtaatcccagcactttgggagaccgaggtgcatggatcacctgaggtcaggagtttgagaccagtctggccaacatggcgaaaccccacgtctactaaaaatagaaaaattaaccgattgtggtagtgyatgcctatagtcccagctactcgggaggctgaggcaggagaatcgcttgaacctgagaggcagaggttgcagtgagccaaaattgtgcctgggcaacagagagagactcagtctcaaaaaaaaaaaaaaaaaaaagctttatgcatctacccacagtgattggttcagagagggtatttaacttaatctgaactgatgagagatataccaaagtatttgggagggatgtttttaaagcttacctcttttcctgagatatattatcttttccaagctatcctatgtggagagccagtctcaaaatgaagtcaacccaaaattgaggggttagtgagaaactcttaatgacactgtctgtcccttcgggtccatccttggcctgaagccttctcatggcctttttgatgatgtgggccagtttatcttttggcccaggctcttttgagtcaggtatctatacttgtaacagaaaaagccctaactaataagctattagtcttcttgaataaatttttaatatgtaggagttacaaatacattaggctctgtcttattaatggacagtaaaaggacaataacttttgtgtgtgctcttggaagtagcagctccttgtggctttaaagaaattctgttaaatacgtaggattatgatactgttttgtggaaggctgaatttaagtcctaaggttacatgagaattcactgagaagcatatctttaaatgtctgcttttaatgaagatatagattaattattcacttgacaaacttgttggtattttatgggagaattcagtgcatatagaggcttcaaaaggcagattgtccactgacaggttaggattctcaagtgtaattttttattactttagagccgtaattattttgtgagagacagtatctttgaattaaaatgagaaatgtttttcaacttagagattcaactcatttcagggatgtgtttaatccaaaaatagagagttcattatgtagtggtgaaattaaaacatttattaaaagcagtctttgggtttaagtaggtagatctcaaaagtgtctttttccttcttattggttaactaagggacacaaatacacaaccttctctaggaaacacttctaccattcttactagtttatgttttaatttttcaattttattaaattagtacatcttgatacgttaattttcatattgtttcatttcattataataccttcattagttatatgggattttactatgttaattttaacctttaaagtgaaaagactaactgttgattattggaaagcaaaaatatagctttagatttttgtgacagccgttattaatacatagttaagcagtcattatttctttggaagagttagcacttgttccttaaaaataattgtatgcatagaaatagtgctttaggccgggcgcggtggctcacacctgtaatcccagcactttgggaggccgaggtgggcggatcacgaggtcaggagatcgagaccatcctggctaacatgatgaaaccccgtctctactaaaaatacaaaaaaattagctgggcgtggtggtgggcgcctgtagtcccagctactcaggaggctgaggcaggagaatggcgtgaacccgggaggcggagcttgcagtgagccaagatcatgccactgcactccagcctgggcgacagagtaagactccgtctcaaaaaaataaaaataaaaaataaaaaaaagaagtagtgctttagggcttaaaggcacttacatagcttatttccttcaaggttcagttccgtgaggtgtggtatgtggaatagcattagctgtgttttccagatgaggaaactgaggactgaactggaatttgcatgctgttcagattttttaagttccctgtgtggtttttcttttcttttctttttttgagacagagtctcgctctgtagcccagagtgcagtggcatgatctcggctcactgcaacctccacctcctgggttcaagcaattctcctgcctcagcctcccgagtaactgggattacaggcaggtaccaccatgccttgctaattttttttgtatttttagtagagacagggtttcaccatattggccaggctggtctcaaactcctgaccttgtgatccacccaccttggcctcccaaaatgctgggattacaggcatgagcccagctgtggtttcttatatcatactgttaagtgtacttttaaagctttaaaaagcagtgttaaccctttcttaaaacagatttcagggaagacagacgtttaaaacattagccttctctccccatctggagtatggtttggaagtcattgctttgtagtaaggcattattttcctggtacattgccaaggaccaacaactgttaaatcaacaaactaagattttcttctagatttgtatcggattgtgactttgctttctccctttcaccacccattaatgcttagtaaagccactatggacctcacgtatctaaacccttccctgaaatgcatctctcttttcataccactccaatgggaactcctgttgatttgtttctgggccctgacagattagcaggaaaagaaagcgctttagaaaagtgagaggggagttcagaggttagaggggaatcagaaaattaatgtcatgattatcaagaatgtttccagaaggcagggctcatcagtccttgacaaaaaggctgatgaaaaaaatggagttgagtgcagccgatcacctcaataatcctagcagtttggcaagctgaggcaggaggatcacttaagtcccggattttgaggttgtagtgcgctgtgatcacaacactgcactcggcctgggtgacagagctaggctgtctcttaaaaaaaaaaaaaaaaaaagagagagaatgagaaatgccatttaattttgagcctggcaggtctttggtgacttttgagactagtttactgtggaatgttgaggtaaagtaggactgaatcacatgtagagggatctgtgtgtatttaggagaagcatcaggaaattggcactgaagggcaggagaaagctggcccagcagcctggaggggtagaggtgttcaggagtatgttttagagtctggtggttttttttttctttctgcataggaaagtttgaactttttgtaaccaagtgttctattcactgttaaagtaaaagaggaattaggtaaagaccacatgtttatcttagaaagaagcacacatttttgtgaaatgaaagaagagaggagtgaaaatagaaattttcatgtgggaagaattgaagttgaggtagcaaggaataccaagacaactgagaagtccttataaagaacacattcagtacttttaagatgttattttccaaaacatacacttttgggttgcctgtcagactggagatgtatgcctgtcgagtcacgttacactgaatttatttaggaaatagtctgacatacagaagtttcacttctcctgccacttgtgaaggatttgtctcattggtgtggtgtcagcctggtgagataggacttgcttgtggtttggaagctgtctgtgggcaactccaagagctgttgtgctctgcctctttatgaaccttctgtgcttatggaaatggttcccagcgtgtgctcctcaggaatgagtctgagtgacagaggtgccagtaggctatgagatggtagcaatgaccttagctagtcttttttgtttgttttgttttgagacagagtctcgctccgttgcccaggctggagtgcagtggtgcgatctcggctcactgcaacctctgtcacccaggttcaacctctgtcacccaggttcatgccaccgtgcctggctaatttttgtatttttattggagatggggtttcaccatattggcctggctgaccttagctagtctttcttaagaggctgggagcctgaggacagttgagaggtactgagctagttaaacctcaggcgctttccctgcgaaggctctatggcagataccacttggggctatagaagctgttacctacagtgtaaattctggatttcaatgcagagggcagacatagggctactaattttattttgttttgcaaggacattgaaaaaaagtcattgtttactgtcgtcagcattttataaaagggaggatactttttaatcacaaaatatgaagaagtttattatttgttttttgagatggagtctcgctctgtcatccaggctggagtgcaatggcatgatctcggctcactgcaacctctgcctcctgggttcaagcaattctcctgcctcagcctcccgagtagctgggattacaggcatgcaccaccacgcccagctgatttttgtattttttgtagagacaggatttcgccatgttggtcaggctggtcttgaactcctgacctcagatgatccacccaccttggcctcccaaagtgctaggattacaggagtgacccactgcgcccggccaggaactttatgacaatggaagacaaacctttatattgagtaaattaaaatttatgaaaaaaatgtaatgctttctcttattcttaccactcgtgtgtaagaacaactgacctgcagcactgaagctattcatttttgagaaacttgtcctaaatacttgtcctccctcctccccactttctcacaagtaaaagaaagggagcttgaaagctggcatgctatctgcttacatgtgagggagaggagggttgcccataggaaatttttatattgggcccatttctaagccaccctcacttgagctcgtctttaacaatttacctcatatcaaatacctcgtattttaatcatttattgttggacagtcccccaccccccaatttggctggtagttttatgagaaaaggcattaattatttaccatttttgtgtatcttactagaattttgccatattcattaaatggaactgattgctagtctaaacttactaccagttacctcactaaacactcctggccaaacaatatctagtgccagctctagttcagcctgcctttgcctgaggccagatccttctgctctgcccgtggaagctggttgagaggaagtgatgtttaatccttgacctacttttcatcttcccagagagtaatgtgcctgcagctgttctttcactctcttgttaaattcttgctttcttttactccttaagggaggtatgaggcatggaaattttcctccatctccaacactgctacctcctcacttcacctgagcacatgccccatgactctccatattacctgctcccacccttgtgactttgatatccatgtggatgacccatatctatctgcttaccagtgtctgcttaccaggttcttcatccagaaacattagcccaaatgaagcttcactcacctgagcaacagttggccatgccatagcaaatggagtggcctttgtaatacagagatttgagtccagtctttgccagttagcagctgaatggccttaaggttaattacttaaagtctctgggcctcagtttcctctaatgcaaaacagagatattctctccaaaatggtgttgaagaacttgctgtggctttgccttacccagttcattgagggtaaactgtcttccctggtttttaaagcccttaatgatttggcctcaacctgcccatccagcaggcaaaattctttggtacctagcatagtattgaacaaatactaagtatgaatatgtatttttattggtttattatattattataaagcatataaggatttatttcgtactctcattgtttcatgcctaacagtcccgactgctggagccactgaaattttcatttactttgttttgaagaagcagttcagaaccacgtcctgtgtgcaggttttgcacacagcagatgtgtaaggatgtcttgaaataagggatggttcttctgacattgctgaaggagaaaatcattttgctctaccagactgaaattcagagctcagccctttgctgccagcttgctctcacagctgtctgtccttggtttctgggtgctttcaccttggctagatgaagatgaacgttctgacccgctcaggtttctgtagggttgagactctgctgccactactgctcctttgatgctggtgactgcacctcactaaattagctgttcggctagacaaatctttagcgctctggttttacctttttagcaatgttttagctggtatgcttccttgtggctttgtggggctcattgttaatggaagcgcacattaacaaaacactaaaatggccaaacatcaacaatgactttagttaacaaaattctgagagaggtacaattagtagtcagaaatggactgtattaaagtggctatcctatgagtttatcttgatactatcttacctcatgcttacgtggtgttgaatgtgccttgtatctaaagctgtgggtcctggctcttaacaacaagcacaacccaaccaaggtatcaagtgaactgactaaaagtattcattttgcttaaatgtgtttctttcccatacacttacctctttatttgctataagccataaacatcgaaatggtgttttttaaagaatatgaagccttattttttaacttcttgaaataaaactaggtagtacctaaaatagcatgtacactatatttaaactattgcatataatagtaaatgaattcattagggatgtaactaatggtgaacattctttgaactaaaatgaaggtacatgatttgattgtttttcgaaatgttaatatataaacagacaaggagatatatatatgtaaagtcacattttatttatttagtaagtgatgactgcaccaaatgctacacagccatgcttggagtgatgcttgggatgtctatttaacaataccgcagggagactgcacaggccagaaaaagacagtttgcattcccttctgctccttaaaggtagaatgtagacatcttatttgtatatgtgttgatgccttcggaggatctgtggtttattgataactctttagtattgttactatgaagtagttatgatttccccagagacaattttgtttccattgccagtgctcttgtccaggttgttagacctcctatagcctctttaattaggctctctgcttcacttattgaaggctctaagtagcttcttgtttctgaattgtttgatgttttcagtgtttggagttacctatttctgaagacagtgactagttttctgttacctcactcctgatacggaagggagacagggaagtgctgggaggagaagggtgggtccctggcgagggctccacccccgggcctgtgcccacagacctaggtgaagacaggcactccagccttcacgtccaaatgttgcatttcccaagaccactttgacccgccacgcccccattctgtgcctataaaaaccccaagaccctagcaggaagacacacaagctggatgccgagagaaacacattggcgaaggaatacacaggtggatggacgtcgagaggaatgcactggtgtaggagcacactgggatgccagcaggccatcgactggtggaatgacacaaagtttggctggggcagttggagaagagttgggccaccaagcggccagactccaggggaaaaccatttcccttctggctgccccatctgctgagagctgcttccactcaataaaacctcgcactcattctccaagcccacatgtgatcctattcttctggtatgccaaagccaggatacagaaagccctctgtccttgccataaggcaggggtctaattgagctggttaacagaagccgcctatggacggctaaactaaaagagcatcctgtaacatatgcccactggggcttcagctgtaaacatttacccctagacactgccgtggggtcggcgcctcacagcccgcctgtctgtatgctcccctagaggtttgagcagcgggacactgaagaattgagccacacccccatcacacaccygcaagtgggacaagggaacctttcccatttcactgctgtgacagtgcaaagctattaaaatctgaattgcttagcaggcatgtaaggtcctctctgctctggtctcatttaatctttcaggttctatcttcaccttcatttctgcaggagaaacacatctctgtaccaaaagttcttcggtttggtcaccctttcccctgaaaaaaacgtattaagctctgtaagcataacttagataccattacactgtgaaaccttctcagttttccatagaatacatttctgtgttctgtctgttcctttgaaaacatttttttagtttgtattgtactatatgtggtgcagtgtgcaatgaactatatgtccctggcatatagttatccctgaattatgtggtgaatctataatattaagctaatatgttatgcttgatttctggggaccaagtagatgatcatttggaaaaatataccaccattgtgcatggcagaggaacttcatttggtaaagaattgtgtcacatggttataggttgtaagatactatctttttcctttccgtcttatmtttcttattatttattttttgagacagagtcttgctctgtcacccaggttggcatgtagtggtgccatcacggcttactgcagcctcaaactcctgggctcaggcatttctcccacctcagccttccaagtagctggggctacaggcatgcaccaccacactcagctaatttttaaattttttgtagagacrgggtttccctgtgttgcctaggctggtcttgaacttgygacctcargcaatcctcccaccttggcctcccaatagttttcatttttattgaaattatacactaacatagtttaaaggctttaatatttctttgtttgttaaaaaaaaaaaaaaactattcccagcattttgctctctagtggcaactacttgtacctccttgagccgagtactttgttgtttatatcctgtttttaggtatatactcatattactttatatttcagtttttaccaataactcttgattcatgacaatggatgatgacaacttagttctttcctacctagtcacactcttcctttatcctgttttgcttagatcaatgttgataaaatattcactgtttatattatgtgagcattattcacatgtggttacttttccttccttgcttgactacctccctccccaagttattctctcaccttttcccctctccctttctccctctgtgcccttccctacccactacatatatatacttgtcacaaattcaaccccagatgccttcacaattatctaaaagtcctcaaaagacattcagatgcataggttttatataaattttattttactttttatttttttgagacggagtttcgctcttgttgcgcaggctggagtgcagtggcgcgatctcaactcaccgcaacctccgccttctgggttcaagtgattctgctgcctcagcctcccaagtagctgagattacaggcatgcgccaccacgcctggctaattttctatttttagtagagatggggtttctccatgttggtcaggctggtctcaaactcccgatctcaggtcatccacccacctcagcctcccaaagtgctgggattacaggcgtgaaccaccgcgcccagcctgaattttatcttttttgaagaaatctctccccagagccatctgacctcttctggttttaacaggctacctgctaactctgtttatagctgtcataccggattctcgtgtcactgtcttttggggaattctctttactattctacatagaagttttgtttcctttatctttttcttgtttatgcccttattttgcagagtacatccctcagtaacttcctgaaaaaggattcttgggagataattttttagagacctcaagtatctgaaaagatctctattcttccctagcacttgattgatagtttgtctggtgtggaatttgtattggaaatcattttgaagacattgcttcagtgccagcttactcccactattgcttttgaaatctgaagcccgctgatttggggtttcttacacattacttttttttttctccctggaaacttgatgtgccaccttgtgtaggtcagttttcctccaatgtactgtgccttttcaatgtggaaactcatggcctggtaagttttaagttattttggacctcctctctgtttaccctttctggatcactctcactattcaaatctttgtccttcctatggtcctttaattgttgtatcttttctctcctatttgcagcctttcttctactttcttgggagatttcaactttatcttttattgagtttttgaaatcttttgtttgcttgcttttgtttttaattttcaaaagctactttttctcctctgaatgttattttgttttggctttattcttttttcataagtgcaatgtattctgtctctctggatattaataagtttattttgaaattctccctataatttctgttttctgtagttggctatcttctagtttgttttgatttttgatttttatgttagaaaagaaccatgttcctcagttatctgttccttagttagaaaggtctttcctctgagtcgctcatattccccagaagagactgcctggagggcgaaggccggcctgtgttctgggagctgagtggagaaagaaaactggggtcttactgtcctgcatgcataagctctttttcagtacagcacctctgccctcatccatgttaatgaccactggtgcagagaccctctgtttcarcttcttctgaaaataaatttcagactgtcaggatttctctttctgtgtaacaaattactgcaaatttagcagcccaaaacaatacacacatttagtatctcacagttactgtgggtcaggaatccaggcatagcttagctgagccctctgctcagggtctctcttggctgtagtcaaggagtcagctggcctgtgtcctcatctgtagctcttacaaggtcacatagttgttgacagaattcagttccttgcagctatgggactgaggcccaggcaactcctagaggccgctcatagttctctagcccttttcttaggtagtttatgtcataggagcttgcttcttcaaggctagcaggagactcttcagtcagttaagacttagtcctttttttgagatggagtttcactctgtcactcacctaggccggagtgcagtggtgcaatctcggctcactgcagcctcaacttcctagggctcaggtgatcctcccgccttagcctcccgagtaactgcgatgacaggtgcatgccaccatgcccggctgtgttttgtatttttttagagatgaggtctcacaatgttgcccatgctggtccctaactcctgggctcaagcagtctgcctgcctcggacttccaaagtgctggctcacacctgtgagcacttggctggaataggacatgtttgtaagtcagcacccttctctgtttggggataatgctttggacttcttggtattaaatgactgtttgaatcattttagaaaccaactgataccaacatgaagtagcatatgactctgccgtctgttaacttacaagccagtttcgtgcctgaccagtggccaccagtatttgcttaccagtcattctaggcttgttacgtttaggtagctgtgaaatgtcccacatcagccctccatctgtgggcctctttagctgctgctgctgctgcagcatctagccttttgaaagctattgtctactgctcagctagaagggtgtgtgtagacagcaggaccaaggattcgcctgggtgaaagagttggcaatgagaaagcaaccagaccctcccctccaagcccagccctgtatttgacatgcagggcataacctcactcattcagtctctcagccctatgcaaatataaacagccttcctcttgtctctccaggccagccggggccaagaaagaagccagtgattcccccaagtgcagtaaatagctctcctcacctcctgaccctgttatttcctggtagttctgagttgtggatcctgcagtggagagggagggaacaaagaagytgcagaggcctcagcttcacagagcattgagcagtgggtgatattgtatcctcaggcaggggttgacctcacatttcagtgcaggtcattctaatgactgctggacctcccagtgccactgtgaactagaatggaatagagtgaagtggatctgaattcctggactgtgggaccaacctaacttctgagctggagaaagtaggtctcatgttctatacctgcttttttttagctctagggggaaaaaagaattgtgcatctttcttgttctctttgcagcttaggggcataacgtttggactgtaattgaactgatgcttgtttccccaaaatgtctttggttttcattaaggtgggggattctctgcatttttggagttgtcacwttatcgaaattcctctccacactaagtactgtgtgtggtatgcttttattttcacctaattgatttctgcaaataaagtgatttaatttttggtattaagaaatttaaataacaccttttggcagatcacaagattttcttgttcttatttaatcctggcttccatccaaatgtgaaagagaaatgaaataataaggtaggaaaggcagaccagtaattgtgattaaacaacttttgtgttgagtccaaagacaggtaactttattttaagcttcatgggtgtagtaaaaatatatcaccttaagaaaacctggattgccattagccagaactgacttccaggctttctgactttgtacaaacaaatcacttaatcctgaatccttctcctcatcttttttttttttctctttgtttgtttttaaatgtatttctttattttgtattactttcttcttgtcttttttatattttatgtattttattttcctcatctttaaaatggataaatgttacctttcctgattcaaagattctaggcaaagatcaaaagaagtcaaagtttgtgaaggaactttgaaaattatatatttctctgcaattgtgttagggtacttttctttctttgatttatgttggttcttggagtgatactttagatgtacaaatagtaggtcagaacaaacctgtatgtaataaattctggagaattgagttcaaactttggttttgcttatatttggataaattatcatcaactttgttgaggtgtaatttatacacaattaaattcacccatttcaaatcttccatgtgttttgactgtttagataaattgacaaataattatcttagataacagttggtatttctacattaaagaagggagaaagagcaccctcttttggcaaaagtttctcctgtgtgggctctccggtccccctgtctcatttcaaaatcagatttgcatcctgctgttggagtacacttgagccctttcatttatactggtgcaggttttgtagtctcttagagattcagtatgtcagtcccatgtctgagagcaaaggagaaggaagagggtaggaaagagcacctgaattgaatagagaggagggagcagagaaggcagaacagtgagatagtatccatttagtctgagtatttccaaattttccaataaaatgtcagtggaagcttttatcataaggccaaaatctgtccttcaatgtgaccacagagccacaggagacccaaaccccttgtagtcactgatgattttcattgggctatagatgggaatggcagcagtcataaatatttcctatgaatgagtgttctagatattttttacccaaagatgtagcatatcagtgggtcactattgaaaacatgtttggaatgaagcaggaaaataagtcaaaagatctcccctcagttcctaagcaactttgttgtaaaaataactgtgaaaactgggcttaaatgaaacayacattcgaatgcctggagtaagaattattgatagcccagacttagtatcccccccacctttccaagtccttaaagcattggctttctactcagaaacgctgcttaccctagggtgaccatagttacttttattttttatttttatttatttatttatttttagatggagtctccctctgttgcttaggctggagtgcagtgacacgatctcrctcactgcaacccccacctcctgggttcaagctattctcctgcctcagcctcctgagtagctgggactacaggcgcccactaacacacccggctaatttttgaatttttattagagatggggtttcaccatattggccaggctggtctcgatctcctgaccttgtgatccgcctgcctcagcctcccaaagtgctgggattatagccatgagtcaccatgcctggccacttttactttctcttattactttactttctacattaataggtagattagattccatctcttctacctttattttgtccttcagaatagaaattgggaagtaaacacagtgttgttttttttttttaatctcaataattggaatctgtttgaaggagaaaatcccctgcatctcatcctgcaagtataaccactattaagttcgggtatatttatatcttacaaaaatgtttgttttgcatactgttgtggaacttgtttctttcaatccttctggatttctttccttgcttagtatgtatacctcattcttatttaagagctgtacagtatactgtcatatggttgtactccaatgaacctatctcctgtcagtaagttagctcattccaaatttttttcatcatatataagtaagagtctccaaaatatccttatactatagtcacatgcacgtgtccagttatttccttagggtaagttccaagaagcagaatttctatatcaaagtgtttactggaaatttttgccattctgataggtaaaagtaccagagtgtttaacttgtatttctttgagtctaagtaagattgtgcatctgtttatttgccatatgtttattttccacttttgagaactgcctgtgtactttatccattattattatttaaattagtcaagatattagcccttaatcatgaactgaaaataccccctccaacctttttataaactttatggtatccttttttttttttaaggattttcaatttttatgtagtcagatctgttggtcttttcctgtgtgtgtgtgtgtgtgtgtgtgtgtgttaacttcagtgatgtctcagttttggtcattcctgcactcctgcctgccccctcaccccaaggtgacttgtgagatgagagttcaaatacaagtagtttatttccaggtacaaagaacaaagggaagctaaggaagaaaagatagtcaataaaagatgtctcatctgggcttagtggctcatgcctataatcccagcactttgggaggctgaggcagtcggagattgcttgagctcaggggttcgagaccagcccaggcaatatagtgagaccctgtgtcaaaaaaaaaaaaaaaaagatgtcttattaagccaamccccacagggaaaattgcctgtgtggaaactgggaaattgggcagaacacttgcctcagaatgatcccgcccaaattatcagttattcattgagggctgctcttggggggagtgttccagttatttattgctacataacaaaatattctaaacaaaaaccactattttttattatgattataatctttcatagatatagagtttggggctgggctcagctggttggttcctactgaagctttctaatgcagttacaggggctaggactggagtcatgtgaagccttcctcacttttacatgtctggttttccacctgggctgggaaggcctacagctgagggctgtaacaccttgggcttcttggctaattctcattcttgatgtggtctcttcacacggtctctgcagtactaggcttcttatgtgatgtttagagtttccaaggcacatagaaagggagagacagacagctgcaggatgagatggggggccggggggaccatagctccttttttaaaaaaaggagccagttgtgaagtcacacttatatcactttagacttaaatatcaccagcccatattcagagggaggggaattagactctgcctctttgagcagtttcaaacaatctgtggacggtgttgtaaaactgccacagggagttaatttacctctatttctgcctattgctatgggcagagcagctttaagcacagaggcgcagataggggtagctagaacttggccacagcacaccagaatcctaagggatgtgttggtgaggcactgacagcttctgctatagtttatcagtgagctcaggagttcaagtggcttctcttatttccaaaactataaaactgttcacttatattttcttcaagttcctatttaaaattctttttttattttatttttattttattttattgatcattcttgggtgtttctcgcagaggggtatttggcagggtcataggacaatagtggagggaaggtcagcagataaacaagtgaacaaaggtctctggttttcctaggcagaggaccctgcgggccttccgcagtgtttgtgtccctgggtacttgagattagggagtggtgatgattcttaacgagcatgctgccttcaagcatctgtttaacaaagcacatcttgcaccgcccttaatccatttaaccctgagtggacacagcacatgtttcagagggcacagggttgggggtaaggtcacagatcaacaggatcccaaggcagaagaatttttcttagtacagaacaaaatgaaaagtgtcccatgtctacctctttctacacagacacggcaaccatccgatttctcaatcttttccccgcctttcccctctttctattccacaaaaccgccattgtcatcatggcccgttctcaatgagctgttgggtacacctcccagacggggtggtggccgggcagaggggctcctcacttcccagtaggggcggccgggcagaggcgcccctcacctcccggactgggtggctggccgggcggggggtgaccccccccacctccctcccggacagggcggctggccgggcagaggagctcctcacttctcagtaggggcggcagggcagaggcgcccctcacctcccggacggggtggctggccgggcggggggctgacccccccacacctccctcccggacagggcggctggccgggcagaggagctcctcacttctcagtaggggcggcagggcagaggcgcccctcacctcccggacggggcggctggcctggcgggggctgacccccacctccctctcggacggggtggctgccgggcggagacactcctcacttcccagacggggtggctgccgggcagagaggctcctcacttctcagacggggcggttgccaggcggagggtctcctcgcttctcagatggggcggccgggcagagacactcctcacctcccagacggggtcgcggccgggtagaggtgctcctcacatcccagacggggcggcggggcacaggcgctccccacatctcagatgatgggcggccgggcagagacactcctcacttcctagatgggatggcggccgggaagaggcgctcctcacttcctagatgggatggcggcggggcagagacgctcctcactttccagactgggcagccaggcagaggggctcctcacgtcccagacgatgggcggccaggcagagacgctcctcacttcccagacagggtggcggccgggcagaggctgcaatctcggcactttgggaggccaaggcaggcgggtgggaggtggaggttgtagccagccgagatcacgccactgcgctccagcctgggcaccattgagcactgagtgaaccagactccgtctgcaatcccggcacctcgggaggccgaggctgacaaatcactcgctgttaggagctggagaccagcccggccaacacagcgaaaccccgtctccaccaaaaaaatacgaaaaccagtcaggcgtggcggcgcgcgcctgcaatcacaggcactcggcaggctgaggcaggagaatcaggcagggaggttgcagtgagccgagatggcagcagtacagtccagcttcggctcggcatcagagggagaccgtggaaagaggggagggggagggggagagggagagggagaggcctatttaaaattcttagtttaacttttgttttttaatgtctgggagtaagaatcaagcacttattttaatggttaaccaattacaccaaaatactttaaaaataatctgcccagtggttctcaaactctttggtttcaggaccccattacactcttaaaatttatttcaggccccagcagcttttgattatatggttaacagttatggatttttaccatattcacaattaaaacaattatttaaaacatctatgattgattttaaaataacaaaaaacatattaatataaataacattttaaatgaaaactgtttttcaaaattaaacagcctaggctgggcgcagtggctcgtgcctgtaattccagcactttgggaggccaaggcaggtggatcatgaggtcaggagatcgagaccatcctggctaacatggtgacaccccgtctctactaaaaatacaaaaattagtcgggcgtggtggcgcatgcctgtagtcccagctactcaggaggctgaggcaggagaattgcttgaacctgggaggcagaggttgcagtgagcctagatcacgccactgcactccagcctgggcaacagagcgagactccatctcaaaaaaaaaaaaattaacctagaagactggtactatttcacatatttgcagatgactttaatgtctgacttcttagcagacaggtagattttcatacctgcttctgcattcaggctgtggccctctcacacctggtgtagattcaggaaaatctcacagtacaaatgtgagaaaatgggagtaaaaatggtaagtcatgttttagatttatgaaaatagttttgactttatggggctcccttgaaagggtcttgggagaactgcctagtttttccctgatgatgtaaatgctaccttcagctgaaggcatctttatccttcaaattcacatgagctctgtactgagggaaggtacagggagccggacctaggatgagagaccccatggccctgggagggtgcaggtggaggttgaggttgaagcagcagcaaaattgtcagaattaggcagtcgggcgcggtggctcacgcctgtaatcccagcactttggggaggctgaggcaggcagatcatgagatcaggagttcgagaccagcctgaccaacatggtgacaccccgtctctactaaaaatacaaaaattaggcaggcatggtggcgtgtgcctgtaatcccagctactcgggaggctgaggcaggagaatcacttgaacccgggaggcggaggttgcagtgagccaagatggcaccactgcactccagcctgggcgacagagcgagactccgtctcaagaaaaaaaaataagagaccggcaggagagtttcaggctgattgaccagtgcagggaggtgttctgattccttcataaatagggtaaccatataacatgcaagttggaacacttttgaaagcaaaagtgggcaacaaaaaactgaaaattattattaccagataaaggttttgccaaacaataaaataatagattcatatcacacagtgagcaaaaaatcactgtgcaagactgttcacacaactctgctttgtagcaagttattgaagtctgtttcttgaactctgtacttgtgtcacttcccatgcttcccactgacctagcagccccctgactgccccacctggagtttgagattggcagcagttgcagtgtggaagctgcataaggagctgagtgtaatgggagacctttagctaaaattaatttcgtaatcaaagatgtgtgccagaatcttttcttagaattgagtaaaacctgataagctcctttaagagaatcttggtatccttttaaaactttctttgtgacactcttgcttttggggatcagcactaaatgtgtggagggtagaggtgttaacaatacgttctcccctcaaaaagtctgaacaagatgctctgcttttcccccagctgactctcacttatgcacaatatagttaatcatcccaatagaagagtcagttgtgccctgtgaactgaagaaccaggactaataacccgttggtatttactcattcaaatagcagttttgtgtatggtagcataagcattgcaactgaagaatctggactccaccataaggcagattccagacacccaagctctggattctttagtgggaatagaggagtcatcaccacacacacacagcattggattctgtcctgactcgttttttctaacttcttgggcgaaagggcagattagaattgttccaactcaggcttgtataattcctgcagaaaagacctattgttggatccacctttatcctgacttacctacatgtttaatcttatagaggaaaatggctttcaagacacaagggatactgatcttactttaattctaatcactgccgtacccccaacccctgcttctttcaggcacttggcattgaactagttttgtcattttacttgcttgccacctacccccacgactaccctgacaggccagaagggaaagtgcggttccttagctcactgtactaataastcctcattcagccatccctagttaagagtgaccccctaatgtccacattttttaggtctgctcttcttttgtcatccctaccagagtaacttaaccctttacttacaagttacttggaagtagttttcttttaaaaacagtgtcatctaatttttttcaatattggaatgtaaatttccagatgtgctggactgtccctagagcagcagcatatacagtaagacctacgattgaatgactaactgggcaagattgagcttttgtgatgttttaattattttacctaatatggaaacactgttgtataatcccaaacagtagtacatatttgatcatctaattaaatattggtaactgttagtgtgccaagtcctgtagtatgtgtgggaaattactaccccctagagacttaaattcggatgtacaaaagattgtatccaaatgactatagcagtctgtgtaaatacccagacaaatctattctcttcctggtttggaacaaattttaaaaatgaactctatagcttccataggccacaaatcatccttgtgcgtcacaaaaagttatgtcaaaaattccttcggaagtttatctactttatgctagaggaagacagtaggcaccatttcctcagtgttgttgttacaagacttttggagggctttgttagaaggccattaaatggccacactgttggagatcttaagtgcctgggatagtctccttcccatagttaggaagatataccccctatttagccccaccgtgttccagtataacttccttgatacagtggataccactaatgtgaattttttttgagacggagtctcgctctgtcgcccaggctggagygcagtggcgtgatctcatctcactgcagcctccgcctcccaggttcaagcgattctcctgcctcacccttctgagtagctgggattacaggcgctcgccaccacgcccagctaatttttgtgtttttagtagagacggggtttcactgtgttggccaggatggtctctatctctagacctcgtgatctgcccgctttggcctcccaaagtgctgggattacaggcgtgagccactgtgcccagccaaatatgtgaattcttgtgtgtgggtactagtttttctggggagccctttaggttggctctaggtctgcaagttctttccaagggatagttaacctgaatggtacattcctcacagaaccagaactcttcctttcctcttcccctcaccttaggtgaggaagccttctaacttagttattaggactatggcagtggtcgccctgctttttaatagcacttacaaaatcgtgtcactaccctgttagtttctttagtaaagttttctcatttttcaagttccttctgccactcgcttttaggttacaaaaggttactgttttatgaaggggtgctgagggtaagaatgtaccaagtagatctcatggagaaggcagctttcacccagtatctctggtagattgctaccttcatagcttatcttctctatgaatttcttagcaatagaagagtaaatcaggagtggatttttagtagtgtgtttgtcatagggaatgtagatgtaattggatttttttttcatataagcattttgtaaattcagttttgggttttttgttttttgtttcttgtttttgttttttgtcttaatagagctaggcattaccagggttgatgcatatttattactgcaaagagttgtagacaagggaggagggagctaaataatattaatggtaatttaaatctagaaaatcagaactgtggctcactactgtaatgtcagtgctttcagaggccaagcagaagtatcgcttgagcccaggagttcaagaccagtctgggtaacctagcaagaccctgtctctaaaaaaaatttaaaaattagccaggtgtggtgatgcacgcctgtaatcctagcaactcaggaggctgagatggaaggatcacttgagccagctgtgattgagccactgcactccagcttgagcaacagagtgagacactgtctcaaagaaagaaacagttggtattcattgctcttaataatcctctgtagctggcttctcaaactttaatgtgcataagaatcatttgttaacatgcacattgatwgggtctgaggtggagtctgatgtctgcatttctaacaaactcccaggggatggatgccgatgttgcttgtccagaggcggcactttgaatatcagtctacagaacattcagggtatatgcaaattaacttttaataataacaacagcaaccatatatattgatccttttttggtgtaccaggcacagaaaaataaaataagactgggcactggagtctaacagctgggattcagattgaagctcttccctttactagcttaaccctgagcaaattttctctaaggcagggtttctcagccttggcactgttgacattgtaggctgagatcattctttgtgggggctgtctggtgcattgtaggatgtttagcaacatccctggcctctatccaccagatgccattagcacctccctcccgtttgtggcattcagaatgactgcaagcattgccaaacgtcagggggtggggtrggaggcaaaattacttccagttgagaaccactgctctaagactactgttgaaatatgggtgtttgggggggtttgtgatatgaatgatgtactttatgtaagtgacatagaagcttatcatgaagcttccacagacaaaaggagaataggcatgcagtagctaataagcagtccgtgccacatctggctttctgaggatgatgataaagcttattccaagtgccagttctttatttttacgaaacattagtcattgtactatgagataatatcaggaattacttgagatttttaaataggtagaactgagtttctaattcagttgatcccaagcctctgcccttttttgaaatacgctggcactgttgctaccctgcccctgcctctgccccttccttcattcttacttctgctgctgtccgcatgtctctttttcccccctactctttaaagttttatttcactaacttgaggtcaaatgtcacaactgtgttctggtcaatttactatccttgcttggcttccccaaatggtagtaccagaagatttgtggggtagggagaagagaccactttaagacgcactacatttactcatcttccacaaggcaacagagttgggcatctgattattcaacaaaacaaagcttcagtagcacccaggagggcagacaggcaaaccaggctgtagacacactgcatttgtcaaaatcagaccagagaaaacctactccccacagattaaaaggtagcgatagtcatcatttctttttctgttgccacaacgtttttcttcttttaattattatcatgtagttgtctcaagtccttcctttagtccagggttccccaaagcctgggccacagaccccgtactggtccctggcccattaggaaccacgcacataacagatgagcagtgggtgggcaggccggccagctgagygaagctccatctgtatttacagccactgcccatggcttgcattactgcctgagctccgcctcctgtcagctcagatcagcaatggcattaggttctcataggcacaygcaaaccctattgtgaactgctcatgtgagggatctaggttgcgtgctccttatgagaatctaatgcctgatgatctgctactgtcacccatcacccccacatgggactgtctagttgcaggaaaacaagctcgggggctccccactgattstacattatggtgagttgtataattatttcattctatatcacaatgtaatactaatagaaatagagtgcacaataaatacaatgcacttgaatcatcccaaaccatcccaccccccatctgtggaaaaattgtcttccacaaaagcagcccctggtgcagaaaaggttgtggactgctgctttagtccatctcctatgattgcacaggtaagctgcaaatgccaaggacttgatgagctcagttcaccccttgccaacaatgtatcagttcctgagagaatgagttcctgaagtcttgctgttagcaactataagtagagggactgcttggttttctatatcctagttattttatgaagttaagttttagtttcttccatccttccacatctagagtccacaacaaatacaatgccatctgtgcatctggcatatgacttccacagtggccttactttgtcctaaacacctacatcccagaagtgaaaagggactgttttagaatttgccaagattaccttaattttctccgtgttaaatcttttggtaggtacagtatttacaaattcatgagctgcagcctgtataagacagttgtcttgctagcacagtacaaacccaggaaaacagtgtggaaagactgaaatgaaggccgactggacaggatagaagtgtggtctgatagtccatttcccaatttcccactgcaaataaatgtcccaaattgaaatgctttcttcttgctttagaacttctcttcgtaggtgatycagctataagactaaccatccttcccttctcttcactcagcgtctgtcctagcatctggggaggtgctctgatacctgtccgtgggcaccagggaggcctgggccgcggcggaggacagggcaccaggtgggtgctgtgtgccgggctgctctaacagtgctcgcccagcagtccgcaagtctgtttctagcacgcttatcttcctatcttcccagcctctcatcctttcactttttttctagggtatgacagcagataactaagccttctaaaattatgcctagaataatatctgaactatggtttatgtgtttgtaggcaagggtcctgtctcccaataaaaaatgtaaaaattcatttgatagaaagatacttttaaaaaattgattctggccaggcacagtggctcacgcctgtgaatctcagcactttgggaggcccaggtgggaggatcacttgagcccaagaatttgagaccagcctatgcaacctggtgagagcctgtctctatgaaaaatgtaaaaattaggctgggcgcagtggctcacgcctgtaatcccagcactttgggaggctgaggcgggcggatcacctgaggtcaggatttcgagaccagcctggccaacatggtgaaaccccatctctactaaaaatacaaaaattagctgggtgtggtggcggatgcctgtaatcccagctactcaggaggctgaggcaggagaattgcttgaacctgggaggcagaggttgcagtgagccaagatggcaccactgcactctagcctggatgacacaagcgaagctctgtcttaaaaataataataatggataaaattttttaaaaattagctgggcatggtggcatgtgcctttagtcccagctactagggaggctgaggtgggagaatcacttgagcccaggaagtcaaggctactgtgagctgagatcacattgtgctccagcctgggtgacacagcragactgtgactcgaaaaatatcctaaatttcactttgcttcaggatgttctttaaaagaaatcaataatgtcatttgaaaattgaaatgcagatttggtttctgaccattgaaatggaagagcagcagagtagtctgtaataagtctgtactgagaatgggaatggggaaagactcacaaaaacatgattttaaaacaaaaagaaaacatgaatgttactttgtggagttaccctggaagattttaagtcagtccagggaacacaacagattctagtaagactgtgctaatgacagtctttgacagttggtttgttaatacctcaaatgatttgtagtacagtttatactgtgcagatgctgtttaagactgtatatgtgtaaagcaaaagttactaccagttgatagttttttactttgtatacttatcaatataatattgaggcataagatatgtagccacgctgtccagtggtcattagggggaaaatgtctccaggattgtaggaaaagctgtcagaagtgagtccttgttaattgcgtttattcaatggagagtttcctatcagttaacagacacagcttcctgtatgacagaagtgtcgtggctcatggccatccccgctcctattgtttacatacctgtgtgaagtcagaatcctttatagaaagaagaaaatattgtgttaaagtagaaattactcatttttcttaaaatctgtatcagagtaatatttattttgattagaagaaaaaactatgttatctttttctttttgccttgtatgtatttgcttatattttgaaaagtgcttttagttacaaataaaccttaaacctctgtgtagaaaaatgtgaaaggtataggcatggtctcttcacttcctcagttacatcctctcatgcagaggttctaatcacagttaaatttcaatgtcttcaaacacggataagtgggtttttttaaaaaggcacagtcttatacttatttctgtaaccccaatcatactttggttggctggttttaaaaaatcatgttacacaaaactgagatgacccagtttagagaatcccaattaaaataagtgctcaggtgaagacagggtagacttaatgcaaaattatgaaatgtacttttctgctcccattgtgtccggaattggtgggttcttggtctcactgacttcaagaatgaagccgcggaccctcacggtgagtgttaacagttcttaaagatggtgtatccggagtttgttccttctgatgttcggacgtgttcagagtttcttccttctggtgggttcgtggtctcgctggcttcaggagtgaagctgcagaccttcgtggtgagtgttacagcttttaaggcagcacgtctggagctgttcgttcctcccgtccggagttgtttattccttctggtgggttcgtggttttgctggcctcaggagtgaagctgcagaccttcgcggtgagtgttacagctcacaaaggcagtgcggacccaaagagtgagcagcagcaagatttattgcaaggagtgaaagaacaaagcttccacagtgtcaaagggggcctgagcaggttgccactgctggctctggcagcctgctttttattcctttatctggccccacccacatgttactgattggtgcattttacagagagctgattggttttacagagagctgattggtctgctttgacagggtgctgattggtgcgtttacaatctctgagctagacacaaaagttctccaagtccccactagattagctccacacagagcactgattggtgcatttacaaacctttagctagacacagaatgctgattggtacatttacaatcctccagctagacgtaaaagttctccaagtccccacttaactcaggagcccagttggctttgcctagtggatcctgtgccggggctgcgggcggagctgcccgccagtcccgcactgtgcgcccacactcctcaacccttgggcaggcgatgggaccgggagccgcggagcagggggtggtccccatcggggaggctcargccacgtgggagcccactgcaggggtggaggggaggctcgggcctggcaggctgcacgtctcaagccctgccccacggggaggcagctgaggcctggcgagaatttgagcctgttgctggcaggctggcactgctgggggaccaggcgcaccctctgcagctgctggctggggtgctaagcccctcactgcctggggccagtggcgccggccggctgctccgagtgcggggctgccaagtccacgcccacccggaactctcgctgttccatgagcactgcgcgcagccccagttcccacccgcgcctctccctccacacctccctgcaaacagagggagccagctccagcctcagccagcacagagaggggctcccacagtgcagcagggggctgaagggctcctcaagcgcggccagagtgggcaccaaggctgaggaggcaccaagagcgagcgagggctgccagcatgctgtcacctctccccatcttttctttagtatcaatttcaaccctccttttcccaattcaggattttccatactctaatcatttggattaataatttaaattacataccattctatggtacacttcaaccagtatttaaaattaaagttgtatttcttgttgtggaaccaaaagtatcttctggaggagacaggagattattaaagggtgtacttaggtgacctgagggcaaacctggtcagtcattttatcgagaaataggtgggatgcttgaacagcctcaagtaaagctgagtcttactccctattcttctgacactggccttcttatagagttgttaatattgtcctccacccctggggatgggactgcctgcccactttgtagaccagcagatcctaacttttccaatgagaacttaggaaacaaataaaattgtacgcccctgcatcagaatttttctgttttattctctgattaagaaagtacacatgataaaaagctacctgaattcatccaatagcagctttaagtgactatctaaaacttgatattcagggctgagcatggtggctcacacctgtaatcccagcactttggcaggctgaggcrgtcggatcacaaggtcaggagtttgagaccggtctagccaatatggtgaaaccccagctctactaaaaatacaaaaattagctgggcatggcggcgcacacctgtagtcccagctgctccagaggctgaggcaggagaatcgcttgaacccacgagggggaggttgcagtgagctgagatcatgccactgcactccaacctgggtgacagatctcaaaaaaaaaaaaaaaaaaagtttgatattcaggtaacaatgcttggtcttttccagtggattctcaagaccattcacagtaattcctgagggcccacaggttagggatccctcactactgcattttcttcagggtcaactacatttgatattatttcacttagcatttaattattttcatgttatattgcacctttattctccagttttgaagtttaatacaagtgtaatacgttttttgtcattatgtagttgtacttgatttcttttctgttttgtctacttttttctgaactttcaaaaaaattaacacctaaattgcaaacagattacagagagatagcaatcttaattggatttctggttatatcacaggtgataagctatcacaggtgacaaactgtaaaatgttcaaacttatgctcctaactggttgtcccactagtaacctgtagcagtggttcccaaatgcaaactacctgcttaaaggtcattgttgtgggtggggcacttaaatatatggattcttgggtcccctctagatattctcaatcatcgggcctggggtggggtctagaaatctttagtctttaaagttccatcgattattttgatgcacagtgaaatttgggaatcaccaattttctgtacaatccataaatctgcatgtagtgacatactggtaaacctttattttttttgtatactaaaggaccagcagaattgggcccatgccaacatgtcacctctagggcctagactgccctcacttttgtttttttctaggttggtttcttagcactaccaagttgaacatgaacagtacgactcctgcctctaggaggcagcttggaatattgtcagtactggattttagagagcctggcttctgtgaatgaactcttggccttggttcctcatctgtaaaaagattttagagtagccttttgcctttaagtgtttaccataaactagataaaagagcattcccctttatctgcaacccctgtattagtgttattttcatatatagtccacttttcattaactgcactccaggtgtcatagctgtatcagccagtgtctctagactttcttcagtttgctataacaaagtaccatgaattggatggcttataaacaacagaagtttatttctcacagttctggaggctagaaatatgagatcaaggtgctggcagcttcaggtctggtgaggatgcgtttcttggtttccagacaactgtcttcttgctgtatcctcatatggtagagaaaagttagagagcttttgaggttctctttaagaacactaatccttttcatgaggatttctaccccctaacccagtaccttcaaaggctccacctcctaataccgtcacattgaggattaggatttcaacataaaagtttcgaggggatgcaaacatgtaggcaggtaggcaaacttatgatgaccaagaaccggttctaacctcaggaaatgaagcaataatggtaatatcatttcactggagaagtttctgcctgtttccagagggagagggctgattaagagctctccctacattccaccttgtgaaaattgccatcagatatcgtgtaaaactatgaagtcatcttttttaaacacaaagtatgacttcatggtgtagacaatgtttaaaaaatctctggccgggtgcgatggctcacacctataatcccagcactctgggaggccgaggcgggcggatcacctgaggtcgggagttcaagaccagcctgaccaacatggtgaaaccccatctatactaaaaatacaaaattagccaggcataatggcgcatgcctgtagtcccagttactcaggaggctgaggcaagagaatcgcttgaacccgggaggcggaggttgcattgagccgagatcgtgccattgcactccagcctgggcaacaagagcaaaactccgccttaaaaaacaaacaaaaaaaacaaaacaaacaaaaaaactctctctgtatctaaaacaaactttttggtggcttacacttataatcccagcactctgggaggctgaggtaggaggattgcttgagcccaggagttcaagaccagcctgggcaacatagagagacccccatctacacaaattaaatagaaaacattagccaggtatggtggtgcatgcctgtagtctcggctactcaggtggctaaggtgggaggatcacttgagcctagaagtcaaggctacagtgacccgagatcatgccactcactgcattccagcctgggtagcagatcaagactctgtttcaaaaataaaaaataaaacaagtttttaatagtttttggtaatacccatcacaaagagatattaaagaattaataataatggtgatcactgccgtttaatgagagatacccatgggtgtgttgctctacagtttccttctttctctcacttaattctgaaaacattcctgtgaggtggacagtgtccgagctctttctgcctcttggccagtttgggccctgttcttcccattacccgctattcggttgcccatattttctccctccttttttgccatgtcatgttttcttccccaacttgtattctcctctgcttttcctttgtaataagctcattcccctaacctgttgcatctctcacaccaaatttcagaccaaaagaaaaacctgtgatgggtttggggaaagtataggcccatgggtaggctttttattccctccctcttcatctcttctgtctcttaaatgaaggcatcagactttgtaaccagttagcagagggcatcttgaaggagtttgtcttgttcagcatcaaaacccctgacatttaaccctctgcctagtacatgggcattcagtaagtgagtgaataaatccaattcacatcgtacatttatttaaaagagtagttttgctgggtgcggtggcactctagaagccaacacaatgctttagaatggtattgtggccaaattatggtgtacccaagtgtatgtaacagtgatttatgataacagctaacagggttggaggaatgtctcaagtattagtatttagagaacccaattatagaatacacattgaaatgaaaattgaataacctgtaactggatacttaccattctcctcccacctaacatggacatactttttacattataaaccatctattagattcttttaaaggtgagattatggagatagaagagcaaggaagagccagttagtgggtcagaaaatgaaacttctgtgcttaaaatggtcataagtgatgtagctgtgagcaaaaactgctcgcatttgtcactaatttcgcttctaggtgctgagatgtgtttcccattttaagtattgtttacactttcctacgtgtccaggagagttttgagaattgaggaaagtttcctgcttattcgtagctaggtaggcttagaatggttttaacattcttttatcatccagtttgcttgaccaatggctatgggtttgttgcagttctgcatccgtttctgtacttgttttgtaaagagaatccacacagtaaacaaaagagaggagagaggtaatctttccatctcttttaatacactgtaaaaattgggatagtgccaccatctgcttatttgttgacgtattattcacagtgctggtcccaaaggcgataacatctatgaatggagatcaaccattctagggcctccaggatccgtgtatgagggtggtgtattctttctcgatatcacttttacaccagaatatcccttcaagcctccaaaggtaagaaatctccctgtatgctcaaatttactaattcccacaagagagcaactgttgaggtttttctaaatttaatttttaatcacagaaactagatttatcttatgtcctaatagatctgagtattttaacatatacaaaacacttctttaggttgattttgccttatctggcagagaccattctaggattaagtgctttgttttgatggtgcttaaaattgtgctatttatagtaatattgtcagcaacctagaattaatcccctgttttccagcccatagagaaatgtttttgaacctttctcgaggttaaaaatggtgtcaagccaggtgcagtggtgtgcacctgtagtccagctacttgggaggattgtttgagcccaagagtttgagtccagtctgggcaacaaagcaagaccccaaaaaaaggcagggcaggtcagggggccaaacaactagagaatcagaatctcttcccaaagctttggattctgttgtgctccctgtcatgttttggtcttgttcctttacctccaggcctcagttttctttctaggacaggtgaggattgcccaagtcacccatctcctgtactcaatctatgattctcattcagtcagaaagaaaaccccgtcttggggattaggtagactgccagataaaagtacaactgcagcaacaagaagtaatcgaaagtcacttttttaaaaaattggtaaaattacaggtaatttttactttgtgttttggtatatttcacaaataaaaattaagagacccaaataacaccagcttatgtgacttgtgttctgctgtggtccttgcccattactggctctgcatccatggacactcgattatataatagtaaattctgtgatgtaggtagacaggatgtctataggacctgatgtaacggtcagaaaaaagcagaaatagacttctcttcaaattttgttcagccttttgggtgtagtcattgtttgctaagtatgttgtttaattatctttatgtacccattatgttgcacttcagtttttaagaggtatttatgattctcagtattttaaagcttactttgaggcagtgtagtactaccagctaacacaagaggtcagcaaacaattagctattcaaacttggaaatgttaatatttaaaagatttaaaattgctaaagatgaaattaggaagtactgaacttaccgtcagtggacataacattttaaatgaaattgacacagtccctgagatggtatcaatgaacactttctaatcaaatttattgtctatcttcttgacagctttaattaaaactgcttttagtcaccttcttaagggtcattcagttgaatatttagtaacaagtttgtttgctgtttaaatattgtctgtcacttgttttttttaggttacatttcggacaagaatctatcattgtaatattaacagtcaaggtgttatttgcttggacatattgaaagataattggagtccagcactaaccatttctaaagtcctcctttctatctgctcacttcttacagactgtaatcctggtaaggttcataattctttaccttgttttattcttccttacctgaaaaatacttgtttccaaaagctttcaaaggacaaaactaatttttctgcacaagtttgtgaatacaaaaactaatcggcttttcaaaagaaagttttaatcaagttcagtctactagttgagacacacaacttcattaatcagtatattctagcaacaaggtattttaaactgaagactgacgtaagtttgccttgggcttttagtttcaattattcttcctcctttttttttcctgttgcttaatttcccatagagttcttataaaacaaatcagacacttctaaatgtcgagtcatctgcctggcaagcctcacctgtgcctctggggttcagtgagcatgtgtcccatagctggtcactgagatggcactcaattttgaaaatggtagttgttaaatacttagtgactattgaattgtgacttttttgggacttcatttcatttaaaaa

SEQ ID NO: 97554 - DNA, 13223 bp, Homo sapiens
cactttgggaggctgaggcgggcagatcacttgaggtcaggagttcaagacaagcctggccaatatggtgaaaccccgtctctactgaaaatacaaagattagccaggcgtggtggtgcatgcctgcagtcccagttactggggaggctgagacaccagaatcgcttgaacccgggaggtggaggttgcagtgagccaagatggcgccactgcactccagcctgagtgacagaaccagactctgtctcaaagaaaagaaaggaaaagaaaagaaaagtcatcttgataactggggtttggtgcccccgtctaattttgtgctggaggctgccccgcacccaccctgatccaggctgtccctcctgactcactaaaaattccctcggccgggcgctgtggctcatgcctgtaatcccagcactttgggaggctgaggagggcagatcacctgaggttgggagtttgagaccagcctgaaccacatggagaaaccccttttctactagaaatacaaaattagcctggtgtggtggtgcatgcctgtaatcctagctacttgtacactccagcctgggcaacaagagtgaaactctgtctcaaaaaaaaaaaagattacctcatggcttgctttcttttctaggctccacataaacacggtttccttgaaggccgccatgcagagctgtgcttcctggacgtgattcccttttggaagctggacctggaccaggactacagggttacctgcttcacctcctggagcccctgcttcagctgtgcccaggaaatggctaaattcatttcaaaaaacaaacacgtgagcctgtgcatcttcactgcccgcatctatgatgatcaaggaagatgtcaggaggggctgcgcaccctggccgaggctggggccaaaatttcaataatgacatacagtggtgagaatggaagcctggagtaggatggggtcagccagggcaggagagggccccgggaagttactagaaagtggggagggtcggcatccctgtgggaaaggccttgatcctctgcctgcagaggcgatggctgcactctggacctgactttggggtcgacgggaagagagaggccaggccaggagatgtggacctggggagggcggggagggtggctggaagtggaagcagaacttggggcttccagaaaaaatgagaactgggctggcccagattccaataggaaagaagtgcctgatgaaggagctaagtccctaggggagggagagggaaaggagggactgaaaccaggatgtgggaagtctgtcttgagagtcatgggcctttggtgccaccacgatcccacagcgggagtgtgacttatctcccctgtcccttttcagaatttaagcactgctgggacacctttgtggaccaccagggatgtcccttccagccctgggatggactagatgagcacagccaagacctgagtgggaggctgcgggccattctccaggtgagggcttcttccctctgcccagtgccccatcggcctccccctcctcccctctcccctgcgccgtgccttcccctctgctcagagcctcctctgggttccctgctcccccagggcacctgtctctgtccctccctttccttctcacagcctccctttctctcccacctcccacatccctccctcctctccgatcattgtcactgtccccaggcctccaccatatgcctactttccactcgctcaccctttgctccattcaacctccctgctcttccagaatcaggaaaactgaaggatgggcctcagtctctaaggaaggcagagacctgggttgagcctcagaataaaagatcttcttccaagaaatgcaaacaggctgttcaccaccatctccagctgatcacagacaccagcaaagcaatgcactcctgaccaagtagattcttttaaaaattagagtgcattactttgaatcaaaaatttatttatatttcaagaataaagtactaagattgtgctcaatacacagaaaagtttcaaacctactaatccagcgacaatttgaatcggttttgtaggtagaggaataaaatgaaatactaaatctttctgtatatgtttccctgtgtgattgtatcatgaattgcaagtgtttccataaacactagcaaatgtgtagatgtctttccttgtgtagcggacctgtagccgggaaaggtcacacgacatccctctggagccagaaaactcagctaaacctcacaggagaggaacctaaatgcagaccccaccctcactcacagagccccgcccactctcactcacagagccctgggcgctgattggaagggacaggcccagcagtaagaggacagccagcagccagtctccctgttggaaaggaaccacacacgtgcagtcaggggccctcgggagcagccctgtgtccaccccttcctgagtccacctcctagagagggagcccagggaaggccatggctgagacccaggacaggcccagtcaggggaaggagcccagggagcgggcaggtgtccaggctgggcccagagagagggctgggaagaggagcagcccaggaggcagagcccagccacagaggggaggggagctgagtcccagggacaggaggctccagaggcagagacggagcccagggctagggcggcaggtgtcagggctgtggcttcagcttggtgtctgtcccgggtgttctgcattggttcccgactctgggatgtgttatttatgtgcctgattacagcaggtggctcccacctcacgatttctggaaagtcctcagaagctgcgtataagaccaagaaggggcctcacacgcagctgctcctgggcagaaacgactcactgtttccctggcctagacacacacaacacgcacacacaatactcgcactacacacaacacacacacaacacacacaatactcacacgacacacaatacacacatacaagacacacaaaaacacacatgcacgtacacaacacacacaacacacgtgcacacacacacacacacacacagtgacagagacttgacaataagaaacctcctccaggtgccccagagctctcctgggatgggaactggacacagccccatgacactgctgagacctgggctgggaactgagagcctgtggtccctctgggctgtagggaggcgggcccccacagtggtggcagagccgggaccccggacacagcagcatggactccaaacccaagcggaacctccattctggtcccaggctgcacagcccagcacctgcccagggtccctctgccctgccttctccctcaatagtctggaccccagctgcgtgcctgccttgtcccccccttacaggggaccagggtgaatctcaggtgaagcctgcacctgtgaaggaggccattctccctgctcccatccctgccacccacatggggaaccagctccttcttgtccccggggacttttcctgggctctggtggaaactccagcgggatatggggtcttacattttccctcaatgttgcagaggctgaaatgggggcggggctgtcactccccaggagctgacccctgtcacctgtgcttagaagtgtctccgggaggcacagtgttttatcagtgttatctacaagcattttacagtgtagtttgttttttttgttgttgtttgtttttgttttttttgagacagagtctcgctgtgtcacccaggctggagtgcagtggcgcgatctcagctcactgaaacctctgcctcgcaagttccaggattctcctgcctccacctctcgagtagctaggattataggtgtgcaccaccacacccagctaatttttgtagttttagtaaagatggggtttcaccactttggtccaggatggtctcaaattcctgacctcaagcgatctgcccgcctgacgtcccaaagtgcttggattacaggcgttagccaccgtgcccagccgtgagtgctagttttagatcggatcccaggccccaggctgtgtctgtcatgggcaatcatgatgaacttttgttgcgctgtgctctgggaaaagctggacattttgccacccactccactccactccacgtagcaaacaaaacaaacccatcaggatcccagcatggagggccatgcagtctaatgatggttggacagactggcagaggcagccccgagctgttcctgggtaagaccaagggaataagaccatgattccggtcagttcttggtgaatgtcatccccctaccccaccctcagaacaaatacagattttcaaaatctaccacttttttctttcaaattttctacccatggaagaatgaatgaccatccggagacagcagggaaggttattgcttaatcaagatgctggtgtgtttcagggagctggccagggtggagtaggcttgtggccacgttccctgggtgggaagactgagatggaggtgggcgtggtccagggactgtcaggagcagggctgggggagacgacctggcacagggccgtgcctgcacacagagcaacaacgcccaccatcaggtctgccctgtgccaatcagaaaattctggacagagactgtgaccctctgtgtcactctggggcagggggtaatggttccacacacttctatggggacctggagagtggagaccagagcactggtgggcaggcaggcgagcctgggtctaagagcccactgtgcctgccactgtcccgtacctcggcacgtcacctcccctgaaacctctctttactcatctgtaaagtgggggcaattatacctccctctcaactgtgcacttggagggcagtgagggctggatttgggacagacctggtacgcaccaggcgttgggcaagtctgagtctcctcctctccctgagtcaagctgcctgacgtgatggcagtcttcctgcccacaagttctggtccagcccctccacccaggaagccctcggggaggtgatgccaccggcagcgctgtggttttggcacccacaggcataggatgggctgccgtggaaggtgcctgctgtccctcagggtctgtacctcagccaccctccagggtggggccctatcctcctcccactgccttctccggccctcaccaccccgggcaggcactgcttcccagagagccacccgggtcaggagtaaagtggcctctgtggtcaaagtctgaaaaagttgcccccacacctgcctaacggtgcacagggctttctgggggggtagggaggaggcaggcaagactctggcaccttttctgagtcacatcccttctaccggggccctgagcctgcaggacggaaggatgtggccttgcctgtcagagggttctgagaacacggaaggctcctgagtcctcgaagggcatcctcagtgggagagtggccctgagcagagaggagcgtaaggggcaaggcacaccccttgagaggtcggtgtcagcagcaagcccgtttgcctgtagacatctgtctccactctttatttatacatattttttgagtaagggtctcaccctgtcacccaggctggagtgcagtggcaagatcacagcttgctgcagcctcaatctcccgggcttaaccaatcctcccacttcagcctcccaagtagctgagacttcaggcgtgcgtcaccacacccagctaatttccgtgtgtgtgtgtgtgtgtgtgtgtgtgtgtgtttgtgtttagtagggatggggtttttccatgttgccccagctggtcttgaacttctaggctcaggcaatcctcctgcctcagcctcccgaggtgctgggatcacaggtgtgagccgccactggcaggcatctcctcaacttgacattgcagtgagaaagggcaaaagtagccggtctcacagagcagacatgtgcttcccgtcctgacctgcaacgcgctgcctccttacaagtgctaccagatcacctggttcatatcccggagccccagcccggaccatgtggtraaagtggccgagtacaacaaagtgaagctgagcatcttcattgcccgcctctaycaygactgtgacccgggattccagcacgggcttcgcagactgcaggacacagaggcacgcgtgcacatcatgtcttctaagggtgagaggttggggcctgaggggtgtgtgtgggggagggacagcatgaggggcaggggagtctgggatgccattgggacgatgtcccaggagagcctgcagggactgagccagcactgacagccaggagatcacacctaggaggggcaggcccagggtcaggggagagaggtctgccgggcctgacttctttctcccctcttttatctcagaatttgaacactgttgagaagactgtgtacaagagagatgtgccatgtcagccttgcaagggacagcgtgaaaactacccatctccggtcaccaagttgcagggtagcctcacagctgatgccctcgctcctctcggctcctgctcagcctcctgatgccttccctctgtcctggatcagattcacccctgcctgggccttctgagctgctcctgccctgagtaccacccctcagtgccccccacctcactgcctsttccccactttcctgaccctgcctgtgagaggctgctttctgcctccatagcaacctctatccaccccccagtctccttcctcccatcctgggggcccctagcctggctccttccatctcctcawcatacctaaatcttgtcattgaactgatataaataggtagtagaaatatacataagtgtgaaagttaagttttgagaaacaccttttrtaaaaaaccgatggtaagtattgggtcattcttgtcacacccaactcaaacagaggccaggagccaggaggggaaaccrctcagtttgcaaaacgtcgcttccacaagcctgatggctgaaactgctcactgtaccctgaaaccagctttacctacagcttctragataaactgctgcaactctgggacccacgatgcctatcacagtggctcatcaatggaacctgccggctcccaacccttcctagggcccatgaactctctgaaaagaggaamagaaatatttctcctttttgtaaaatctttaaccttccctttgttcttcatgtacacgctgaactgcaattcttcttcccaaataaaacattaaatttagaaatttctctccatagttttattttgacttcaacatacgtggggtcagaagtgggatccaattctcacttccctccaggggaatcagcagcccacagaacgatggtgggaggtacccacgctggtaacctcttctgccccctggcagatctttcttggacaaaactccagaattgggtttgcattctgtttcatttgggataaggctggggaggggtctttccccttcctgtttgggagattttctgttaggagggttgttttcctcccgttgatctgggctgtgaggtttggacctcgacaagtttggaagaggtgattccccctcatttggagaaagctatcatccttcctggtaaacacctactttatttcccatcagtgcttgcatttattgtgcttttgtgtatttgatgtcaaactaaattacctagataaactgagcaacaggcagggcgcggtggctcacgcctataatcccagcactgtgggaggctaaagcaggtggatcacctgaggtcaggagtttgagaccagcctggccaacatggtgaaactctgtctctactaaaaatacaaaaattagctgggcgtggtggcgggcgcttgtagtcccagctactcggtaggctgaggcaagagaattgctggagcccaggaggcagaggctgcagtgaaccaagatcatgccactgcactccagcctggatgacagagtgagactctgtctcaaaaaaaaaaaaaaaaaaaaaaaaaaaaaactggattacaaatgaaatcaaagttcaaaggcatgccaagatattttctgggactcccgcctgtaacgtcttcaaacattatagggattattcaatctattgttctttttgttttgagatggagttgttttttgttgttgtttttgttttgtttgtttgttttttggagatggagttttgctctgttgcccaggctggagtgcaatggcttgatctcagctcactgcaacatctgcctcctgggttcaagcgattctcctgcctcagcctcccgagtagctgggattataggcatgcgccaccacgcctggctaatttttgtatttttagtaaagacggggtttctccatgttggtccaggctggtctcaaactcccgacctcaggtgatcggccagcctcggcctcccaaagtgctgggattacaggcatgagccaccgtgcccggcccaatctattgttcttaaaactaaaccaaaagaccatggtttaaaaatcatacactttaaataagatatgcatatctcattgatatcttttttttttttgagatggagtctcgctctgtcgcccaggctggagtgcagtggcaggatctaggctcgctgcaacctctgcctcccgggttcaagagattctcctgcctcagtctcccgagtagctgggattacaggtatgctaccaccacgcccacctaatttttgcaattttagtagagatggggtttcaccatgttggccaggctgacctcggactcccaaagtgctgggattacaggtgtgagccaccatgccaggccctggataactttctttaaatcaacaaagtaataaattttgtcacactgtcagcttgcttgcatgtagacatggcttaggttttacattggtaagactccaatataaggagagtttaggccaggcacagtggatgaggtcattggggtagttcctaatccaataaatctggtgttcttataaaggggagatttaggccgggcgtggtggctcacacctgtaatcccaacactttgggaggctgaggtgggcagatcaggagtcagaagtttgaaaccagcctggccaatatgatgaaatcccctctctactaaaaatacagaaattagctgggtgtggcactgcacacctgtgaacccagctactcgggagtctgaggcaggagaatttcttaaacctgggaggcagaggttgaagtgagccgagatcgcaccattgcaccacatcctgggtgacagagcgagactccatctcaaaaaaaaaaaaaagaagcttaaaacaaagacgggacgttcttccttctgccttctgaggcctccctagtctgtagtgccggagcttctaataaatgatcacaacttcaccgcaccctgtggctcagcttgagttctttcctgtgagagatccaagaacccattcttggggtctggatcgggtccccctttgcagcaacgaacacaggccagagtggccagcctaacctcccgtcctcctggagataacacctaagcacaggcccgtcctagacaccacagggtctctgctgcaggaattcactggaggagtagtgggaatgctgcctgtgggaaggaccaggaaagggttccgccttcctttccatcctccctgcttctcagcctgggagactcagctctgtgattaaccagcactacagtgtgcagatctgatgtctctcctggcaggaccccgctcattctggaatcttccatggactgtagccccaacatttaggacagatagggtggaggggatgccattcccaggaaccttctaaattctcacccaagctcctgtgaccccaggggccatgcagggtctagagggctgtcagggtgtgcagggcgggaggatatggagggacaagctgggcaaggttcaatgggactccttggtgtggaacctagactccgcagtgactgcccctagtcctcgcccttgggattcaactttcctaggggttctttggtttttctttttcttttcttttagacagagtcccgttcttgtcgaccaggctagagtgcagtggcacaatctcggctcgctgcaacctctgcctcccaggttcgaatgattcccctgcttcagactcctgagtagctgggattacagatgcccgccaccacgcctggctaatttttgtatttttagtagagacgaggtttcaccgtgttgcccaggctggtctcgaactcctgacctcaggtcatcagcctgcctgagcctcccgaagtgctgggattacaggcgtgagccacagcacctggcctggctctttggtgtttatgatctgaagggtgttggttgatatgcatgaagacgaggacatgggttccagaatgcaaatgtgaagtccaggtccttcatctctgacctgggaggccctttaggagcagtaagtcccctccctcgtgtctcctctcctgctcctttccatggagcaatgaagaacctcaaagtagctagctgtgggggagaagggacacaggaagtcctggccagcactccagctctgctgttgatttgctgtgtgacgtggggacagtatcttagcctctctgtgcttgggacctcctctgactgtcaggatcactgccctcccctcccagtgctatctggggactgggctagataatgggcactggatccgctggagatgcagtcctgagcctgaccccagtgctcatttcacatcaggctcagggtcctgccaggaggctgaatgccaaaggtcagtggggtggtggggagggggctgcagcctgccctgtccaccaggggagtggcatctggtctatggtgtcagccctggtctggatccctgctcctttctgtggcttctattcctttcatttattttagtttagtttagtttttgagacggagttttgttcttattgcccaggctggagtgcggttggccaggttgattttgaactcctgacttcaggcaatccacctgcctcagcctcccaaagtgctgggataacaggcaccgtgaccagccatcaattcctttcttttttctttcttttttatttttatttatttatttattttttgagacagggtctcgttctgttgccagggtggagtgcagtggtgcgatgtcggctcactgcaacctctgcctccaaggttcaagcaatttccctgcctcagcctcccaagcagctggaactacaggcgcaggccaccaaacctggctaattttttgtattttagcagagacggggtttcaccatgttggccaggatggtcttcatctccttaccttgtaatttgcccacctcagcctcccaaagtgttcggattacaggtgtgagccaccgcatctggcctttgttcttttgtaaactatacctggggagggagttgagtctggctgtacctggagagggaattgggggtgggaggatgggaggtgagccacctccatcagacttcccctgccaagcccgaggaaatagagaaagaaaggagcctgagggatctgaagcaccccagggccctcccactccagtcccacaaaaggaagagggtggagccaccctcatcaagcagtgactttttgtgacttttgggagagctgaccttttgtgacttttgggagagctgccaaaagtgaaacttagtgcctcagacaagcaggggcaagtctgctaaggaagctgtggccagaagcacagatcaggtactgccgcccactctgtccactgggccctctgctgccacttcctgcctggcagcccttctgtgcctcagccctggcctcccgctgccccagccccagccctgggctccttctcctctggctcccctgccatccccactcccacccaggctctttgccctgctgtgtggtcaccccactgctgcttctgaacgggccgcctccccggcctgcaccagcccaagacccctgctgagactctcccctaagagtcatggctgggctagtgctccccaccttgggagggtgctctctctgtgtgcttcctgccattcctgggctctggaactgggagaactgaactaaaggatgatgggagcaatctggaattttgttcacagtgctttgatgaactttgtgtaagattactttgtttcaatacaaagtcttaggagagggtgtggggaggcaatgatctctgaagcacaaggcaaatcatctcttccaaggatgtctccactgtgggcagaggaggatgcagatgaccctgaacacacactcctcctccatgatcagtattcacattcaccgtttataatgacaccagttaacacggaatatacggaaaaactcaatgatcaggagaaatgcttttattttaaaatttaggaagaagagagcctggttcccaaaggctccctcctgcagggcccgtgatgcagaggctggcagggctggccaggaaagtggcccagctgcacggcctgggcaggttaccccacctctctgcacctctggcccctcctctgtaagatgagaatggcccctgcaggcctagggcagcctcacgtgagctcagatcctctcagcacttagaagagtggcctgggcctggggatggaagtgctaccctgattttttgtttcgttttgtttttttgagaaggggtgtctcagtctgttgcccaggctggagcgcaatctcagctcactacaagctccacctcctgggttcacgccattttcctgcctggccaggcaaaatggctcatgcctgtaatcccaacactttgggaagctgagaggggaggatcatcactaaaggccaggagttccaaaccagcctgggcaacacagggagacccccttatctactaaaactaaaaaaataaaataaaataacatgaataggtaaaatgccaggaattaattgaactgaaatattaagagctcttattttgaaggggagaattttattcacttttcttatttttaatgggttagaggatgggtggcagaaatactgggaggatgggagatccatccctggaaagaccagagctagggccctgagctgggagaggtcaccccggccctgctgcccctgccagcatctccttctcttctcctctccctggtcttcctgcttgggaaagctgcagaaattctcaggacttggaggcttgaaatgctcaggggttttccagaaagcagaatagaaagtagatgggcaaccatcaatcagacaggccaaag

SEQ ID NO: 97555 - DNA, 44250 bp, Homo sapiens
ttattctctgttacactaagcttttaggtcttgctccgtcacccaggctggagtgtggtggccctatcgtagctcattgtaaccctgtactcatgggctcgagggatcctcctgcctcagccttccaagtagttagaactacaggcacatgccaccatgactggctagtgtttttatttttaaaatttttgtagagatggggtgtcactgtgttgcccaggctgatctccaactcctgacctcaagcaatactcccacattggcctcccaatgtgctgggattataggcatgagccactacatctgtaatttttttaaaaaagaattccttttaaaaaacattgagaaatataacacaattaagataaatgcataaaatatgttagtaaagtttttttgaattattataaagcaaacactcagggcaaaaatagtctactgctagcattccagtaggccctgcatacccctccccagttatactctttccctctccctaaaggtaaccactatcctggtcttcatggttatgatgtctttgcatttttttccaatagttttaccacctaagtatgaatccctaaatatgatattttagtttcaactatttttgaactttatatatttataactttatataatcatagaatatgtgtcactcagcattgtatttgtgaaatttatctatattgttgggtgtagttttgatgcattacttttcactatggtatgccatagaatgaatatgaccacagttttactgctggacatttgcttcatattaataatagtgagtaatgctgctatgaacattcttgggcatggcttttcatgtgtatatcctatattatgtaaaaccacttctaggcacttccatacctaggagtggaatttctgggtcacaggatgagcaatattgagtggtagattttgcaaacagttttccaaagtggtggaatcattttacacactcttcagtagcacataggaacttctattgctcctcattcttttcagcactttgtgttatcttttaatcaggaccctccaacccctggtaccactctgtggcctgttaggaaccgggccccacagcaggaggcgagcagtgggtgagcaagtgcagtttcatctgcatttagagctgctccccgttgcttgcattaccacctaagctccgcctcctttcagatcagtggtggcattagattctcataggagcgtgaaccctattgtgagctgtgcatgcaagagatctaggttacatgctccttatgaaaatctaatgcctgatgatctgtcactgtctcccatcacccccagatgggaccatctagttgcaggaaaagaagctcagggctcccacggattctacattatggtgagttgaataattacttcatcatatattacaatgtaataatagaaataaagtgcacaataagagtaatgcacttgaatcatcctgaaaccattcccctgggtctgtgggaaaattgtcttccatgaaaccgtccctggtgccaaaaagtttggagaccactgttttagattttaaccattcaggtgtctgttgaatgtatctcgtgatttcaatttgcatttccctcgtgattaatgatattcagcacctatatatgtttactggccatttgcatggcctcttttgtggaataccagtttgagtttcttaccctttgttctactgggttctctgttattttgcttttgattaacttttaccagtttttaatatagtctggttatgagcctcttagttatatgtattaaaatgacactttcccacttttgtttgtcttttcactcttctacttatcaaaacagaagctcttaattttggtaaataaaaattcttaactttaatgtattctagtgcatctctcttttcctttatggtttacagatttcctttctcagtcatgaattttcctatatataattttctaaaagttttatcatttcaaacttagatctacaatccacccagagctgatttttgtgaatggcatgagagggagtcaagtttcagtttttgcctttgtctatccgtttcacttagtacttgagaagctatcttttcctcattactctgatctttatgctggggccacactttccctgagctgcgtctgtccctcattgacatgttgaaggtactaaagctgggccaattctgctcgatgtggcctcttctaatgggaacctgggcttagatactacccgtcagccaaacgagactttcttagaactgcagtgtggtctgaggatcttcctaccagtcttctttccctcttgtcaatggtgtcagacaagtgtggtctgaaggctccctctgcctatgcatgctctctccctctctatcctgcccaagtatctcccccaacaagtatcttgcatgtctggttcatgttaacatcagcttattggaggacctgagctcacatagggtgagtagaacctagaataagagagtcatgcttcagtgtcaaagggacaaagggctgggctaagttcaggccaaaagagaatggatatggagaatggattgaaggactttctcgaagaagagtgcatggaaacttgtgcctaacaatgtagagggcaagggagggggtggagttgaagacacctccaacattgagacttgatcaccatgtcactgaaaaggaactcatttgagggaaatataatgacactatttctatgctaattaagggatttttgtggaaataatttaataacaatgttgttacttttgtattgggcttcaacagtttactagatgaatttatacatcatctcatttactctttaaccggcttttggaatacaagagaaaatggaagcacttagggaggtcctatttgactctcctttcctggggtcttccctgctgacccttctactccagactcttcttcacttctgtttccaagggatgaaatcactaaatcactcaggttaggccatctccagtcaagataaaaggtcggggtggtgttagcatgtagtgagatgatgtgtggtggaagagatcttaggccatgtgaaggctgaaaaatgtgggtttaagggagaagggtctgggatatacattgatttggctggggacagattattttataatatttagggatggtgactgatatagtttggatatttgtccccccaaatctcatgttgaaatttgatccccagtattggaagatggggcgtaatgggaggtgtttggatcaggtgggcagatccctcatgaatggcttggtgcccttcccatcctaatgagtgagtgctcactctactagttcacatgagagtggttgtttaaaagagcatgacacccctcccctcactgtctctctcttgccccgtccctcaccatatgacacactgctctccttcctcttccactgcaactggaagcttcctgaggtccccaccaggagcagatgctggcgcagttcctaacaggccacagactgataccaggggttggagagtcctgattaaaagataacacaaagtgctgaaaagagtgaggagcaatagaagttcctatgtgctactgaagagtgtgtaaaatgattccagcactttgggaaactgtttgcaaaatctgctactcaatattgctcatcctgtgacctggaaattccactcctaggtatggaagtgcctagaagtggttttacataatataggatatacacatgaaaagccatgcccaagaatgttcatagcatcattactcactattattaatacaaagcaaatgtccagcagtaaaatgtggtcatgcttcttgtacaggctgcagaaccataagccaaatacacctcttctttttataaattacccagtctcaggtattcctttatagcaacacaaaatgaactaagacagtcacctcacaagggtgtgaagtgttgatttttggggggttatggataaatcgtatcactgtcagagaaggggagagaaggacaatagaaagtagagcaatgtagagaaggaatgatcgttatgggtgggttggcagaagaaggacaatactacattgaaatattttagacggggtgtgtgtgtgtgtgtgtgtgtgtgtgtgtgtgtgtgtattctagcctcagggagagtgagaagaggggatttggtggttggaagagaagagtgaaagagatattggaattagaaagattctgaagaactttagagtacttaagattggcatccattagcctaggctctgtcagctagccagtattaagtatctcccgtggctgctgttcagtacggatgggacagatgttgtgtcttagggaagggagctagactttgaagctccttccattctaggattggacaaacaggtatttatttaaaagaaccagatggttcaaaggaatttctaattttatactgttgggcatcaggtttcaaactaaatttgggctctgtcttccagctttcctgttggccctggattgagaatagcctcctgttttaccagccatctggtccctccagatctctgctgctgagtgacaactccaaatatctccccacagagaggacagaatcttaaacaaaatctatagggtgaatatacatttttctaataggtgagatcctggaaaggaataggtccccactttgaaaagacccatgtgatgagagtcacacttatgtttgatttgataagtggcttcttgagcagccacatattgaagtgtactctctactggatagtccatacctgtgcttctagatctttgattttgtagaatttccttttctaaataagcaggcttgtgtgctagtaattcatcacatagtatcaataactgtttataaatacctgcttgtgtgctaggcactggtggcacagagtggtagaagaaggtgtcactaccagtttgaactatatctctggttttctaaaatgacgaaaatggagaatgatttagctctaaccatgacatgaattttttgaggaataaaatctattattttcagcaggaccgtctctggacagaagaggctaaggccatcccagggcttgatttgtctccagtgcaagacaaatcgtactatgaagtctctttgcttcctattctcaacccctcccactggcaacccagcatttttatcaggtcaaagtgaatgacaagggttaaaacttgaagaggatgagaaatcacacaatgcatccatgtgaccagaagggctgacgatacttggatggaggtgttaccacttggtttggtgaagtctggggtttacatgctttggaggcatgtgtgagcctcaggcccttccttctgagcagcagatggcagagccacctcaatgcactctgccagctgcctggttcatgtgcctgggtgggattgtcctgctctaccttccacaaggatggctttgtctgccagaaagaataatcacaactgaaacaaatgtgtaacgatacctggatagatacagctcaattggctcctgacaggcctctggctaggagggcctgagcagttacagtgggaaggtggatggtttaggaccagacagatggtgggcagctgtcatccactgcatcccagtccccttcagtctcacatcacaaatgaccctaaggctatgtgtgagcagatttgaaaataaaaaaggttcagttgattccatttatcacaagttttctcaagaacaggcaggcaataaaactggtccccattcccccaaatagattttgcaatgcttgaggtctcctcttaatatataatggaggagttgctagggtagctgatctgagtgtgtgtatgtctctgtctaataggtttttcttgcaaaaagtcttatagttatggtttaagttctcattgcccaactgtatactctgagtcactgtcctgtcacagccatatttccggctggcattgtgtctgcaaccaagagtgtgactgcaagaacacaaggcactgtgcaaagatagatgagctgtatgagtcaggagttctgctctccaggtctgaggctgttcattgcctgggtttgtccagcgggcctgaagccatggagagcataatatttagaggtggcgaacccgacaccaccctgcttgcattctttgctccaggccttctgacctagttgtccttttcctgtaccccatgcttgctccctgagccctacgcttgctgttctccagattgaggctttctcctcttgcttcatactcccctccctcagcccactatgcactatgtcaggccaactggtcttactctrcaggagagtctgagattcactgttgcttcctgtggggaggcttttctgagcccccargcctggtgctgtgtgctcccgtggcagcccctgcttctcctgtacaccacatattgccaacttgcttctgactttcccctactgagctacattctccatgaggtagggaattatgtgtttatttttccagcacagagcttggtgcacactgggtgctcagtggttgagcagatgaatggaccatctcggtgattctttgcttccctcacactgagaaggtctggccagctcgtttccctttctcctctcccttgtttcttgctgaatcttctggagcaccagtgaaaacacagtccttgcctggctttctgtttttttttttttattctctccccattgctttaattaacttagaaattcagtggactcttagacaaacaatagaatttgattatctctatagtatacctggatgccacttctctgaagtctgtttgaatgaagtgataaaaccttgtatgttttgtttgttttccagttgcctcctggttataaagcaaagccaaactggagagaccagtgccagagcctttattactaaaaggtcagcattacttgcaactctctttggtttggggctcttttgtgtcacagatgttttctttcctttattttttttttcaggattaagcatgagtttaatttcttcttcttttttttttaaattatactttaagttctggggtacatgtgcagaacatgaagttttgttacataggtatacatgtgccatggtggtttgctgcacccatcaacccgtcatctacattaggtatttctcctaatgctatccctcccctatcccccatcccctgacagaccctggtgtgtgatattcccttccctgtgtctatgctcttcttcctcaactcccacttatragtgagaacatgtggtgtttggttttctgttcctgtgatagttcgctgagaatgatggtttccagcttcatccatgtccatgcaaaggacatgaactcatcattttttatggctgcatagtattccatggtgcatatgtgccacattttctctatctagtctattattgatggatatttgggttgattccaagtctttgctattgtgaatagtggcacaacaaacacacatgtgcatgtgtctttacagtagaatgatatataattctttgggtatatacccagtaatgggattgctgggtcaaatggtatttctagttctagatccttgaggaatcgccacactgtcttctacaatgattgaactaattacactcccaccaacagtgtaaaagcgttcctatttctccacatcctctccagcatcagttgtttcctgactttgtaatgatcgccattctaactggcatgagatggtatctcattgtgkttttgatttgcatttctctaatgaccagtgatgatgagcattttttcatatgtttgttggctgcataaatgtcttcttttgagaagtgcctgtttatatcctttacccactttttgatgggtttgtttgtttttttcttgtaaatttgtttaagttctttgtagattctggacattagccytttgtcagatggatagattgcaaaaattttctcccattctgtaggttgcctgttcactctgatgataatttcttttactgtgcagaagcgctttagtttaattagatcccatttgtcaattttggcttttgttgccattgctttcggtattttagacatgaagtctttgcccatgcctgtgtcctgagatttatagcatttggaccagaagataccccaagagcaggcagtgagcagatcactatctttactcctagtctgccttttgtattaggttggtgcaaaagcaattgcatttttttgccattaaaattacttttgcaccaacctaaatataacttgtgatgatgcagagcacccaaacgagagagtgtgtgattgtgcaggcatccactgtgcctctatttttatttcttccagcttaggggtgtggcttctctcatcatagtttcacaaaaggattattttctagtcaaaaagataaccacccaggtagaaatcaaggtgaggggaaaggacgaaacagttgtagatgtttatttttagttcagttggcataaatgaccccactgggatgttataagatcgagaacccggagtaggggagccttgttagtctttgactctgaacagacctagagtctgatcctgtggcattcttccacctaagagcaattattggagttgaaagaaaaccacttagttttactcaaatttgttttaaaatatttataatgaggccaggcacggtggctcaagcctgtaatcccagcactttgggaggacaaggcgggcggatcacgaggtcaggagatcaagaccatcctggccaacatggtaaaaccccgtctttactaaaaatacaaaaattagctgggcatggtggcacgtgcctgttatcccagctactctggaggctgagggaggagaattgcttgaaccagggagtcggaggttgcagtgagccgagatcacgtcactgcactccagcctggtgacagagcaagactctgtctcaaacaaacaagcaaacaaacaaaaaaaatttataatgaaacaagacttagaagaagaatgggcacctaatagatgccagctactgagctgtgtgttttacttagtcatcacctcatttaattgttttgattagatattgagaatattcatataatatatatgtgatgtgtaaggaattacaatattggccaggcatggtggttcatacctgtaatcccagagcttctgaaggccaaggcaggaggattgcttgaggccaggatttcaagaccagcctgagcaacatagtgagacctcatctctacaaaaaataaataaattagtcaggtgtggtgcacacctgcagtcccagctactcaggaggctgaggtgggaggattgcttgagcccaggggcttggggccgtagtgaaccttgatcacgtcattgcattccagcctgggtgacagagcaagaccctgtctctaaaatataaaaagaattacagaagagtgaacacctgtgttcagcattacctttggatgccctgtagaatctgtcttcttcccttctcagatgtagctattctcctgaagtttattgttcactttcttttttttttaagacagagttttactcttgttgcccaggctgaagtacaatggagcgatctcggctcactgcaacctccgcctcccaggctcaagcaattctcctgcctcagcctcctgagtagctgggattacaggcatgtgccaccacgcctggctttgtatttttagtagagacggggtttctccatgttggtcaggctggtctcgaactcccaacctcaggtgatctgcccgtctcggcctcccaaagtggtgggattacaggcgtgagcctctgcacctggccttgttcactttttttctaaaatgcttttttacattttgctatattccaaaacgacatgttgtttagttttgaatgttgttggactttaaacaaatggaatcatactgtatgaattttctgcaacttgtgtgttttactcagacatttgatcttgagtttcatccgtgtagttgtgtttcactgtaattaattcctataataagaattatatggcgctagagcatataaatacaccacagtgtggtttattcattcagatgtggatgaatgtttgcattgtttccatttttaaaacacgatctagacaagactttttcgatcattcttgtatgagtccctttgtgcacacgtacaggagctctagggtataatcctgcatgcggacctgctggattacaggacacatgcatcttcattcttgctagattatttctaattatttttcaagtggttgtaccagttgacactctcaccagcagtgtgagtgttctggtttttccatcatagccaacacctgattttgtcagactttcaaacttttgccagtctggtaggtatgaaatagtatcttattgtggtttgttctttttatctgattatgaatgaggttgagaatattttctttcttttttttttagacagagtctgctctgttgcccaggctggagtgcaatggcgcgatctcagctcactgcaaactcaacctcccgggttcaagcgattctcttgcctcagcctccagagtagctgggattacaggcacctaccaacatgctgggctaatttttgtagttttagtagacatggggtttcaccatgttggccaggctggtcttgaactcccaacctcaggtgatccacctgcctcagcctcacaaagtgctgggattacaggcttgagccactgcacccggcaaagcatattttcatatggatatggatacttatgtttcttctactctaaagagataaagtcttgccaatattaatgatttttaaaataatttcaatttctattttagattcaaggggtacgtgtgcaagtttgttccatgggtatattatgcgctgctgcagtttggagtacaatcgatcctgtcacccatgtagtgagcatagtacccaatagttagtttttcaatccttccctccccctcccacctctagcagtctccagtgtctgttgttgccacctttgtgtccacatgtacccagtgtttagctcccacttataagtgagaacatgcgatattcggttttctgtttctgcattaatttgcttaggataatggcctccagctgcatccatgttgccacaaaggacatgattttgttcttttttatggctgcacctatctttttctattaagatgtctttttcttatagacttatatgacttctttatgtattttgatactacctcatttgtatgttgcaacaaatagcttctccatttttaattgttttttaaattctctaacagtttcttttggtgaacatatgttccaattttagcttagccaaacttatcaaacatttcctttatagtttatatttttgtataaactatttatacaacaactttgtatgcaatctttcttactgaatgttataatcacattgcctatattatcttctaaaagttttatagtttagcctttcatgtttaggcctacagtctatgtgaaaytgatgtttgtgttcaataggatagatccaatagaaataggatcatatttctttttttttttttcctgtgtgaatactcagtactctcagcaccgtgaatttccacactgtgagcaatggcagctttgtcataaatgtacatatacatatgggtctgtttctggaacctattctatttcattgttcagtatacctctgtgcctccactatcttaattcctagagctttttaataattcttgatacttgatagggcaaggcctcttgtcttattctcctttgagtgtgtcttggctattcttggtcccttgcacttctctgtaaactttgggttaacccatcaaatttcccccaaaccccttgttgtgttttcttctcattgcgttttgaggtctctcttttgagagtggccctaatgcaagattgtcactctttaggagaggcctgccctgaggagagctaggatcaggtatgtcagccaggtgagacacggaggaggtggcacagcaaaacatatgaaataacagaagcagtttttaattacttaaagatcacagagagaagagggcatcataaaaccagcaggggccaggcgcggtggctcatgcctgtaatcccagcactttgggaggctgaggtggacggatcacttgaggtcaggagttcaagaccagcctggccaacatgatgaaaccccgtctctactaaaaatacaaaaattaaccgggcatggtgctgggcgcctgtaatcccagctactcgggaggctgaggcatgagaatcgcttgaacctaggaggcggaggttgcagtgaggcgagatcgcaccactgcattccagccttggcgacagagtgagactccatctcaaaaacaaacaaagaaaaaaaccccaagcaggtccaacaggaagaggggcactgactgggacctgcaggggcaaccagagggtggaaagcaaaagagagagggtgagggagggacctgagggccaaagccttttttggtgtccagggcattgcccaagcaggttttccacagggagttctaactggtgggtttaaagcaagcaggcatgagttccatggggtcatgctgtgactgagaggtggtcactgcagcatatctgcacagacaatgtaagacgtgggggttagtggggcaagtcaagtaggttacctctagttgtcttatagggaggtggtcgccaggaggtggttgtataaggaagatatctggattaaccacactgcagaactaggaggaggtggagaactggaaattgtgtcaaaggcaactaaactctacttctggtatgaggaagtccaacttatatttaaaacggatgccaaggcaacatagaattataagaattcacagcccagtgtggtggctcatgtctgtaatcccagcactttgggaggctgaggagggtgaatcacctgaggtcaggagtttgagaccagcctagtcaacatggtgaaaccctgtctctactaaaaatacaaaacttatctgggcaaggtggctcacgcctgtagtcccagctatttgggaggttgagggatgagaatcgcttgaatctgggaggtggaggtttcagtgagctgagatcatgctactgcacttcagcctgggtgacagagtgaaactccatcttaaaaaaaaaaaaaaaaaaagaattcactacacccctgatctaattgaaactttactacagcaatcctgttggaggattattggagattgatcccttgatgaattttaggatagggttttttttttttttaatatttctgccccaaaaaatgctgttgggattttaatagcgattgtattcaagctgtagattactttgggtagtcttgtcatcttaacaatgttaagtctgccaatccatgagaaaaggatgtcttttcatttatttatatcttccagcaatgtttcatagttttcagtgtgcaagtcttttgcttccttggttaaatttatttctaagttggtttcttgttgttgttgttgagacagggtcttgctctgttgcctagactggagtgcaacacattgaataacctagatgaaatgaaaaattcctagaaacacataatctaccaaaactgactaatacagaaatggaaaattttactagacctataattattaagtagattgaatcaataattaaaattgttgacatacaattattcataatactgccttgtagtcatctttatttctgtaatatcactagtaatgttcccagcatcgttttgtattttagtaacttgagtcttttctctcgaatttttagtcagtctcatcaaagatttgttaattttgttgatcttttcaaagaacaaacttatggttttgttgattttctttattgtttttctattctctattttcattattttcattcaatcttccttttctcttagttactacttcctcaggaagagagtatgtaggaagtgggggcttaaaacacaaggtgcaaggtacagcctttttttggagatgtatgaaaatgggtctgactaggcatagaggaaaagccgagctcagccgctgcctttgctgtggaactctaagctggaatttaggcagtgtgctactcggagatcttcataaggctggaagttattgacacttagcttatcaataggagggagtccaagaaaggtccttttctaaggcagaataaggaaaactagaatgagattaagtggaactaggtaatagtagttcagcaaattaacccagagtcaggaattcagcagggctttttgtgtgaaaatataacaccccatatcagaactcaagcatgagaaactaattcttggggagcttttttccatgtttgtcttttttccatgtttcctttgtgaagggagtagtctccctaccttttcccagggtaggaaatgtgtgataaaaaggtaaaggagaggtagctacaagtgagttcttattaactaggaaggtaattcacttgcacgtagatgctttgtagttccttccatctttttttgtaaatggtatttccctttttcatatgttcttttaaaaaaaagcattatatatttatagagaaagggtctcacagtgttgcccaggctagtcttgaactcctgggctcaaggatcctcccacctcagcctcccaaggtgttgggattacacatatgagtccattttttatatgttctaattagaaaatatatagtttatttttgacattttaatagtatatttatacataaaatgcatgtagactagactatatgctacttcagtctctctacctatccatagttgggaaaatcaggtgggtccctatggccataataaaaggacccactgcttcacgtcaggtacctactagaaaataagcaacctcccacttaccggctttgcaaatccaaatctattaagtggctccactgtcacagtaagtatttcattgttgattagaccaggcattcttaaagacataactattttaatattattaagttgcttaaagagtcactgaggtacatggttctgggtgggggtctggagagtgcagcagccatggccagccacattgtgctcaacaatggcaccaagatgcccatcctggggctaggcacctggaattcccctccaggccaggtaactgaggctgtgaaggtggccattaatgttgggtactgccacatcgactgtgcccacgtgtaccagaatgagaatgacgtgggggtggccattcgggagaagctcagggagcaggtggtgaagtgtgaggagctcttcatcaccagcaagctgtggtgagcgtaccatgagaagggcctggtgaaaggagcctgccagaagatgctcattgacctgaagctggactacctggacctctaccttattcgctggccaaccagcttcaagcctgggaaggaatttttcccattggatgagccaggtaatggtaatgtggttcccagtaacagtaacattctggacacatgggcgggcatggaagagctggtggatgaagggctggtgaaagctattggcatctccaacttcaaccatctccaggttgagaggatcttaaacaaacctgacttaaagtataagtaggtggttaatcagattgagtgccacccgtacctcactcaggagaagttaatccagtactgccagtccaaaggcatcatggtgactgcctacagctccttcagctcccccgacaggccctgggccaagcctgaggacccttccctcctggaagatcccaggatcaaggcgatcacagccaaacacaataaaactacagcccaggttctgatctggttccccatgcagaggaacttggtggtgatccccaagtctgtgacaccagaatgcattgctgagaactttaaggtcttcaactttgaactgaacagccaggatatgaccaccttattcagttacaacagaactggagggtctgtgccttggtgagctgtgcctcccacaaggattaccccttccatgaagagttttgaagctgtggatgcctgcttgtccccaagtgacctataccgtgttttctgtctcatttttttttttccttgcaaaggtagtatggcctgtgtcactcagcagtgggagagcaacctatagagtggccagcgagggtgtgtctagcttgatgttggatctgaagagccctgtcaatagagtagctttgctttgcccttctttttgcccagctggggaaagtacaacctgaatacccttttctgaccaaagagaagcaaaatctaccaggtcaaaatagtgccactaacagctgagttttgactgcttggaaatgtcatcctttcagcaagacttctctttacctcaaataaatgtgctttttgtggaaaaaaaaaaactcactgaaraaaaattacgaagatctataaatatgtagcaaagtagaatagcctttgtactaatttcaaatcatgtctctatcacttaccaactgggcaactttgagtagtgtatatatcttcactgyttttctcaggtcatgtttgggtgcaacaattagatacttactcaagctagtacatataaaagggaactttattaaaaagatatggatcttacagcatccaaagagcagatgaacaactgcatccattcttggtaacatttatgggaaactgagacttaggtaagttaagtctcttaactactaaaccttatgggaraggaaatccataaatgtactgagaactgcttaggaatgaatcaattatgtgttttgtacttacatgaatctactatttttctaatgtatgtaaatgctactctgagtagacaagttcaagtatattttaaagtgtggcttttatcatgttctttctcagccaagagacagtcaatatacatgggagtatccataaactttttactttaaaaatagttccttttaaaaaaagttatatatgtacatagtttaaagagtcaaatagtaaaagcgaagagcttgatgggagtcccccttccattcccaactttgccctctatttcctgcccttcagaaatacttataattttttggaatttacctacatatctctaaataacatgcttgtcttgctctttcttgacttttttggtagtaggaataatctacttatttcccactaaggaagagagggatttagttttctttatacatttcactttcacatgtggttagttaacattcagtgtttgcattcttatgacctatgtaaatgctattcacaactgagccgtgtagtatactatgattattatttctttcctgtaaagccttttgtttttttctgaaggtaatatttgccttttctagagcccacatagtgaaagcaagagtaagtaagcaagcaaacaaacaaacccacaaaactcaaaaacaaatctagagacatcacacattacctgacttcaaactatactacaaaactattgttactgaaacaacatggtactggcataaaagtgggtgtgtagacctatggaacagaaaagagaacccagaaataaagccaaatacagccaactgatcttcagcaaagcaaacaaaaacataaagtgggacaaaggacaccctaacaaatggtgctgggataattggcaagccacatgtagaagaatgaagctggctcctcatctcttaccttatataaaaatcaacttaagatggataaagacttaaatctaatacctgaagtcacaaaaattctatatgacaatattggaaaaactcttctagacattggcttaggcaaggacttcatgaacccaaaagcaaatgcaatgaaaacaaagataaatagatgggacctaattaaacgagaaagctactgcacagcaaaagaaataatcaacagagtaaacagacaactcagagaatgggagaaaatattcacaaactgtgcatctgagaaaggactaatatccagaatctacaaggaactcaaacaaatcagcaagaaaaaaaccaaataatcccatcaaaaagtgggcaaagaacatgaatagacaattctcaacaaatatatatatactaatgcccaacacgaaaaaatgctcaacaactgtaattatcagggaaatgcaaatcaaaatcacaatgtgacaccaacttactcctgcatttgaatggccatgatttaaaaataaaaaaaaaataacagatattggcatggatgtggtgaaaggagaacacttttatactgctggtgagaatgtaaactagtacaaccactatggaaaacagtatagagattttttaaagaactgaaagtattgtagaactattgtttgatccagcaatcccactactgggtatctacccagaggaaaataagtcattatatgaaaaagacacttgcacatgcaggtttatagcagcataattcacaattgtaaaaatatggaaccagcctaaatgcccatcaaccaacaaatggataaagaaaatgtggtgtatacatataccatgaaatactatttagccataaaaaggaacaaaataatggcattcaaaacaatctggatggagttggagaccattattctaagtgaagtaactcaggaatggaaaaccaaacatcctatgttctcacttatgagcaggagcttgcagggaagggtgggagggaggcaaaggataaaaaactgcatattgggtacagtgtacactgctcggatgaagggtggaccaaaatctcagaaatcactactaaagaacttttccatgcacccagacaccacctcttcccccaaaactattgaaataaaaattaaaaaaataaaaacaacaatgacgacaacaaaaagctattccaactggtaaaataaaaagttaaacattcgccttttctgtttggtagttagttttctttgtacttactactaatttatttccctaacttgctcccaagatataaatctgccttcagtacttaaacacattaggtatttccaacaatttcatcttcttgatgattccagaaccttctgacttgctccaggctgggctacttatgctctatgcctactgcacagctgccatcttaagggtttccttcaccattatcctagaaattccctttgccttccttgtttttgatcccctgtattccgtatccattgtctttctctttcttagtgagtctctcattttggtgactggtactattatttggtgtaggtactagtacctagtatctccctgataaaggttgcatgagaagtgttttgagatcttatatacctaaaaatgtctttattctgcctacacactcaattacagtttgactctacaaaattttggattagaaaacactttctctgcctcattatcttctaatttccagtgttgctgctaattcaatgtctttctgattctttatacttttgttgaaactcccttctccgtctttctcctctttctgaaagcttgtaggattttctctttggttgtctaaagtttcacagagtatttttgtgttttcatctgttgtgctgagagttcagagggccctttcaatctggaaactcatgttttccatccagggatatctcaattatttctttgtcgatgtcttgtttttcatgtagagagtagagaacaactctattgaaattttttgttcagatgttggacctcctgaactgatcatgtttyttttttctttttttttttttctttctgttttctctctctgcctttggctctatttctgagtgatttcttccattttaacwtcttgcccttgagatattcatcttgtcatcttttttaatttctaagaacgccatttttgaggttcctttttgtcttttcataagctctgtttcctccaagttgttgttttctrtttatttattttggcctctgtctttcattgtaaaggttttcctcaaatgccgcaatgagtctcagcccattgtatttgagtggtgtctccatagagtccattggaaactctgagcatgttgggtgtgacttgtcaaatgtgggttttactaggctggtctggctgaagaacttctttgacaaatctctttatgtcagtatctctaggtcatttgtattgggatctgattctgcaaggaaggctcctccagtgttccatctagatggtaaaagtctggctgacaatgtctagggactgagtgtactatggtttagatatttgacccctgcaaacctcatgctgaaatttgatcaccagtgctggaggtggagtctaatgggagatgtttgggtcatgagggtggattcctcaggaagggattggtgtcgtcctcatggtaatgagtgagttcttgctctgttagttcctgagagagctggttgttaaaaagagcctggaactttccccccctctctctttcttcctctctggccacatgagctttgcacagaccagctcctgtttgccatttgccatgattggagacagcctgaggctctcaccagatgcccagtgttccagtcagcagaattgtgtgttaaataagccttttcttttctttatacccagccttaggtattcctttctagcaacacaaacggacaaagacagagtgaacataagcctggggtggatgttggtggggagtgtctcgaaatcagtctgtaaatcttcaacagattccttgctcatgtttttaatatgttatccctaccctcagctgtgcctagaatcctgacattttaccccaataagagagtaaacatctagtcttcagccaagtgctgagggaatgacgggctggggagtatctaactatatcttaaatagactttgagtcagaccccttatatttggcccccactttcatccatactcccaaaggtacctgggctggtttaggattcagccttctaagtcagtgatcagccactcatccatctgctttccagtttccgttaccattgtaaaccaaaaagtatctgacacaagcctccaccaatrtagaggtttattttgccaaggttgaagacatgcctgggaaaaggagacataagccaccgtaggatctgtagcctgtgctttttytgaagaggatttcaagggcttcaatatttaaagcggaaaagtgggcaaaaggggaaagggcaaagcgaaaaaaggaggtcgcattcttctgaatccacatgttacacatgaaaaggaggggtaggccagtaatcccagcacttttgggagcccaaggtgggtggatcatgaggtcaggagatcgagaccatcctggctaacatggtgaaaccttgtctctactaaaaatacaaaaattagccaggcatggtggtgcatgcctataatcccagctacttgggagactgaggcaggagaatcgcttgaaccagggagtcggaggttgcagtggccacagcctgatgacagagcgagactctgtctcaaaaaaaaaaaagaaaaggaggggtagagggaacagttaattatgtattcaccttgtgtttaatgaatctgcactttacataagataaacacagagtagagaaagcagtcaaatatgcattcatcttggggtagatgaggacaattctagtctcctcttttcccataccatgaggataggctgttaatttacattgtcagggtgagggaggcccccagtggaaacatatggcctctatctgtggctctcagtttaggaacaaaagaaaatgcaattgttttctttgtttttttgtaacttggcttccaagcttaatttttccctgttggcatagtgaatttggggtcctgaaattttattttcctttcataccatgttgcttttgtctttgtccttttcactttgttctggggatttaggctttacccaagtctttttccggttttgatggtttttttggagagattggaggctgagtgtgtttagtcttccatctttaaccagaaccctgacatttcttgaagtaaaaaaggcatcattacagggaaaagaccggaaatcattgcttagtgattcctaatcagttctcttactttcttctacccttttgaaaaccttttcctttcctgtttctttttcacaggtttctactatgtcttgattaatctgattgtgtgtattgactaattgagtggtacaaataataatcagacacatgacaaatttctccttgctcttgagaatacaataagaagagcccaaagcgtgttggatacctcctcactggctccctttaagagaagtaaattgtgcttcttttgaaaacagtgctattgcatatagttggcatcatgagagaaaaaaagaattgtcattcttatgagcccattattttgttattgattggttggctttttaaaggtgacaggaatcatttttcttttctcggaagatgatttaaggtcaaatttagctcatctcctttgccaaggatctttggggataacatttaagtcacttataaacctagactttgagagacagactcttcatacctaaattacagggggataaggaggactgtgggaagcctggagagcaggtagctgcagctgcacatcctggatgccttttcacatctctggaatcagactgagtgtgcgtgaggttgtaacattaaacatttatctgtacaggtgatgggggtggacatgcacaaaatagggaaagaatcatgataacaaaaattggacagagggggtgtggggagggctgtggaagctggttcctcttcctgacaacctttgccttttctttcataatatttacatacaattcagctgtttggctttgacatgctgagggcctggggttcccttcatcctttctttgtgcctcctccagctgttcctgggtttatttatttcttttaactgctatttatagtccataggtagccacagatggccagttcttaaagtgtgttggtgtgtgaacagaattttagaggtaaacattttcttattatgtgcagagacagatgtggctgggcttttcttttgtagggtttgtccatgacaagtatgttacataaagatagaaaagaacagagcacggttttttttttcctccctaatgtagctaccagttaatttttaatctaaaataatggtgatggattttgaagtgcctggggcggtagcctgtgtgcaatacacctggatcaatcaccgcagaacttccttcttacgtgtacatgtaatgaaatggaagacactttattcacccaaattcttcttggagagaaggagtatgagtttggaagaaatattttgagaagcctgttgaaatcagcgtgggggactccaagtggcatattcaggaatcagaaggtgttccaaatgccttctaaagaggctgagacctgccatatggaggactttgtttttctcaatactaagatggtcaggtctataagttcggaggtttggagctgccatgtatctaaattgctcttaataatagaggggaaaaagaatttgcctttgttgattcacttatctgttcattatttcagacatctttgttgagtcctttctctccatggtactcggccacattgcctgagtggatgtgttgctggggcacacagcatgtgctgggagtttacagaagcttcagaatatacatgggccatcttcctggggcattagtggactccataagtggattatggagatgcaacattcatctccrtttgtaaaaacattacattttaaagaagttattctgggtccacttgagtctgtgctcttagatatttcctcctctttcatagtatgtacttactgtccccaggcacatgcaaagtgctgtaagatttcacaggatggagagaacatctgtggcagtggacagagtcgtgagtgaccacagaaggctttctggaggcaggacttgaggtgagtttcaaaggactaggggtgtgtattagggagcaattggtgaatgtgtgtttgggagagggccatgccgggtgagggaatgtcatgaatcccagctcaatggtggaaatgtcaaccagagtggaccagtttggccacactatgtgagagtgagggataaaatctgagttgcatatggggatcagcaggtaagagacacccatcaactctcccgttcattattagaaatttctgatgattttggacatcatcaaatagatagtttagggaagataacaagaggatggtaagctatggtggagggtgagtttagacaccaagttgtttggtttagtgattcctaatcagagatgcacttcagacttacctgcagaacattttaaactaacaatgctggggctcctaccattggagactctgattcagtaggtctgttgtagagcctatggagtctgtatgtggaagagttcttcagccaattttgttatattccctggctaaaaatccatgaaatagaaggtgattgtaatggcctacttttaatgtaatggaacttggatttctggtggtggcaaaggaaatggataagaagggttgaatttgaaacactttgtaatacaagaataagcaagacatgaattgatattagaccagtcgctgctccaatgtatgtgatgttctggaccataccccacttcctgtcgtattttccacattagcatagctaagttctgcaactcactcaccactgcattagcctcacttatagccctttctttggaaataatttcactgacagcatagttctttgagaacttagcggacaacttttaaaaaggatatttttgcacatcattattgctgacactattattattcatgttttaaaagctattttattataaatctcagcttgagttttgttcaattctgctctttaaaagaaagttacaatacacagaacaaaggcattagaaaaaagaaattttcaagtttctattgcatagagaagtatacagtccccataaacattccaggtctaatttgtccttgaacatccttagaataacggtagacttaaagacaatattatgcctggcagtatttaggacagcaaggcacttcttgattttggacaaacaggatttaagttttgtttgggggctagaaaaataaataaccagttctatcacaaaccctttatgccggagtagacaatatttcactaaaagacagagaaaaagtgctgatgtaaatccttcctttttgggaagctgattctttttgtcatggaagaaagactggtaaaaatattcacatttgcagtcatcaggatggcaaaacttgaatttgatgcagaaatgcatttatcatttgatatattttttctggctgcatgattcagcattttgatttgcattgaccattttggaaaaatgaagcatttcttggttgtgaaataatttgtaatttgtttctttggaatattccagtttgtggcctagttgactatgtagtgttttccccagacttagtgtaagataagaaaatgagaatctcagcaatgcctaatgggttggcccagcattaagtctatgaggataggaccaagggacatctttaggaatgggaacgacacagctacatctgctgacatcagcttctaaagaacccctcaaacgtgctgacttaytcaataatctgttagagaccaataaagcatgaattcatgtgaaaaactcttgaagagcattcagttttcagcctgcatcacctctctccatttccctcgcattgagaccccagctctgtagcacatcactcaagtccttcagggtttgctgcaacttacttttccttaccattcctgagatgtcattcttgttcatgcctccaagcctttgcacttgccctttgttcataatgccttccttgccygtttccctagatcgaatcctactcgcttatttttccaggcctgtcttaacgtctcaatgtctcctctaccgcaaagccttccagaccccgcaatcactcaacatacgtaatgagcatctgccatatgccaggcactgtgctgatgttgtgactaaagatgcgtaggacatagtctcttcaagggaccacatgtgtgcttccagagccatatcctacacgtgcccagtaatatactggtgatattaaaccaaagcacagttcttttattctttttttttttttatttttgagacagggccctgctccattgcccaggctggattgcagtgatgaaatcatgggtcactgcagtcttgaactcttgggctcaagcggtcctcctgcctcaacctcccaagtagccaggactacagacacatcaccacacctggataatttaaaaacttttttttttttgtagagatgggggtctcactatgttgcccaggctggttttgaactcctgggctcaagtgatcctcccactttggcctttcaaagtgctgagattacaaacctaaatgagccaccgcacctagcccattcattcttaaaagtctccagttcctgcacatacacatgaatcaatggctcaaaggaggatgtagatagcacaggggtcgtggtttagctttaaactccaaactagattagatttttaaaaatccataagcagcattagtcttgaaagccatacttcgttgaaagagaaaagggctttctagagacacacattttcccctacatggcaagagccatgaatgaagagagaactcaggacatcatggaggaaaaaggaaagacttccttcccctagtactgcagaaatgaatgggactgagagggaagttttcatgtgaatgatctggttctccccatgggatctgaaccttgaaaagggacctggtaacaaccagatgatctggggactttgggaactttagggctatgtattagcccgttttcatgctgctgttaaagagatacccgagactgggcaatttacaaaagaaagagttttaatagactcacagttccatgtggctggggaggcctcacagtcatggtagaaggtgaaaggcatgtctcacgtggtggcagacaagagaagaaagcttgtcaagagaaactcccctttttaaaaccatcagatcacatgagacttattcactatcatgagaacagcatgggaaagacctgcccccgtgattcaattacctcctactgggtccctcccacaacatgtgggaattcaagatgagatttgggtggggacacagccaaaccatatcaggccagtactttgcttccctgggagacttcgagccttagagaaagtctggatttggcaggaccgttgtctcagcatgatgtgtatagcgggttgaacagtgtcccccaagtttgtgttcacccagaacctcagaatgtaaccttatttggaaatagggtctttgcagatgtaattagttaagaatcttgagataaaatcatcctggattcagggtaggccctaaatccaatgactggtgtccttataagaagaggagaggacacccagagacacagaaaagaaggccatgggaagatggaggcagagattggagtgatgctgccacaggccgaggaaactggagagctgctagacattggaagagttgaggaaagattctcttctaaagactggcaggggagcatggccctgctgacaccttgattttagacttccatccttcagaacagtgggaaggagaataaagttctgttgtttggagccacccagttagtggtaatttgttgcaacagccctagaaagtgaaaattgtgtggaagcagcaggacagtgctggagctttgggtcatgtgcctggttgcctatacccacgtgttctgcctgtgggattcacaatttacacaggcytgagtgagaatgcaggtgcgctgaaggagcaggcaatagtgaagagtcaaggtttgggaggggaaccagagaccccagacttcagaactgcrgcttttggggtcaacacaacatcccagaacatcaagacaccaagacatatcagctaggaccctgcagtaggacatcggtgtccagatgagaccagaagcaacccagtagaagccaggggacagtgtgtggaccacagaattcatgcttgatgccatcaaggtaggaagtttctgcctgcacagagataccctcttgggaaggaagcgggtgtctggccagagctcctttgggaagggaaggcacacytgatagagaatttgaccttggaaaatgagtgcatgtttacctgaaagaggtatttctaacctagaagagcctgggctactttttattgaaaaatttaagatctgtgtggtgtgcgtatatgtgtatgttgtcattaaggattgatcacaggccgggcatagtggcttacacctgtcatcccagcactttgggaggccaaggtgggaggatcccttgagcccaggagtttgagaccagcctgggtaacatagggagaccccatctctacacaaaagttttaaaaaaatagcggggcatggtggtgtgtgccagcagtcccagctactcaggaggccaaggtgggaggattgcttgagccaggaggtcaaggccttagtgagctgtgattgcaccattgtacttcagcctgggtgacagagtgagaccctgtttccattaaaaaaaaaaacaaaacaaaacctaaaaactaacaaataattaattacaagatgagaccagttatggaaatgcatttctagtttttgcctattttagttacagtatctaaatgtcaactcccatctcaccccattcctagatatttgctgtattctattgtgtttcccacccacccccatgttcgttccctcccttgagctgtcagcctcttgtgggtagagatgacatcaactatcttttgacatatatttggatatctgtgcctgcaagacctaataggacaattctaacacacggtgtcatctcactgaatatttgttgaatgaatgaaaaaattcagaatgtatgaataatttttaaaatttttcctcaatagctttcttgtatattttaaaggctgtctggattttcttagggcctttgcctcagacatgcatacggcaggagtgtgagatctatggagtgggctcagctcatggagcaaggaggacggcaggggctccaatgatgatgtctgcgtaagaattcccatttaagatctttccaagcacaagagtcatggcccaatggcagagtgtcctatgcccacgaataaatcaaggatgaagaagacatttttggaaccagcatagtttctggtaggatctttgccactacttaaaaaaaaaaaacaagcatttaaactcccatagtgtaaattaattcagatgtaaataaccattcagacaaccaggaatytgacaagcagaggtgtctgccaacatgtcctgagtaattagctggatttttgcacttttttctttttgctggcagcactaggcaacacttacttatttyttagctccacttgatggagctgattctaggagttaaaaaaaagactttggataataaggaccagcttctcaggctttggaacctgctgtgggagtaaaggctggccttcaaagtttctgttcttaagtctggaggtgattagcattaagccatgggccaagctactaccttcttcctgaccccctgtttttttttttttttggagccattttactgagaagcatgacatctatcaacttcccagatccctgcgagaatggattgaggagtctgagctctggaaatcaaagtggctaagcgagcaccgttattgctgttaagaaaacctgcaatgcgcgagttgaaactttctaagtttggatctgcttttgtctgacctctgcctggatagtaaggcagctgagtgattcacaggcacagaaatgcaccacgttgctattcccagaccctgccacaaaagactgttgaattcccaatgtctccatgctcacttcctgtcctcactgtgactatgaggcactttgaagatttaacacattatagaaacacacagcatcatgtttataataagtctacattctgaatcaaaataatggtttagtcttctcagatgagagggaatatctggggctaaatgagggtaagtcacgtacttttctatgtgcaggcaaaactgattttgttctgagtgagctgcagcctgcagcctcttttcaaagctgactcctagggggtttggccagggctgctttttgcatgaattgttgacattcaaacacctttatctctgatgctgctctacagcttaatgtgatatttctgtccaaactcaacttttgatgagaagaaaagatttttaatccaaaatatgcacacaactccccagccccagggaaaggacttctttgtcttagtgagagcacttctttgagtgctctttgggtggctctgtagctcacttgcagcatgggattgagaaaggaaaagtggagcccagggcaggcagggggttttccagctcctctaaagaggttgcttaccagtgggaccttactgttttgcttggaagtttgagagttaccagttcatcaggatatccactttttttttttgagatggagtcttgctctgtcacccaggctggagtgcagtggcacaatctcagctcactgcaacctctgcctctggggttcaagtaattctcctgcctcagcctcccctgtagatgggattacaggcatgagccgccaggcctggctaatttttgtaattttagtagatatggggtttcactatgttggccaggctggtctcaaactcctgacctcatgatccacccacctcagcctcccaaagtggtaggattacagacgcgagccatcacaccagctgatatccacttttaaatgccagtgctgtacttggcataaagtagaccatgaataaatgtttgttgaataaatgaatgaatrattaaagcccaaattccactatatggctgtatgagagatttttggcttattggttcctttgggttgttttgcctctataacttcctcccttttttgtgtaactgctgtccagcttaacctgagcatggatgtgtatgtatgccaaacagtctcctttttccactttatcttagtttgtttgtgctgctatatcagaatacctgagactgggtaatttataaagaacagaagtttattatctcacagttctggggctgggaagtcccagagcatagcaccagcatctggtgagggccttcttgctgtatcatcacatggcagaaggtggaaggtcaagagaaagcaagtgaccaaacttgcagtcttaagccctttttataattggcattaatctattcatgagggtggagccctygtgacctaaacacccccccttaggtctcatcttccaacactattgcatttgggattaagttcctaacatgtgctttttgggggacacattcaaatcatagctaaygcctttgtgcttttggcccttyttccccaccgccccrcccccgcaacccacccaagagatagatcctggttatatttctggcctctgtgtccagagcctggtcasacttctggggcttcatttgtacattcctttttcctgtaagacttatagggttcttgcctcagaaacagctcccacccctaaagttacatatatagaaacataatgtgggaggcaattggaaaaggtagatctaagcttctcttgaacttgtttttatttaatccaggttagcattcaaggctacctgatcttacctttctaagtatatttccagtttcacttattattcactctagctaagcaggtctgtttagtgatcaatgaaaacaacatgcacattgacaccctgcactgcttcacatatctgaattctacctgttcttctagctgtggttgaatggttaggtcctctgtaaagtttctcctytattccagccactgttctctcagtactgggaagtcatttatattctccactggctcctttgtgaagtgcaaagtttgagaaccagctcttcagtgggactccctgggtttgaatcctaaccccactgtttactagctgtgtgtccttggcaaagttactcaacttctctatgtacctctgggtcttacaattggcagctgagaagagcttggtcttactgaagagatgagtttcttggaggcccatttacatgataaagagagaccacagactgatcaggcccagctatcttggcaactgctccttccctgaacaccaagacaaaaaagttggagaatggttccaactggaggacttgtggttttataggtttcagatactatgccgtaaaacagcccatttttattctcagaggctcaagctgtcaggttccttttacctctctccaggaagccagcatccctaggcctccacctctggggtacagggagggaggtttagaactcaagctttagagtcagatggatttgggcatgactgctagctgactctgctatttactgtatgaccttggtgcctgatctgtctatcattttctcattggtaaaataggaatgataatacccacgttgcagagtgtgagaattaaaaaagagtgcaaggcaagtgcttgcacaaggtctgataccaggaagcaatcaacayagattattaatagccactaattataaaccacttttgtggaacataaagagtggctgttgttgtggttgggtcataatgacatctgatgctcattcagatgacacaggcaggactttttttttgtcccaaggtgaaagcttcttcattccatgtgtctgtatgtgtgtatgtgtgtgtgtgtatatgtgtgtgtgtacggtatgtgtgtgtatgtgtgtgtgtgtgtgcatacatatatgtgcacagacagatctttataactgtttcaggcgtcctttacatgaactgagaaaaatggaataattaagcacctcacagcttttaaaagctgagattctggtcgagcttagaggagtaaaagacaagagagcagaactcagtgagcagagagggcactctcaggacatattgaagtcagtgcctaagaggtagaaaaaggaagggaaatcacggcagtaatattcagactgtaatattagatttgacatcagtcttgtgagttgtggacttgttagctgtagggttaaacttagtagcctcagattttcagcagaatgcctgaaacagtaatgaaaaatggcacacccgctcgtggctgatggaagagcaggaatatatttcacatctgacgggaaagctcaggacttttaactttcctactggaattagcaaatcagaaaaaaatggcatcacagagttatcatgcccagccctgtctattgactacctatgctttagaagggcagagggcagaaatggggatctagttttgacagctgaagttgggaggatgtgggcatttggcatgcaccaggaagctcccctactcaagctccacaggttctgagtaggacgattcccctgacagacatctgcttcttaagcagtactgtgaaaatagatgatacatctccaggtgtggaaggagccagggcccagagctaaatggggagtttctaacaaaggctcattgtgatctgtttacagtgcctgtttagtggtgctaataataggaaaatcacttaattttcattggtgggaagatgacatttagatgagcgggaaatgcaagcagaaagctacatcccattactctgtctccctggcctgaggactctctgaaatggtcacttctgtggctagaggttctccccacttcccgtccccagactggctatgttacttcctcttctttttttttttttaacttttttttttttttgagacagggtctcactctgttgcctaggctggagcgcagtggcatgatctcagctcactgcaacctccatctcccaggctcaagctatcctccagctcagccacccaaatagctgggaccacaggcatgtggcaccatgcccagctatccactctgttacttcttaggcaaaaacatggcttgctgatttgctgcatccggtccacacaggccaagctggtccatacctggttttcaggtcattactactacacatctgcggggcaaagagaaattaagtggcttgcctaaagtcacacagcttgaaagtgggaagctcaaagcttcccaactagcttgtcatctgattcagttcagctaaaaatacctctgttgacattkaatgttcttaacacaaataaatgataaatatttgagataatrtttatactaattacctgatctgatcacygtacattatatgtatcaaaacatcatatggaccccacaaataggtaaaattattgtcaattttaaaaaattwaaaaataaaaataaaacaatgtcattacaggacgtgagcaaatttaggaaaaaagtacttccattgaacacacactctatccagagccttgtgctgggtgcatccatagacatttgctcccctctgttgctgttcttatcaagataatagatggcttctgtgcatctctgttagatttcaagctccttataggcagggattgtcttcagtttattgtgcctgccgagtaagaagtgctctaaagtaaacaaatgaaaggtaggcactgcccctgctaaccaggttaccaacagctgggagaagggggaaataggaattattgtttaatgggtacagagttttagtttgagaagttgaaaaagttctggagatggatagtggtgatggttgcacaacagtgtaagtgtaattaatgccacagaactgaacacttaaaaaggtaaattttatgttatatttattttgccacaataaaacaaaacagaaaagtgctccacagcctgaggacaagtgacccctagagcccaagcctggcccaggtggcctggacactgcacactgacccagtctccagagcccttgcaccccsgcttgtctggaaggggctggagcaggtgtgggaactggagcaaatggaggtttaggatttggagtagatcttatctaagctatwagagcttcattatacacatcccctttccagaagccacgagttctgtctatagtgggtactgttctatgttattttatgtgatggttggtccagtgcagccacatggggcaggctctggaaaaggaagtttattacactcacaggtcctggaagcaggaggtgtggcacacaggaccacaagggaaagcaccagtgtaggtcaggaggcagaaagggccagagtgagggaaaatctaggccacggcctttactggggtttgcacaggaaaggtcaggcggagcagcataaacagttttggattgggcaatttgcattataaatggcaggctttgggctctctagggatggtctctagttgcctggtacctggctctgggaagactaaggcagaggaatattgcttcttgtagtgtgcaggtcccatagaagagatgtgactagataggccagcccctgcaagggcagtctctctctatccagaaagagttataagataaacatcaaaatatactgaaaataaaaatataagcacacattgttttactgcactttgctttattgtgccttgcagatattgtattttttacaaattgaaggttcatgagaaccttgtgttgagcaagtctgtcagcaccatttctccaacatcatgtgcttgcctcatgtctctgtgtcatattttggtaattctcacaatatttcaaatttgccctgttgtcaggctggagtgcagggaagtgatcagagctcactgtagccttgaactcctgcactcaaatgatcctcctacctcaaccttgcaataagctgggactacagttgtgcaccaccatacctgtctaattttaaaatttttgtagagtcagagtctcactatgtcacccaggctggtctcaaactcatgggctcaagtgatyctcccacctcagcctcccagggtgctgggattacaggtatgagccaccatgcccagtctgtgatcagtgatctttgatgtcactgtcataatcgttttggggcaccacaaattgtgcctaagatggcaaagttgatcaataaatgttgtgtgtgttctcactgctccatcaactagccattcccctatctgtctccttttccttggacctttcttttccttgaaacacaataatattcaatttaggcaaattaataaccctacaatagcccctgagtggtcaagtgaaagaagagttgcatgtyccccattttaaatcaaaagctggaaatgatttagcttagtgaggaaggcatatcgaaagtcgagatgggccaaaagctaggcctcttgtcagttagccaagttgtgaatgcaaaggtgaagttcttgaaggaaaataaaagcactactccagtgaacacacaaatgataagaaagcaaaacaaccttgttgctgatgtggagaatattagatggaagatcaaaccagccaccacattcccttaagccaaagcctaacccagagcaaggccctaactctcttcaattctatgagggctgagagaggtgaggaagctgcaatagaaaagtttgaagctagcagcggctggtttacaaggtttaaggaaagatgccatcttcataacatacacatgcaaggtgaagccacaagtgctgatggagaagctgcagcaagttacccagaaggtctagctaagatcattgatgaaggtggctacactaaacaacagattttcaatgtagatgaaacagccttctcttgggagatgccatctaggcatctttcatagctagagaggaaaagtcaatgcctggcttcaaagtcaagctcactctctcattaggggctaatgcaattgttgactttaagttgaagccaatgctcatttaccattccaaaaaatcctagaaccctttataattatgctaaatatactctgcctgtgctctctaagtggaacaacaaagcctgtgtgacagacatttgtttatagcatggtttattgagtatgttaagcccactgttgagacctattgctcaggaaaaaagattcctttcaaaatattactgctcattgacaatgtacttagttatccaagagttctgatggagatgtacaaggatatgaatattgttttcatgcctgcttgcacaactccattatgtagtccatggattgaggagtattttcagctttccagtcttattatgaattacatacattttataaggtaatggctgccatagatagtgattcctctgatggatctgggcaatgtaaattgaaaactgttttgtatatgtttttgtctatggttcctggctcataactcccagaacccttgttatttcccaaatgactaaaacaagaagaatatattttattaaagtatttgggcttttgtccattcccaaagcagctttggaacagctcagagtgataaaggtgagagagagtcttttgttataatgttggggcactttaggccacaaaagcaggcatcaaaaaacagaatcttggccgggtgtggtggctcacacctgtaatcccagcactttgggagaccaaggcgggtggaacacctgaggtcaggaggtcgagatcagcctggccaacrtggtgaaaccccgtctctactaaaaatacaaaattagccaggcgtggtggtgcatgcctgtaatcccagctacttgggatgctgacgcaggagaatttcttgaacccgagaggtgcaggttgcagtgagccgagactgcaccattgcactccagcctgggcaaaaagagtgaagctctgtctcaaaaacaaacaaacaaacaaacaaaaaaaaaaacaaaaaccaaaccaaacaaaacaaaacagaatctctaactgaccttcttctctcctttcacctgctccttttttacttcaaaggagggatctccccaacctttctgtcttcgagctggccatgaaggaattctctgatctaccttgtctgactgtggattatgagacctccatttcagaaggggtcccaaaccctggaggaaggaatgttgctcagagagatcaagaagaatcttaacagacaggcctcgctaggtttccctgctcagtctattaatattaaatcatcctctttggtccaatcacatttctacatggttgtccatgtttcagtcatgcctacccaaagaagtatttataaaaggtccaagagtatggggtcggagggtacagaaagcttccagacagctcagcttccaaacagacttgtggagggtcctagagggtgatgtgtccatggagggcatggaagctctccatcccttcccccataccttccctgtgcatctcttcatctgtatcatttgtcatatcctttataataaactggtaagtataaataagagtttccatgagttctgtgagctgctctagcaaattaatctaccccaaggaagggagtcataggagccctgatttttagctggtcagtcagaaacaggtaaaatgacctggggttggtaattggcatcagaagtagggggcggggactcagccctcaacctgtgggatctgatgctatatccaggtacacagtgtcagaattgaattgaaggacacccagcgagagtccacggcagaactgattgtttgcttggtgtgtgggaaacccccacccccaacattgtgttgtgagagcagaaggaaaaatagtttttgccatgcagaaacttcctggaaaggattcaccattctaacatgccattaagaacatgtgtaattcatgtgaggaggccgaaatatccacattaacagaaatttggaagaagttgattgcatccctcatggatgactttgaggggttcaagacttcagtggaggaattgactgcagatgtggtggaaatagcaagacaactagaatcagaagcggagcctgaagatgggagacaattgctgcaatctcatgatcaaatgtgaatgtttgaggagttgcttcttatggatgagcaaagaaagtggtttcttgagatgaaatctactcctggtgaagatgctatgaatatcgttgaactgacaacaaaagatttacaatattacataaacttggttaataaagtagtggcagggtatgaaagaattgaccccaattttaaaagaagttctactataggcaaaatgctatcaaacagcattgcatgctacagagagatctttcacgaaaggaagagtcaactgaggtggcaaacttcattgttgtcttattttaggaaattgacacagccaccccaaccttcagcaaccaccacgttgatcagtcagcagccatcaacatgcaggcaagaccctccaccagcaaaaagattaagacttgctgaaggctcagatgactgttagcattttttagcaataaagtattttcaaattaaggtttgtacattattattttagactgaatactattgcacattgaatggaccacagtatagtataaacataacttatatgccctgggaaaccaaaaaattcatgtgactccactttattgtggtggtctgcaaccaatctcacagtatctcctaggtgtacctgtataaacatacaggtatcagataaaaggtcacttggggaataaagaacttttgcagttatctattgctgcataatatttattattaacaagtgggaccataaatctggactgcaatgtatgcttaatatagacattattattttattggctaccatgcagcaatagataactgcaaaaattattttagttgctccaattttagttgtttaaaaaaaccgccaccctttatttgcttataattctgcaatatgaaatgggctcagctgggcacttgtctctgctccaggtggtgttagctgcacttacctatgggtttgtaatcagttggcaggcttactgagccaagatggccttcctcaaatatgtggcatcttggaagcaagactgggacagctagaggctggatgggcctcttgttccttatggaatatcatatttaatgaattagcctttattaatttttgattaccttcaatccaaggaggtttgctaacagcttttggcaaagttgaagcatttaataaatagaaacaacttaaaaactcattatgccttttacataatttattggacaatttaataatttgtcatttaaattatcatatttatattatatagatttatataaataagttcataatttatttgatcacaatcattttgcataatttattagatattctaataattttcttagaatttataattgctttgtttcaagtggcatattacatttctttgcttctatagttttaaaatttatccttatatgcttaataacttttattgattgttgaattaaatgattgatttaacagaaacatttcttgtaaagacagagaaagtatagatatcactattggaatattgtttactaaggctaattctctaaaatatggtttaattttccaaatgtttactcccatttcacaagttatgttaaaatgaatataaaatttctaaactctctttgcattacagcattacaggttttctattggggcttcatagaaaattaatgaatgacattttactgcattggtttataacttctcaaataagttactttctcattttagtaatgttttccaacaagtgggtccataactctagaatgcaatgtatgcttatataggtattatttcttaatgcctattgaatatttcatgtttgaaaatgctactctctcaatttttaatttcaattccaagattatcagatatattatttagttctctgtttttctcatctacattttttttttttttttgagacgtagtttcactcttgttgcccaggctggaatgcaatggtgtgatcttggctcaccgcaacctccacctcccaggtttaagtgattctcctgcctcagcctcccgagtagctgtgattataggcatgcaccaccatgcctggctaatttttttgtatttttagtagagacggtgtttctccttgttggtcaggctggtctccaactcccaacctcaggtgacctgcctgccttggcctcccaaagtgctgggattacaggtgtgagccatcgtgcccggccatctgtggtattttttaaaagagatggggtctcgctctgttgtccaggctggagtgcagtgcagtggctattcacaggcacaatcatagtgcactgcagcctggaactcctggcctcaagcgatcccccgacctcagcttcctgaatagctgggactacaggcacctgcccctctgtgcccagccccatttatggaattttttatgggctgaactgtgttctcccaaaattcatatgctgaatacccaaccaccgatgtaactgtatttggagaaagtccctataacgaggtaataaaggttaaacggggtcataagggtgcaaccttaatctgatagaactcctgtccttataagaaaatataccagagatctctctttctccccatgtgtgcacagaagaaaggttatgtgaaggcacagagggaaggtggccgtccacctgctagtgttacaggcagcgaatccaaacaggtctgcagcaacctcaattcttgcctcctcagaagagataatttgactgagaggcataaagcagagtgagagatggaggcaagttttagagcaggagtgaaaatttattaagaaagttttaggacaggaatgaaagtaaagtacacttggaagaggcccaagcgaacaacttgagagattcaagtgcgctgtttgacctttgacttggggttctatacgctggcatgcttctggggggttgcatcccttctcccctgaggcttcccttgggttgggctgtccgcatgctcagtggcctgccagcacttggaaggtgctgcatgcagagtgtgtttactggagttgtacacatgcttactagaggtgtttttcccttaccactccagagttcccagagggaggaacactgtataccagtgaatgccgccattttgccgcttagtgcacatgcttgagcccattcacccagctcctgagatcttatcgggaagctgttgattgcaccagtttcaggtcttttctatctattgggagactggctttccctggcgctggctgtgaccagttattattttagagagacagtgtgacaactgcccgacaatcacctgatggtcgtctgacattcctagtgtaggggggtcatgtctgcctgactacctactgtaacactaggatgagagccctcatgaaagacttaatttcacagtacctagatagtggatttccagcctctagaaccatgagaaaatacatttctgttgtttaagccacccagtctgttgagctttgtaatggcagtgtgagcaaaataatatagtagtgaatagaatgcttatgaagaaaaaattaaagtgatttattggattaacatctttcattgtatcatccagtggtgattgaatacagtgacttagtgccaaattaaaaatatgcagaaatgtttctaaaactttggctgaaatgccaaactttctgtgtagcatacaagcaccagcactatctgaacaatatgcttccatgaaatatttcttgctggtaccattcttttccaacattgacaatatagtttgtatattattttggatattattccttccaccttcataagatcaacaaagttttaaatgtctcatttaaaatacattattaaatgcttttatgtgaaaccatttcacagaaaatgaatgacattttactgtcttgatttataacatcttaagtaagttgctttctcatttcagtaatgttttccaacaagtgggaccataaatctaaaatgcaatgtatgcttgcatggatattattttttaatggctattgaatatttcatgtttgtttgaaaatgcttatgtttaagtacatgctgtatagcaacatttcaaaggttacttctataatattttaaattgttttatcaatattttgtccaatttacattttttctttcaaatgcattgttttctgaaattgatcttttgattgtttttgtcattgatatttacagttttaaaaattaaactgtgagctttgatagaatgtgattgccattctgaagaatatgtaagttgtctgggaagaataataatttttccttcaaccctcataagtccttacttggaagtgacccctgtaacaaaagacagatttataagagaaaaccaaatagaagtgtattaacatgtatatttcatatgtacatgggagacactgagggaatgaatagttctcaaagaggtggctttgaatttcagcctatatagagtcttcaacaaaaaccagtatatttttagagaagtaacaagaaaaaggaaaagggctttgaatctctagaggtggcaacttcgggaaaggcaaattaatggcagataaaggctggttagtaaagcttgttaatgtagcttccttgggtaccatcttgggcccgtaaaggtctacaaaccgaaaagtatctgagacaggtctcaataaatttagagtttatttagccaaggttaaggacatgtctgtggggaaaaaaagcaacacaaaaccacagaaacaatctgtgagctatgcttttttccaaagatgattttgagggcttcagtatttaaaggggaaaagcaggctggaggggaaagagggagggtgtaatcccattactgaatccacatgttgcaaaagaaaagaaggaggcaggcagaggaatagtccattatgtatttgtctttgcattcagtaaatcaacactttacatgagatgaacatagagtagctcctgtggagatacctggccttttatctgcagtttatctgcttaggaacaaggaaaggcagtttcttgcatgactcaatcagcttctgcttaatttttccctttggcatagtaaactggggacccaagattttagttttctttcacaggatcaatgctatcttcagtgattaacctttgttcttcctggtagaagatgggccaggataccttttgtctttgtagatctttgtcctgcttttaggcaaatagagggagggcagagagctttacctggatctgcttcttcttgatcaccttcagctcggcaatccctattttggggtggcatatgttggtctcccacaaagcttttaacagtgaactctgagtgccatttgcatctaatattt

SEQ ID NO: 97556 - DNA, 12585 bp, Homo sapiens
gagcctaattctgtttttgaaaatgctgcttgaataaaccctggtgaaaaaatttaggtttcacctaaagggcaaacactaaagttggaaggcagcaatagtttccatatggaaccgatggaaaacacaaacttctcttaacaagcacacttcagagaaacaatgaaaaacactgtagtataaaaaaatggtagtaaaagttaataataaatagataggtaaacacagacatattcttcaaccaaccaactttggggtttataatttagcaaaaactacctaaaaaataagagaaaaatactgacagagccatgccaccgaagctcatgcaaggtcccttgcaccaagccttggtgaactcttccagagccgtgtgtttacctggatcattgaccaagctcaggccccaccacatccatgagctgctcccgattaatcacctaggtcatcaccagttggcagtacacctaccaggccactcagaataggcatcacacggggcaaggactaggtgacactgactctggtatctcatcccagacaccctgttttcctattttggggcactcagctattttcaggatagacataccttccacatcagtggtcttaagtgaaagaggctatcaaatatctgctatagtatttcttccagttcctgttttcctccataaatagcaactcgaggtaaatagcttaaattttatattcttaaaaaagctattcaaactgcgacctggagcaactttaactgattatacctgagtgcaaaaataaggaaccatcctcccctcccccagactggaaaggaaaaaagtaagtcttcccagcaagttaaattctgaaactaacacagatcagagtggagctatacaaagtcacctggaagtttcaatcgtctctggccttaaacccataactggaacttaacagtcaccaatggacatacaggctatgcccactgaaagggggatggtcacaaatagcatttataggaatagaccctaggggccaataatgacagtacactccagagaagactatctggtatctgcacacttataaacacatacccctatatccaattctggaaatggacacattgggctgttggagctaggtgctgtcacacattggcatgatacaactacttcttgttctggttctgttcacactgagagacacctcgtaatttggctcctttcttagtctgcaaatagtagggagagagtgtgctggtccagttcacacaactgtctggcttgctgacagacaattctgagaataaattaacaaatcggtactccagctttaaacaaaagctctcatgagctttgctttcttttttttttttttttttttttgagacggagtctcgctctgtcgcccaggccggactgcggactgcagtggtgcaatctcggctcactgcaagctccgcttcccgggttcacgccattctcctgcctcagcctcctgagtagctgggactacaggcacccaccaccgcgcccggctaattttttgtatttttagtagagacggggtttcaccttgttagccaggatggtctcgatctcctgacctcatgatccacccgcctcggcctcccaaagtgctgggattacaggcgtgagccaccgcgcccggccgagctttgctttcttaaagggagtcactttgcccagtctcatccatttaagacatggagaatattgagtttctgaggaccaaagagaaggcagtggtaaattcctcaatggaaatggcaccttgaagcccacctgtgtaggcagccagcaggctctcctcttctgcatcatcacacttcccttccagtagcaacttcaactactgtcatttttcccctaaaagggtgaacactgagctgtcatgcacttgaaccaaatagaaatgatgcaaaccagcctttctgacacagtaattcagactcagcagattaaatgacaagcccaacatactgtatggtaaggaagtacttatggataagtatcataggataaaacataagaaataatgttcttttttactatatgtgtatgtgtgtggtttttgttttgttttttgtttgtttgttttgagaaggagtctcactttattgcccaggctggaatgcagtggcacaatctcagctcactgcaacctccacctcctgggttcaagcaattttcttgcctcagcctcctgagtagctgtgattacaggcacccaccaccacacccagctaatttttgtatttttagtagagacggggtttcaccatgttggccaggctggtctcaaactcctgacctcaggtgatctgcctgccttggcctcccaaagtgctgggattacaggtgtgaactaccacgcccggcctactttatattatagaccaaaggcacaggtataactcaaatactgaccaaacaatccctcaagttctgccccataaaaccttagcctctatgacagcaagtagaacaaaggtactgttgaactcaaatacttaagaataagtctttgaaaatgtgaagaacgtcagatgtcatttctttccattatatatttttgaggaagagagtgtaggggagaaaaggtatcttttcctcacccatggcaaagttcatggctgacacccctataacaaaaagattaacaagagaaaggcataacaaatttattcaaccaaagttttgcatgacacaagagccttcagaaatgaggatccagagacttaggaaacttgaatttttacgcttaagtacaatgaagaatggacagccacgtagaagcatgattgaacaaaaagggaatgaggcctaataattggggtgggggcccttagcaaggcctgcttgtccagattcttcttgtcctctgggtacagggcaggacctctctggaatgagagtcttataactcactgtcaggtgagataggtcagagaattccttgatgaccatgcttcaggggagaaaggcaaggggaggtcagagggacctcctttcttctgcagtttctcttatatgccaaggtgccatattggggggtatcctgtcctgagccccaacaaaaggaaagaccagcctctttgttactacaactaaaagttactacaactaaaactgaataatagaagtaaatttcctgtaacgttcattgaggagaaaaggtgaataggtaacattactctgagagggccaatggcctgaagtcacctaaatttctactatcattcaacatgtaagttttccaaatgtcacatattcttcttttaagccccccagaagttaaatagactatcaaaagcttacttttacttctggtatttctccttcagcacaccaagtctttggggacaggcacaacctctctacattatgtatttgaattctgcacagcatgttgtgttggcatataaaatataacaaaaaacaccctagacaaaatagtaagatgattccaaaacaagacaaaatctatttcagtctgtaatcacaatggcaatatcagaaccatgaccaccttgtctgagatcatagaagagtactagcagtaaaacgtttctcttctggagtgccatactgcctatttacacaatttcaagtcgaatctgagagctgagggcagggactatgtttattctttaacagatacaaacagaagccagaacacaggcttcgcacccaccctgttctcagtatttgttgacaggctgcaatgaatacagatgtaagatttcctccaaatcaagcaattaacaaacatttatagcagtttataattgacaaagaatattcctatatattcacacttgcaaggaatgcaagaaaattcagttaaatccatgtgacatcagacaatgagatattagggaggaaaatgctgcatttagcaatatctcttcatatccacatctgaattaaccttaaaacctcagtccagttaccccaaatacctaaacacacatactctgtgcacgctctaatgaaggggcttctcccatcaaactatccacctggcctcaaagcaaaattctctgaagatgctgcttttgtcaaaaataataaagccagagtagcaacatttacaagtgaaacactgtaaactaaggtacacttaattaagacatttttcttctttgcttcaaagaagcatcaaaaacatcctctgtgttagaagcttgaaaagttcttaaaacgtagttagtctgactcacgtaactaacagtcatgccttctgtataacacctttagaactgttcttcatattagcaacaagaaagtggtggtggtagcagggagtctgaagcagcctacaaaataaataatacagactaaagcaaataagaaaaaacaaagcgtaagagaccaaaaaaaaaaaacaacaacaacaaaaaaccacacacacacacacacacacacacacacacacacacacacacacaagaggtctgctagatggtacactggctgttatctagaaactcatggaaaaccctgtacacagaaatttcctgaaagcaagagccatgtctcatcactcctaggagatcctaggaggctgggaaaaaccagcccttgatgagtttttgacattccaagatttctctcacactttccctcactttagtagagaaatcctaggaattgacagagaccttgccaatatgactggaaacaactaacggaacttctccaggatccagatgcttcatccagaaaagtgtgtcagggtgcgggggatggctagaacaacccgtaaataattgtgataagtaaagaattggcctttggttcttcttttttttttatatatttggttttttttaagagagtcttactctgttgcccaggctggaatgcaatggcaccatgacagtgacagttcactgcagtcttgtcttctcaggctcaggctatcttcccatctcagcctccagagtagctgggactacaggcatgtaccaccaagcccagctgcttattttttcatagagatggaggtctcattaggttgcccaggctggtctctaaactcctgggctcaagtaattctcttacttcggcctcccaaagcacagggattataggcatgaagtacagcacctagtctggtttttcttaatttgcatagctggaaaatatgacattaaactataatttattctctaagacacatagatccagtcattcattctttattcaacaacccattctacaagctgaacctctattctactattctattctttatagttttgtcctaagcaaaaacacttcagatttaagtataagttattaaaaagcatagtaaatttacagtcacaagtaatatgaatttaaaagagttctgggcatgaaattggaaatcaaatgcttaagttctgatgcaccaaaattaagtggaaactattgtggtgaaatcaccttccacctatatttaaaatattctgtacattcatacaggttgtttcaggaagagtttctaccaaaacaaacaaacaaacaaacaaacaaaacaccttaccttagccagtatttcaagttactagaaaattagtattttgataagtacttggcagaaagaaaatttcacttttggaggagacgataaagaagttgcttccttctaagtacaagagccatcttcatatacctgtaaagggatttgttcaatccaaattctaacaccatttcttccataaagccttctcaggccacaatggtcaaaagatatgttttctctaattctacatcctgccttgttctaatatgatgatagatcaaaattatggtgaaaaatgttgaactccacaaatcccccatggcatctagcaatgtaccttacacacaacaaacactaaaaaaaagtctttaaatgagtggcagggttattatggaagggaaatcaaaatcaacggcaattctcttccaacaaggagtttggactaataatttaagaattctggtaccaagtactaattcccaactttatggtcaaaataatttggtgtatacatgaagaagtgcacatttaacayagtaagatctgttcaaataacaggctttcagaagcactggctgcaggtaggttttatttgggtatttcaaataggcacacagaagggataagtgcaaagacagtagccaaaaatctgaaatcaatacactctccttcaaaaaaaggaagggttcagaaagggcagcatttccagcaataatcatgatgtctcccaggccaatggctactgtgcaaggcagagctcagtcttgcagagagctcctgctcacttacaggcaggagttccctgtcttcatttccctgtcacctgagtgctccctagctgagacttacctccctaccacagcagcaaaacacggctaactagaagacaaaactccaatattgtcactagtactgtatatcatccaggtatttacatagatgtttagatatattagagaaagcaaaagaatttcataagcccacccacttcaaaacacaccacagaatcacctcatcttygaagccttcttcatcttattttaattgtttatacacctgcttccttcaccaggctttgggcctctgaatggtcagaccctgccttgctccccaccccagcaaagtatttgttttccaatttcaacatcaatgaatggttgtggagaaacataattttaatctataattttcaaagggaattattgtacctaaaaacagactgttatcctttaataactttaagtaaaattaatatccttctacaggctatgagcaatggagaaacttgccctggctctcctggaccagcaagtggcagaaattgggttacaacctaattttccaattaaggaatgagtgttgggttagcaattgcaggttttcattcgacatacatttgtacgttgctaccctgtgccaaacaacaagggacacaaaggcaagtacaactgacagaggaggaagacaacatgtggacaaacatgagcaggaagctaaaaacattcatgcctccattttgtctacaaggtaaaaacaaggtaagaggtgcagtgaaggttcaggatagccctgtagatgagaggaaggcaagtaagagattaaaaggacagctggctgggcatggtggctcacgcctgtaatcccagcactttgggaggatcgtttgagcccaggcctttgagaccagcctgggcaacagaaggagattctcagaaaaaccaaaaacaataaaacggacagctgaacagctctgatcatccaaactaggctgcagaccaggccataacacccgattatgaaactgctcctatcctcaaaggctcacaagtagcatcatcatatcgtgcaactcatctatggttctgggttagtggaatatttgcgggctggcacacaccatttgcctgctcctgtagttcacggatatgtcctatgaggagaaatggtacacatgccaggaaactcctatgattgaagccaatggctggatgtgatattcaagctagacctggactttcctaatctgcccaacttcatggacgggaagaacaaggtcacccagagcaatgccatcttgtgctacactgctggcaagcacatgtgtggtaagactgaaaagattcaagtggacattttagagaaccaagcaaccagtttctgcacacaactgatacagtgctgttacaactctgaccatgaaaaactgaaacctggccaggcgcagtggctcacgcctctaatcccagcactttgggaggcttctcttttctcgtggatcacaagttcaggggatcaagaccatcctggctaatacggcgaaaccccgtctctactaaaaatacaaaaagttagctgggcgtggtggcgggcgcctgtagtctcagctactcaggaggctgaggcaggagaatagcttgaacccgggaggcggaggttgcagtgagccgagatcgcaccattgcactccagcctgggcgacagagcaagactccatctcaaaaaaaaaaataaataaataaaataaataaaaaccaaccctgaaacctcagtacttggaacagctacctgaacaactgaaacaattctccatgttcctgggagaaattctcatggtttgcaggggaaagctcacctttgtggattttcccatctatgacgtcctggatcaaaagtgcatgtttgagcccaagtgcctggatgagttcccacatcttaaggctttcatgtgccgttgaggctttggagaaaattgctgcctacatgcagtctgactgcttcttgaagatgcctatcaacaacaagatggcccagtggggcaacaagcttttatgctgagctagaggcagacttgcactgctagttttgtttcatccgtccctagggggcctccacacttttttgttcttttaaataaacagcacttgggctaaaataaataaataaataaataaataagctatgctgtgcaattcccttctctgactctcagccccaagaaccatccagggatggtccagagaatgcaggatctgatcaatgatcaggagttcacagtgcaggggccagtacaggagtgctcagagtggtgtgctgtgaaatcaaggctggtcaggaagggaatgaagccctgagaggtaggatagccagagagaaaaagtatggtgtctcaaagagatcaaagaacaaacacagtcggaataaatgaatgaggaagttgaaagagtctggttctttttaaagaatttttaaaatttggatgtggaacaattccagacaatgataaagcccacaggattagtaaaggcaaatctgtgatgtgaacccaggcctgacttgaaagctcaggcactgaatagctgcctccaaagtcctcaatgaactgagggtagggggaatagggaggtgatcaggacagcacagaatacacgcctcaaagaaagggaggctttgcatgaggatgaaagtgtagcagttatggataccagcatcacctcagggacccagtagccatgcagctaaaaagctcctggagaaccacctagggtttgagtatgaaccacagtctgatcgtggtctcctcctctcacataactcagtagaaggcgtggctagggccatagagtctttctttgtgtaaggtttagggcaaccggaaacccaagtcccaatcctccttatgacagttagctccacaacaaccacactcagaattacattctcttttcctttctccttcctgttgtttcccacttgtgtcatacaacagagctacaatccccaacttacactgcccaccttcctgatgtgcaatcgcaactcccagaatacaggtagaggcattatgtatacaaagtgattctggacaagttgttatttcaccaagaatactgttccctttcctgctggactggataatttcaggtctcttccacctgtaggcattataatttttaagggggaaactttcttgttcctaagaccactgtaagcacagtacacaataaaccatcatcacagatgaaaaaggaacccctcagaggaggccactgtatgcgtgataagcttttactatgaaaagagaccttgaggacattttcaaaaagtgttaaaaggcactcaatcaatgccagctgaatgaaatttggtattataaacctaaggaaattaaaatttttaaattgcactggatctggcctcaaagtgaagggtcagacagcctcaaagatgcctgtgaaaggcagctattcatcacagaatgatctcttgcttatgtagctgacagatggatctttcacttaatgcccagaatataagacatcaaaaacgctcctccacttgctgaacaaggttataacctccccaggccctaatttcattaggattggagttctcaatacccacgcagggtgattagaatcacccaccaggtgattctaatgtgcagccagcaccccttatttaccactatccatatgcctggccctgttctaagcacttaccatgcatatactgattaaatcctcacaaccaccgtctgaggaaggtactgttaatctccattccacaaaggcacagacaagctagtgacttgcccagggtcacacaactcagtgtgcatccaggcagtcttgatccccagcctgaccatgcagtcagtctaccaggcctcctttcagttgaaaagaagagagaccagcccccagggagtggtgagagtcaaaggcaaagctgctcaacaggtggaaaagataaatcggctttggccaaacatacacacggctcacacacacttcactcctagagcagcatcccatgctgcaaatctatcctgaaaaaaacaaaaacacctgcctccactgagagacatctacagtacagtccctcgagttatcagttatttcaaactacagtgctgtccatgtgtgacctggaggcaccatgcaacagaacacatgccaaaatgagcaagctcttgagttcattagcccacagggggagaaccctgggaggtgggctacaatgccaatatggaggatttggggagacagacacctttgtgtcatacaaacaatgctgcccctattcctaacacttacccagaagttagcaactatggtattcatgaaaaacccggaaaactgcctcatttcttgtgaataaattgtataaagcttgttacacggtgacaggatgcagtgagaaatggcctgatgatctcaatgtctttctctgggcaattttatacagtctaataaatttagtgaggttttaaccttggatatcaagttctaaattaaaccaagatatgcctgcagtgatactgcagtggagagctgaatcaaattcatacaagccacacagcatcatctcttcccatagctaaagcaatgacatcagcatatgcatcactgcgctctcctctggaatttgtaaaggaaatcattcttggccataaacatttggttgcagtaagcagtctcacagaagcctgtgagaaagggcatatgggcaaggacaatagctttatttttttctcttttttttttttcccttaagctctgttggacttgaaggcttaattttttaattaactccaacagccccaaaaggggaataccagagctccagatgataaaagtcacagacaaggcatgctagaaaacaaaggccaaatatgttaagacttaaaaaaaaaaaaattcaggtttaatgttaacaaatctagtctcaaatgaggatgagaaagacacaagggtgccatatccaaggcatgaatctgtaaccttttaagttccatggatggcttcagcaatctgtaccctcagagtgtttttgaatgatttttaagtagacagtcttattacaaagaaaactaattatattgaaacacagatagcaaaatgttcaaaaagcaaacctgatacactaaagtatgcttaacacataaataagacacagcagcaggttttataactactgcagtttttaaagcagcgatgggcataaatgtattttaaactatttccacaatatgatacaaaaatcagttaatttccatgtgacaaagttacatgtcctgttgatcttacatggttggttgcccactttcatgattgaagcaatggctatattttggctagaggttagtgaaaatacagttgagtttttctccacccattcaagttcacagatcccttgtcttagtccattttgtacttttgtcacagaatatcatggagatggtaatttataaacaatagaagtttgtttataaacttctatttggctcacagttctggaagctgggaagtccaagatcgaggggcccacttctggggagtgccttcttaccgcatcatcccataaaattcagaaaattaaacagtaacttactgattggcacacattagcaggagcgagtatgtcacatacacgccactgctagcaattaaaggcaagtcccatgattcattttcagaatagtctgtaaaagccctatttatcaagaatgtccatcaccaccaaattactatctacaaaaaccaggcctggcatgacaggagacagactctagatatttactgtgacagacaatgtacaaaaacaaaatgccacatttcatatttgagacaggtgtttttaatacacgctgttggttgtattgttttcttggtgctctcctcactctttttgaaagtatttgtgctctggaaactgccgtgtttcagttaactggatcaggcttcctaatgaatgtggtacccaaggcttggcctctcccgcccccactgcctcatacagtcacaggccattccccagctgtatgccctaaatcaggggatgcccataggaagataaatataattcagagtccaaaatacacggacttaaactgagccattgccaatttctcatggatcctgggtaaccgagatggtttttgttttcatggttaggaacagctgcaagagcgcaatactctttctagactaataaaataacctaagtctggctcagtatttcagctgtggcagcagccaaatttcccagaatggtgcaagcctcgtgcag

SEQ ID NO: 97557 - DNA, 164851 bp, Homo sapiens
  misc_feature (1)...(164851): n = A,T,C or G
aaacctgactaaaacaagtaatggggaaaggatcccctatttaataaatggtgctgggagaactggctagccacatgcataaaattaaaactggaccccttccttacaccatatacaaaaatcaactgaagatagattaaagtcttaaatgtaaaacccacaactataaaacatctagaggaaaacctaggcaataccattcaggacataggcacaggcaagatttcatgacaaagacaacaaaagcaattgaaacaaaagcaaaaattgacagatgagatataatttaactaaagagcttctgcacagaaaaagaaactatcaacagagtaaacagacaacctacacaataggagaaaatttttgcaaactatccatctgacaaaggtccaatgtccagcatccatacggaactgaaacaaattaacaagaggaaaaccaaacaaccccattaaaaagtgggcaaaggacatgaacaggcacttctcaaaagaagacctatatgcagccaacaatcatatgaaaaaagctcaacatcacagatcattagagaaatgcaaatcaaaaccacatgagataccatctcacaccagtcagaatagctattacttaaaagtcaagaacaacagatgctggtgaggttgtggagaaaaaggaatgcttttatactgttgatgggagtgtaaattagttcaaccattttggaagacagtgtggcaattcctcaaagacctagaggcagaaataccatttgacccagcaatcccattactgggtatatactcaaaggaatataaatcattctattataaagatacatgcacgtgtatgtccattgcagcactacttacaatagcaaagacatggaatcaacctaaacgcccatcaatgatagactggataaaaaaaaatggttacatatacacaatggagtactatgcagccataaaaaggaatgagatcatgtcctttgtagggacatggatagacctggaagccattatccttagcaaactaacgcaggaacagaaaaccaaatactgtatgttctcacttataagtggtagctgaatgatgagaacacatggacacatggtggggggcagagaggaacaacacaaactagggcctgttggagggtgggaggaggaagagcatcagaaagaatagctgttggatgctggcttaacacctgggtgatgggatgatctatgcagcaaaccaccatggcacatagctacctatgtaacaaacctgcacatcctgtacatgtacccctgaacttaaaatcaaagttggaaataaaaataaataaatagccctgaggaacacaccacccacctgccacccccccatccccacacacacatatgctactcaatcactctgtacttcaacccattcaggaacttgttaggatgacttcagctttgttttgcttgggagtttgtcctttctgtcacttcaaatttcaaaatgatatggtcatttcagaagccaaaattgcagtgcccacaccacatggaaaatttgtaggccaacactttcaggattcaccacaatatgaacaacaagtcaacacaatggtggtttacaaggcaataaatttttccttcaagttttcgtggtaccattttcatattaacttctaagtttgaaaaattctcttaaccacctcctcccttttcctgttgaacaccaatttttaaattatctggtggtttaataaacttctcttatttttccacactctcttcaactgtgctagtatttttcaggctacttttctttctaaatgcagggggcagggagaaaaaaaccaaaaactggacttgaattggaaatttgggattggcctcaactctgtcatttattagccatgtgacctgtggctggtcctgtgatgactctgagcctagtgggctcatctataaaacaatgttataaatacctacacaagtggaggattcaaaaatatggtacaaagcttgtgaagaagctttgtaagtgccaggaggctacacataggtaatttttattcagaggcatctttgtgacataaaatatctggcaaaagaatgcattggctttcttcttctcccactaggaagaaagagcactgtctcaggtatcagcactcactgctgtaattacaaatgtcttcccactctgaactccagaaaactctcctcacatttcagaactatcccaggcctgctctcaagaaggtaactctactcctactattttgtagcccatagtctactgataacatatccatatgccttcatattctctaatgtctctgccctttgccttatcctcaaggctctacctcccttgccagcctttccgaaggaagtttgattgctccttctcacacttcccatgacttggggatgggattagaatgactaggaggagatggaatagtccctactttcttctatagcttttaggttcctgccccaacatcaacatgctataatgttcctagtttgtgtgtgtgtggggggagggttgttttgttttgttttgtcgagacagggtcttgctctgtcacccaaactggggcacagtggtgtgatcacgggtcactgcagccttgacctcccaggctcaagtgatcctcccatcttagcttcctgagtagccgggaccacaggtgcataccaacatgcccagctaattttgtaatttttttgtagagatggggtctcattatatcacccaagttggtctcaaactcctgggttcaagagatcctcctgtcttggcctcccaaagtaatgggattataggcatgagcactgagcctggctctgttcccaggttttaagacttttgtcatatacttacacatctctcctttcccatttattgttgttccattttgagacacattgccaggtgttttaagacactaggcatccactgccatccttcttttcaaagacatcatcctccaaggcactgacaaccctactgatgccccttctgacaccacagttcacagatccttgtccttcagtgcactaaaaactcatctctttggtacttcccctctaaggaagcattacaatatacttgaccatttcatgtgactaagatctcacaccgtgagatccctctaatagactacaacctcctgaacttcccaagctttcaaatcctaattcctgctgcatctccttcctcatgctggcatccacttcctggatccctccctacttttctagtggattgccaactgtggtccaatgaatagtgaccctcccaaaggtttccacgtcttaatccttagaacctgtgaatatgttaccttacatggcaaaagggatttgcagatgttattaagtttaggatcttgagatgaggtgattttccaggagcccaaagtaatcgcaaggattcttataagagggaggcaggaggatcaaagtcacacaaggtgatatgaggatggaagcaaagactggagtatgcagctgtgaaccaaagaaagtcagcagcctttaaagctgggaaaagcaagaaagattcaccctggggaagtaggggagacctagcactgacaccttgatttcaacccagtgaaactcatgttggatttctggccttcagaactcttaagatagtaagtgctgtataagccatcaagtaggtggtaatttgttacagcagccataggaaactaatatacaaccatagctgagtggcctcttgactcagttctgaaagagccaatggtcaataatttgtttttcccttcaccctagaattcctcttgccaattcccaactgacttctattacaattatggaacttttcattcctacacatctgtttttgagtgatgttagagcagaccttaaactaattaggatcatttataaattactgaattatataaatctttttccttgaagatttctcaccagtggctcagtagtagatgctgaaaatatttctactctgtctgggttaccaaatccacctccacccacttcagtcttcaatgaacccaccttctctgacaaaactgagataatctacaacctttcaacttttcttctatctatttttagaactgtttttaaaaatataatttattttttctttttaattgatatataatagttgtacatgtttttagggtacacatgatattttgatagatgtacacaaaatagttagaagagaagattggaatgttcccaacacaaagaaaagataaatgtttgaggtatagatattccaattaccctgatttgatcattacacattgtatacatgtatcaaaatatcacatatacctcttctgcttttaactgcctcttttcttccctcttgtctcaaattcagtgccctttttccttctcagctctatgtacgtcctttccatatcccctagatcccatgccattctgcatcttcctgggtctcacaccatctattagcttcaatcactggggtgcataagaaggagtcttgtgcactgggagctccactcccaggttcagggaagcactacctaagccatccaagataaaaatcattctcatgttgtttcctaagatccccaaagctagatccatagcttgtttctttttaccatattttcttgccttaaatataaagactttctcaagttgaagagagcattctattgttctgccgtttggagacacacaggaaaaataatagacacaatgacattaataggaattctctaagatcatgtggattgcagatattctataccactgtctccataaatataaaatgacccatttgttttgttttgttttgttttgttttggaaattagagtcactcttcccatgatacttaaagaactgtgccttttgggtaatagacactcactaaatattattgaattaaatattcaaaatagctcattgaaatggacatttttcatgagctgcatcatcatgggcattggactcttaacccaaacagctagatttgccttcaggtaagaatctctccatctctgtccccataaatttgttacaaaataatatattcatcagtgtataacctttaccatgtggcttcccactgtgaaaacagaattaggtgctttttactgctgacactaatatatgcttgttataggcttcaaaaatgtcatgtaatagttccaaaaattttcgctggcaattgaagcccatggataaagagaaagaagcataaaagggaacagttgtgtatatatatatgtgtgtctatatatatatacataataactgacattatgttgatgttaaagatgtcaacatttttggggaaaaatattgcttattttaaaatgtctaacattattctagccaaataaataaagaatcaagctcttgcagaaatataatccttttgaaaaaggtatagattttttcgtatagctattttctttttgcttaaattaattgcatttgtatgtaaagcacacagacctatatttaaaaagtgtattatatatactaaccttctcaaaatttatattttcaatctgtgaatttacatatatatgaaatatataaaccatttcaatgatagtaccagaatacattttaaatcccaatttatgaaaatatcttaaagaaattatgaagacatttaaataagaaaagcaatatggagtactgagaagaaagtacatgtttgagctaatccaacctggatttgaaccgttatcactcactatgtattatttaataagttcaatcccattaataccaaaaatgacatataataatattgtaattctcatcttcctcgatgttatggagcttaaatgagtcacagcctttccaaaaacatggatttcttttcttccttctgtttaagaactgtatctaattttacccccaagcgtgcccaacacaatgctttaaataaagtagatattcaataaatgtttactaagtcaatcaatgtcttgcaaatcacttggcaatgcacattatctattttcctccacactgagaaaaaaccttcatagataaatcaagttaatcatttcccttaacctaagaactacacctcaatttctttcagagaaccttacattttgagtctctatgagtttcttgtaaattatgtcttctatggggctcggcaatcaagtggctaaaaagaaaagagatgccaaaatttaaggaaaaggaaaacacatgattttagccatggtattgcttcagaaggttttatacacttgacctttgataaacatgttttttctcccaacagctattcctgattttactccaaggtggctttcccaagaccagaaccagctcatgaaaaaagagcccaatcaggaaagggtggttagactctaatcaccctgggcagtccctgcctcttctccttggtgctcctcattcccctgcaggtaccaaccagtcctttagcatccttacggggcccctctctaggatttggggagtgagtgaaagagttggcacatcccagtttacggagggcagaccatgtgcaggggcttcacaaacatcatcaactttcacccttccagcattcctgctgggagaccctccttcattttcagaagagagtcatttggggttcaaccagtttcaataaatcatttgcccacgtcacagaaaaaggaaggattagacctagttttctttttcttaagatacatcatatatcatacaacttgcccttttaaactatacagttcagtggtttttggtacattcatgatgttgtgcaactatcaccactgtctaatttaagaacatttttatccctctaaaagtaaaccccataccttttagcagttactccttacaacaccccaccctcagtcttaggcaaccactactttctgtctgtatggatttacctattctgtactttttatataaatggaatttcatattgtttttgtaaaagaaaggagtaaactaggatatattttatatatgtataaagaacctacagaaagatattttagtccgtttgggctgctaaaaccaaataccttagactgggtaatttataaataatagaaatttatttctcacaattctgaaggttgggaagtctaagatcaaggcactggctgattggtgtctggtgaaggcctgcttactggttcatagacagggccttctcgctctgtcctcatatggtgaaaggggtgagggagctccctggggtctcttttataagagcaccaatcccattcatgaggctccgccctcatgacctaatcacttctcaaagtccccaccttcaaataccatcacattggtattaagtttaaatatatgaattttggaggtacacaaatgttcagtttatagcaatgatggaaggggaaactgaagagattccaagggtaagaggggctcaacccaccactgtcggcaggggccaggggaaagcaagagaaagaatgtaggcagctgctgggagcagagtggtctgactgacagccagcaaggaaacggggacctcaagcctacaaccgcaaggaattgaattggctaacaacgccaaagaacttggaagtggatttttctcagagtctcctgaggagagcctagttggctgacacattgatttcagccttgtgagcccctgagcagagaaatcagccaagccaactcgacttctgacttacagagcagtgagattttgtgttgttttaagttgctatatttgtggtaatatgttgcagcagcaataggaaactaatacgcacctagctgtattatttgtcttcttattataaataaagattgaaagctagtggaaaaccaaacagactatgctaacataattgagagtaaggctagtttcctagtgacataacttatccagtcaaaaggtcatgatagtttttaaattttgttttgcgcacctacgcttgataattttagtctgaaaattgtaattttgacaaaaatctccagggaagcaaatctttctagtaaaacttgaatggcaggcttattaacccaatgttctctgtctcctaaatctagagccttcccttaatactaaaattccaggatataaacatggtttctttcattcttaagaagttgattaacaacatgccccggtgtgtgatgttccccttcctgtgtccatgtgttctcattgttcaattcccacctatgagtgagaacatgcggtgtttggttttgttgtggggtggggggaggggggagggatagcattgggagatatacctaatgttaaatgacgagttaatgggtgcagcacaccaacatggcacatgtatgcatatgtgactagcctgcacattatgcacatgtaccctaaaacttaaagtacaataataaaaaaaagaagttggttacaactgataaaaattaaattgatagactctaaagagacagacacttggcttaaaggagaatgtttgccttgtctatttgaaatgtctaaaggttaactctgcactttatctaacctttaaccatacagtttttccttttggtattgggtatgttccagagcttttctaaaggagtttaatgttattacatggggaaaatggtcaaataagtggtctttaatacagaattaagatgaaagttctaagaacaccatttctcttattatcatttagctctatatggctaagtactttgtgtgaaaacaaaaacagttcaaaattgactacattctatgagaaaaagcagaaatatttttcctacctaatttgttggaaaagcttaattaatttattttattttattttattattattatactttaagttttagggtacatgtgcacaatgtacaggttagttacatatgtatacatgtgccatgctggtgtgctgcacccattaacttgtcatttagcattaggtatatctcctaaagctatccctcccctctccccccaccccacaacagtccccagagtgtgatgttccccttcctgtgtccatgtgttctcattgttcaattcccacctatgagtgagaatatgcggtgtttggttttttgttcttgcgatagtttactgagaatgatgatttccaatttcatccatgtccctacaaaggacatgaactcattgttttttatggctgcgtagtattccatggtgcatatgggccacattttcttaatccagtctatcattgttggacatttgggttggttccaagtccttgctattgggaatagtgccgcaataaacatacgtgtgcatgtgtctttatagcagcatgatttatagtcctttgggtatatacccagtaatgggagggctgggtcaaatggtatttctagttctagatccctgaggaatcgccacactgacttccacaatggttgaactagtttacagtcccaccaacagtgtaagtgttcctatttctccacatcctctccagcacctgttgtttcctgacttttgaatgatcgccattgtaactggtgtgagatggtatctcattgtggttttgatttgcatttctctgatggccagtgatggtgagcattttttcatgtgttttttggctgcataaatgtcttcttttgagaagtgtctgttcatgtccttcgcccactttttgatggggttgtttgtttttttcttgtaaatttgttggagttcattgtagattctggatattagccctttgtcagatgagtaggttgcgaaaattttctcccattttgtaggttgcctgttcactctgatggtagtttcttttgctgtgcagaagctctttagtttaattagatcccatttgtcaattttgtcttttgttgccattgcttttggtgttttagacatgaagtccttgcccatgcctatgtcctgaatggtaatgcctaggttttcttctagcgtttttatggttttaggtctaacgtttaagtctttaatccagcttgaattaatttttgtataaggtgtaaggaagggatccagtttcagctttccacatatggctagccagttttcccagcaccatttattaaatggggaatcctttccccatttcatgtttttctcaggtttgtcaaagatcagatagttgtagatatgcggtgttatttctgagggctctgttctgttccattgatctatatttctgttttggtaccagtaccatgctgttttggttactgtagccttgtagtatagtttgaagtcaggtagcgtgatgcctccagctttgttcttttggcttaggattgacttggccatgcgggctcttttttggttctatatgaactttaaagtagttttttttttccaattctgtgaagaaagtcattggtagcttgatggtgatggcattgaatctataaattaccttgggcagtatggccattttcatgatactgattcttcctacccatgagcatggaatgttcttccatttgtttgtatcctcttttatttcattgagcagtggtttgtagttctccttgaagaggtccttcatgtcccttgtaagttggattcctaggtattttattttctttgaagcaattgtgaatgggagttcactcatgatttggctgtttgtctgttattggtgtataagaatgcttctgatttttgtacattgattttgtatcctgagactttgctgaagttgcttatcagcttaaggggattttgggctgagacaatggggttttctagatatataatcatgtcatctgcaaacagggacaattttgtttcctcttttcctaactgaataccctttatttccttctcctgcctaattgccgtggccagaacttccaacactatgttgaataggagtggtgagagagggcatccctgtcttgtgccagttttcagagggaatgcttccagtttttgcccattcagtatgatattggctgtgggtttgtcatagatagctcttattattttgagatatgtcccatcaatacctaatttattgagagtttttagcatgaagggttgttgaattttgtcaaaggccttttctgcatctattgagataatcatgtggtttttgtcgttggttctgtttatatgctggattacatttattgatttgcgtatattgaaccagccttgcatcccagggatgaagcccacttgaccatggagaaaaactctacgaattaatctagctgttgggtaaaatctacttatttttaacatcatctctcctcttctaagacctgtatccacctcttgctacccactgctgtcaatatttatttcagtagttctcaaccaggggagattttgcctcctagggcacatttggcaatgactggaggtgtttttgactgtcacaactgggggtgtgctagtcaatctagtgcgtagaggccaggggtgctgctgaacttcatacaacgcacaggacagccccttctacagataattgtccagcttccaaatgacaatagtgccaagtttgaaaaattctggtttagatggatctagagaggtgggtcagtaatgaataaagatatggagttctccatttaggacaattaatgaaagccatgttagtacaggattgttgtgagagagggagagggatagggagagaaagaggtttgacaaatgtctatattaaactatattaaagtaacagaaagagagaccaaaaagtagaggcaaaaaccaagtgatcagagaaataggaagataaggataacagagtgtcacaaaaataaggagggagacaattctaaggaagacttggtcagcaaggttgaatgctatggagcaggagtgttgaatgagcacgaaggaaacaccatgactttcatactaggatattatgggtgacctccaaaatataagctttaagtgaacagtgaattttggagaagagttcaaggcttgaaggaatcggaacagatgcttttttttttttaatttctgtttatttttgtttgttctattgcctttttaagacagaaaaagatggagaatgtggttatgctgacaaaaccaccaccaggcaggataaaaaatatcattgtgctaaaaattatcctctgaaataattagcatttcaataaaaattttaatttttttcacaatttcaagcaatcacaacatttaaagaggcatatatcatatatgacatttaaagggagatatgaactatcttgtgaaaaacgagacataatttaatacaaagaagatactcttcttccctccttgttcttcttatacctagttgtaaagtccagtttatgcaacatacaacaaatgaaagttaattggatctaaacaattagtcaactggggtgaagggactgcaaagaggagagcattggttataatgctctcggcatgatgaccaccagttggtaaaccaatttggtttctgcacttttcagctgattttttctgaatagtatagagaggttaactctgattttcccatttgaaaccaaaatggatttgacatcaaaactatttctttaagtaagccataaaaataatctgttcaactgtctgcctccttcatgctgggctgctggttgccatgctggactgcgaactgtcatgccaggcttgaaaagccattacttcacataaaacccaggcccgcccccatggtcccacatagctcttgatgggcatgctctgtggctccttggatcaggcctgagagctggaaagtcgctatggagcagcagacagagtcaatcaaacgagaacttcctttgggcaagtgcaactacaggaaacaataatagacttcagatttctgggagggattcttcttatccagtctcttaaaaacagaaagcttttctcagacccttaagtgaatttagttccagctttctttcagctttgggttggagagaatgtagctgagtaataactaacaagtataatgcattcactctcttcaaagcctctgccataccattttaggggtagaactgaagcccaaagccatgtgcatttcagcccctgtgagttggttagctccctgtgtcacagtgtctcatcctaagtcagtttatatgaagggttgtggatagaacatcatattctttgtataactactggaaaataaagacgccctctttctgatgtgagtcctatagcgtcttgcatgaaaaagagaacattatattattcttggtgatcagaatagatgctatctagaagatactcacctatacaattcgatttccaattcattagtacgtgagctggctaccctgccatgttcccccactggttctgcaagtccacaaccctcagtctgtccatccccctcttccccttccatgactttggcatgacacacacttatgtctctctaactcctcccctactaccaccttgcccaacacttcagagcagcaccccaggatcttggcatttaagttgtgaaaagtcaccaggcttaactgtatcaatggccctactgaatgctcatacaaataaattatggtttagtgtaaaaaaccccactgcctttgtaaatgctgcagtaacactcattacatcagaacagagccaaagaaagaagcttagatttaatctgttttaatctcagttatttcctaatataaaagactgtgggcattttcacattctttggaaggattagcgaaggccaacatgaataacaaattgacatttctgaagttctggaagagccaaaagcaatataaaaggaaggcagacagatcaaatttctgaacagaattatttttcttagcagagtttaaaagttaacattaggaacaaatgttaaacagctctgcacagttatttatctttacctggaacacattttgccaaacagtttaactgacaatttagaaagacatatcttcatgttatagagacaaagaaacttcttctatgtgacaggcataataagagtttttttagagtaatctgtataacaatttttacattcctctagtcattttattgtctgaaatattccagaactaatgctgccattttttttttagtgaagagtatgttggttcccatgaaatcgttgaatatttgtgttaaaagagatttaaagaaaagtaatctacttcagcttttcatttcataaatgaggaaagtcaggctaagaaagagtacccaagcaaccagtgtcataaaatcacagatctatgacagttcaggcctaggatcctggttttctgatgactcatccaatgatcttttcatttatctttgtccttttcctcaagaagattatattttatcattatatagtattaacttgctccattataaccacattccaatttgctttgatgtatcttaaatcaaaatagcaaaaacaaattgactcttgtggctctacttgtcttaatgccccacaaagtcactgagaaatgctgtgagggttgggtccatcccagcccttggatatagatattttcacatgtaacagaattgtgaaatgaaaagatttctaagatattagttctacgataggattctaaatcctaacacattctgccttccctcttagtcctagacatagggtttagtccaaaccagggtttctcaaccttaccactattgacttttagggtcagataatttttgtaggtgagtatcaacctgtgccttgcaaggtgcttagcagcatccctggcttctacctactagatgccagtagcaccccacccctaaattgtgacaaccaaaaatgtctccagaaattgccagaagtctcctggggtgggggtacaaaatcacctcaaattgaggatcattggtctaaaccctttagcacttacataaaccttgacacaaaataggagcaaagcagagatgaaaagtgggatacaaaggaacttactggcatctttgactatgaaccttccttgactctaaagccaattaaatgttttggtggaaaaaaaggaaagttgttttaatcaaccatatgcctttcctcactcccaccacacttttgccttaaagtttgtttttgttgccatgaaaacagagcctgcctgtttgtaattataatattattctgcagcaaatttcagaaagcgccaattggtacacttccaacctcaaattctctccctcttcatctcccttccctagacaggagtttagagagggggaaggaatgagagaagaatgcctggtatcctcagctctgacctcctaatgcctgcactcagcataaacctctcaggtctccaggacctggcaatcaaaccttccaacacggccttgtctctgactgaacttcatttgttcagcattttcacccaaaaccacagaactttgataagagttagtcaggactcaatgatggtgaagaaagggaagggagaggtaagacaagtagacccatgagaatcaatttgttcttgctattttgagtgcagatacatcgaagtaaattggaatgtggttacactggagcaagttaatactatacaatgataaatacccattcttttttttttaattatactttaagttttagggtacatgtgcacattgtgcaggttagttacatatgtatacatgtgccatgctggtgtgctgcacccactaactcgtcatctagcattaggtatatctcccgatgctatccctcccccctccccccaccccacaacagtccccagagtgtgatattccccttcctgtgtccatgtgatctcattgttcagttcccacctatgagtgagaatatgcggtgtttggttttttgttcttgcgatagtttactgagaatgatgattttcaatttcatccatgtccctacaaaggacatgaactcgtcattttttatggctgcatagtattccatggtgtatatgtgccnnnnnnnnnnnnnnnnnnnnnnnnnnnnnnnnnnnnnnnnnnnnnnnnnnnnnnnnnnnnnnnnnnnnnnnnnnnnnnnnnnnnnnnnnnnnnnnnnnnnnnnnnnnnnnnnnnnnnnnnnnnnnnnnnnnnnnnnnnnnnnnnnnnnnnnnnnnnnnnnnnnnnnnnnnnnnnnnnnnnnnnnnnnnnnnnnnnnnnnnnnnnnnnnnnnnnnnnnnnnnnnnnnnnnnnnnnnnnnnnnnnnnnnnnnnnnnnnnnnnnnnnnnnnnnnnnnnnnnnnnnnnnnnnnnnnnnnnnnnnnnnnnnnnnnnnnnnnnnnnnnnnnnnnnnnnnnnnnnnnnnnnnnnnnnnnnnnnnnnnnnnnnnnnnnnnnnnnnnnnnnnnnnnnnnnnnnnnnnnnnnnnnnnnnnnnnnnnnnnnnnnnnnnnnnnnnnnnnnnnnnnnnnnnnnnnnnnnnnnnnnnnnnnnnnnnnnnnnnnnnnnnnnnnnnnnnnnnnnnnnnnnnnnnnnnnnnnnnnnnnnnnnnnnnnnnnnnnnnnnnnnnnnnnnnnnnnnnnnnnnnnnnnnnnnnnnnnnnnnnnnnnnnnnnnnnnnnnnnnnnnnnnnnnnnnnnnnnnnnnnnnnnnnnnnnnnnnnnnnnnnnnnnnnnnnnnnnnnnnnnnnnnnnnnnnnnnnnnnnnnnnnnnnnnnnnnnnnnnnnnnnnnnnnnnnnnnnnnnnnnnnnnnnnnnnnnnnnnnnnnnnnnnnnnnnnnnnnnnnnnnnnnnnnnnnnnnnnnnnnnnnnnnnnnnnnnnnnnnnnnnnnnnnnnnnnnnnnnnnnnnnnnnnnnnnnnnnnnnnnnnnnnnnnnnnnnnnnnnnnnnnnnnnnnnnnnnnnnnnnnnnnnnnnnnnnnnnnnnnnnnnnnnnnnnnnnnnnnnnnnnnnnnnnnnnnnnnnnnnnnnnnnnnnnnnnnnnnnnnnnnnnnnnnnnnnnnnnnnnnnnnnnnnnnnnnnnnnnnnnnnnnnnnnnnnnnnnnnnnnnnnnnnnnnnnnnnnnnnnnnnnnnnnnnnnnnnnnnnnnnnnnnnnnnnnnnnnnnnnnnnnnnnnnnnnnnnnnnnnnnnnnnnnnnnnnnnnnnnnnnnnnnnnnnnnnnnnnnnnnnnnnnnnnnnnnnnnnnnnnnnnnnnnnnnnnnnnnnnnnnnnnnnnnnnnnnnnnnnnnnnnnnnnnnnnnnnnnnnnnnnnnnnnnnnnnnnnnnnnnnnnnnnnnnnnnnnnnnnnnnnnnnnnnnnnnnnnnnnnnnnnnnnnnnnnnnnnnnnnnnnnnnnnnnnnnnnnnnnnnnnnnnnnnnnnnnnnnnnnnnnnnnnnnnnnnnnnnnnnnnnnnnnnnnnnnnnnnnnnnnnnnnnnnnnnnnnnnnnnnnnnnnnnnnnnnnnnnnnnnnnnnnnnnnnnnnnnnnnnnnnnnnnnnnnnnnnnnnnnnnnnnnnnnnnnnnnnnnnnnnnnnnnnnnnnnnnnnnnnnnnnnnnnnnnnnnnnnnnnnnnnnnnnnnnnnnnnnnnnnnnnnnnnnnnnnnnnnnnnnnnnnnnnnnnnnnnnnnnnnnnnnnnnnnnnnnnnnnnnnnnnnnnnnnnnnnnnnnnnnnnnnnnnnnnnnnnnnnnnnnnnnnnnnnnnnnnnnnnnnnnnnnnnnnnnnnnnnnnnnnnnnnnnnnnnnnnnnnnnnnnnnnnnnnnnnnnnnnnnnnnnnnnnnnnnnnnnnnnnnnnnnnnnnnnnnnnnnnnnnnnnnnnnnnnnnnnnnnnnnnnnnnnnnnnnnnnnnnnnnnnnnnnnnnnnnnnnnnnnnnnnnnnnnnnnnnnnnnnnnnnnnnnnnnnnnnnnnnnnnnnnnnnnnnnnnnnnnnnnnnnnnnnnnnnnnnnnnnnnnnnnnnnnnnnnnnnnnnnnnnnnnnnnnnnnnnnnnnnnnnnnnnnnnnnnnnnnnnnnnnnnnnnnnnnnnnnnnnnnnnnnnnnnnnnnnnnnnnnnnnnnnnnnnnnnnnnnnnnnnnnnnnnnnnnnnnnnnnnnnnnnnnnnnnnnnnnnnnnnnnnnnnnnnnnnnnnnnnnnnnnnnnnnnnnnnnnnnnnnnnnnnnnnnnnnnnnnnnnnnnnnnnnnnnnnnnnnnnnnnnnnnnnnnnnnnnnnnnnnnnnnnnnnnnnnnnnnnnnnnnnnnnnnnnnnnnnnnnnnnnnnnnnnnnnnnnnnnnnnnnnnnnnnnnnnnnnnnnnnnnnnnnnnnnnnnnnnnnnnnnnnnnnnnnnnnnnnnnnnnnnnnnnnnnnnnnnnnnnnnnnnnnnnnnnnnnnnnnnnnnnnnnnnnnnnnnnnnnnnnnnnnnnnnnnnnnnnnnnnnnnnnnnnnnnnnnnnnnnnnnnnnnnnnnnnnnnnnnnnnnnnnnnnnnnnnnnnnnnnnnnnnnnnnnnnnnnnnnnnnnnnnnnnnnnnnnnnnnnnnnnnnnnnnnnnnnnnnnnnnnnnnnnnnnnnnnnnnnnnnnnnnnnnnnnnnnnnnnnnnnnnnnnnnnnnnnnnnnnnnnnnnnnnnnnnnnnnnnnnnnnnnnnnnnnnnnnnnnnnnnnnnnnnnnnnnnnnnnnnnnnnnnnnnnnnnnnnnnnnnnnnnnnnnnnnnnnnnnnnnnnnnnnnnnnnnnnnnnnnnnnnnnnnnnnnnnnnnnnnnnnnnnnnnnnnnnnnnnnnnnnnnnnnnnnnnnnnnnnnnnnnnnnnnnnnnnnnnnnnnnnnnnnnnnnnnnnnnnnnnnnnnnnnnnnnnnnnnnnnnnnnnnnnnnnnnnnnnnnnnnnnnnnnnnnnnnnnnnnnnnnnnnnnnnnnnnnnnnnnnnnnnnnnnnnnnnnnnnnnnnnnnnnnnnnnnnnnnnnnnnnnnnnnnnnnnnnnnnnnnnnnnnnnnnnnnnnnnnnnnnnnnnnnnnnnnnnnnnnnnnnnnnnnnnnnnnnnnnnnnnnnnnnnnnnnnnnnnnnnnnnnnnnnnnnnnnnnnnnnnnnnnnnnnnnnnnnnnnnnnnnnnnnnnnnnnnnnnnnnnnnnnnnnnnnnnnnnnnnnnnnnnnnnnnnnnnnnnnnnnnnnnnnnnnnnnnnnnnnnnnnnnnnnnnnnnnnnnnnnnnnnnnnnnnnnnnnnnnnnnnnnnnnnnnnnnnnnnnnnnnnnnnnnnnnnnnnnnnnnnnnnnnnnnnnnnnnnnnnnnnnnnnnnnnnnnnnnnnnnnnnnnnnnnnnnnnnnnnnnnnnnnnnnnnnnnnnnnnnnnnnnnnnnnnnnnnnnnnnnnnnnnnnnnnnnnnnnnnnnnnnnnnnnnnnnnnnnnnnnnnnnnnnnnnnnnnnnnnnnnnnnnnnnnnnnnnnnnnnnnnnnnnnnnnnnnnnnnnnnnnnnnnnnnnnnnnnnnnnnnnnnnnnnnnnnnnnnnnnnnnnnnnnnnnnnnnnnnnnnnnnnnnnnnnnnnnnnnnnnnnnnnnnnnnnnnnnnnnnnnnnnnnnnnnnnnnnnnnnnnnnnnnnnnnnnnnnnnnnnnnnnnnnnnnnnnnnnnnnnnnnnnnnnnnnnnnnnnnnnnnnnnnnnnnnnnnnnnnnnnnnnnnnnnnnnnnnnnnnnnnnnnnnnnnnnnnnnnnnnnnnnnnnnnnnnnnnnnnnnnnnnnnnnnnnnnnnnnnnnnnnnnnnnnnnnnnnnnnnnnnnnnnnnnnnnnnnnnnnnnnnnnnnnnnnnnnnnnnnnnnnnnnnnnnnnnnnnnnnnnnnnnnnnnnnnnnnnnnnnnnnnnnnnnnnnnnnnnnnnnnnnnnnnnnnnnnnnnnnnnnnnnnnnnnnnnnnnnnnnnnnnnnnnnnnnnnnnnnnnnnnnnnnnnnnnnnnnnnnnnnnnnnnnnnnnnnnnnnnnnnnnnnnnnnnnnnnnnnnnnnnnnnnnnnnnnnnnnnnnnnnnnnnnnnnnnnnnnnnnnnnnnnnnnnnnnnnnnnnnnnnnnnnnnnnnnnnnnnnnnnnnnnnnnnnnnnnnnnnnnnnnnnnnnnnnnnnnnnnnnnnnnnnnnnnnnnnnnnnnnnnnnnnnnnnnnnnnnnnnnnnnnnnnnnnnnnnnnnnnnnnnnnnnnnnnnnnnnnnnnnnnnnnnnnnnnnnnnnnnnnnnnnnnnnnnnnnnnnnnnnnnnnnnnnnnnnnnnnnnnnnnnnnnnnnnnnnnnnnnnnnnnnnnnnnnnnnnnnnnnnnnnnnnnnnnnnnnnnnnnnnnnnnnnnnnnnnnnnnnnnnnnnnnnnnnnnnnnnnnnnnnnnnnnnnnnnnnnnnnnnnnnnnnnnnnnnnnnnnnnnnnnnnnnnnnnnnnnnnnnnnnnnnnnnnnnnnnnnnnnnnnnnnnnnnnnnnnnnnnnnnnnnnnnnnnnnnnnnnnnnnnnnnnnnnnnnnnnnnnnnnnnnnnnnnnnnnnnnnnnnnnnnnnnnnnnnnnnnnnnnnnnnnnnnnnnnnnnnnnnnnnnnnnnnnnnnnnnnnnnnnnnnnnnnnnnnnnnnnnnnnnnnnnnnnnnnnnnnnnnnnnnnnnnnnnnnnnnnnnnnnnnnnnnnnnnnnnnnnnnnnnnnnnnnnnnnnnnnnnnnnnnnnnnnnnnnnnnnnnnnnnnnnnnnnnnnnnnnnnnnnnnnnnnnnnnnnnnnnnnnnnnnnnnnnnnnnnnnnnnnnnnnnnnnnnnnnnnnnnnnnnnnnnnnnnnnnnnnnnnnnnnnnnnnnnnnnnnnnnnnnnnnnnnnnnnnnnnnnnnnnnnnnnnnnnnnnnnnnnnnnnnnnnnnnnnnnnnnnnnnnnnnnnnnnnnnnnnnnnnnnnnnnnnnnnnnnnnnnnnnnnnnnnnnnnnnnnnnnnnnnnnnnnnnnnnnnnnnnnnnnnnnnnnnnnnnnnnnnnnnnnnnnnnnnnnnnnnnnnnnnnnnnnnnnnnnnnnnnnnnnnnnnnnnnnnnnnnnnnnnnnnnnnnnnnnnnnnnnnnnnnnnnnnnnnnnnnnnnnnnnnnnnnnnnnnnnnnactcaatgatggtgaagaaagggaagggagaggtaagacaagtagacccatgagaatcaatttgttcttgctattttgagtgcagatacatcgaagtaaattggaatgtggttacactggagcaagttaatactatacaatgataaatacccattcttttttttttaattatactttaagttttagggtacatgtgcacattgtgcaggttagttacatatgtatacatgtgccatgctggtgtgctgcacccactaactcgtcatctagcattaggtatatctcccgatgctatccctcccccctccccccaccccacaacagtccccagagtgtgatattccccttcctgtgtccatgtgatctcattgttcagttcccacctatgagtgagaatatgcggtgtttggttttttgttcttgcgatagtttactgagaatgatgattttcaatttcatccatgtccctacaaaggacatgaactcrtcattttttatggctgcatagtattccatggtgtatatgtgccacattttcttaatccagtctatcattgttggacacttgggttggttccaagtctttgctattgtgaataatgccttttttcaatttttatttttgtttttattttaagttccggggtacatgtgcaggatatgcaggtttgttacataggtaaatgtgtgccatggtagtttgctgcacctatcaacccatcacctagtataaatacccattcttaatgaaaatgagttatagtattattttattcatagcctgtgttacttctctgaatatgtcagtaataaacatgttgtagaaatttaatagaaatatctaatagatgtcgttataaacatgctgtagaaatttaatagaaatatataatagatgtggttcttacataatttcttctctggccttttacagcttgagatataatttacacacaataaattgttcaaatctaaactgtaaagctctataaatttttgcatatgtatatattcatggaactgcttcccagatgaagatatagaacattttcattatagaaagcttctcctgtttccatctagttagtatccacccttacctcccgggcaagcaatattgtgatttctaccaatgaaagaatagctttgtctgtttttttatcccataaattaaattgtacagtatgtactctttgtgccttttgaggcacatgttgaagaacatgagaaacatgttgagtttctaaggttcattcattcagttttatgtgccaatggtttgttcttttttgttgctatgtagtattcctccatccaaataaaacacagactcctgttgatggatatttgtgcctgtgtatatgtatgtgtctatatggactattatgaataaaaatgcaaagaaaatggggtgtactagtctttgtgtggatatatgcacttgtttatcttgggtatataactcagaataaaattctaatactaaaaatggaaaatattaatmatcaaattgaattttttatattgctataaagacttgaaggacacaataatcttctcccatttattttacacaaagggaaaatagataaaccttttaaataattaatcaggaaaatatattaaggcagatgaagacatagaacacctgacagtaaggtgaatatagaatttttcatgaaactgggagactttctgagtgaaaggggcatgatcaatatttatatagggactgtttaacctggactttgctgaaaatactggatcttatggccattcacgctaattgtgactgagaagatggaaactaggccagacatctaatgccaacttcagaattaaccccctttttgaccttggtcaacttgtttaaacctttgtcctttaatcatggcattggtcagaatattctccgctgaaattttataaagactccatgaatggcaagtcataaatcataaacctcaaagccaataaagctgtcctgcaaggattgagagctggaatgcagacttccagggttgagatgtatgctttcaagagcctggttgcacctgcttctaaagtgccactcaattaatttatgaggttctctcttctctttcatttacttttccagttgtgacttaaaataagtttcagctagccacatatactctatgttatttcactgaaaagatgtgaactgcaaattacatcagtgattgagacacatttggcaatatctttcttcctcatgcttcagtcaactagacttactgtgtgatgagaatcccagaggcccagggcgacagcccctgaaattttcttttttttttcttttattattatactttaagttttagggtacatgtgcacattgtgcaggttagttacataagtatacatgtgccatgctggtgtgctgcacccactaactcgtcatctagcattaggtatatctcccaatgctatccctcccccctccccccaccccacaacagtccccagagtgtgatgttccccttcctgtgtccatgtgatctcattgttcaattcccacctatgaatgagaatatgcggtgtttggttttttgttcttgcgatagtttactgagaatgatgatttccaatttcatccatgtccctacaaaggacatgaactcatcattttttatggctgcatagtattccatgctgtatatgtgccacattttcttaatccagtctatcattgttggacatttgggttggttccaagtctttgctattgggaatagtgccgcaataaacatacgtgtgcatgtgtctttatagcagcatgatttatagtcctttgggtatatacccagtaatgggagggctgggtcaaatggtatttctagttctagatccctgaggaatcgccacactgacttccacaatggttgaactagtttacagtcccaccaacagtgtaaaagtgttcctatttctccacatcctctccagcacctgttgtttcctgacttttgaatgatcgccattgtaactggtgtgagatggtatctcactgtggttttgatttgcatttctctgatggccagtgatgatgagcattttttcatgtgttttttggcttcataaacgtcttcttttgagaagtgtctgttcatgtccttcgcccactttttgatggggttgtttgtttttttcttgtaaatttgttggagttcattgtagattctggatattagccctttgtcagatgagtaggttgcgaaaattttctcccattttgtaggttgcctgttcactctgatggtagtttcttttgctgtacagaagctctttagtttaattagatcccatttgtcaattttgtcttttgttgccgttgcttttggtgttttagacatgaagtccttgcccatgcctatgtcctgaatggtattgcctaggttttcttctagggtttttatggttttaggtctaacgtttaagtctttaatccagcttgaattgatttttgtataaggtgtaaggaagggatccagtttcagctttctacatatggctagccagttttcccagcaccatttattaaatagggaatcctttccccatttcttgtttttctcaggtttgtcaaagatcagaaattttcactaagtcaaataccatgaaattgtttcatcgagctgacacttgacattggatgaaagggggttggcattacctcctcaaagttgatgttcttaggctcacgtgggacaacaatgctttatttctaccatgtttagaagttttaaggcaacataagataataaccacaaaacagcaatgccatttgagaaggaggggctgcaagtttttgcaggcatttaaaactacgtttgtcaaaaacaaaaagcgaaaagatagaaaatatgtctcttgcaagggaaacaatgtatactggctacctgtagaatgtccccagagtcactggattgaaataattagttgcaaagaaagaataaatttaggtaaaataatgataatctgatattaaggacattgtgtttcctactatagaaaaacagcctttccaagcgaattcattgggagtcataatctgttgcaaaattacaagttagaacaaggactaaaaatatagcataaaatcagaaactaaaatactatttataacatgaattattttttatttacttttaaaaaattatggatacataatagttgtacatatttatggggtacctgtaccccataaattgttacatgtataaccatacatgtaatagttttgatacaagcatataatgtataacaatcagatcagagtaattgggatagccatcatctcaagaatttgtgttaggaatatccaattccattcttttagttattttgaaatatacagtaagttattgttaactattagcaccctattgtgctactgaacactagatcttattccttctatgtaactgtatttttgtacccattaaccatcctgtctttaatccccctcatctagaacatgaattctttgttgataaatttttgttttataaaatcatcattatcttactgctaagttaatatattcaaagtatgaaacatttttcactgagtctataccttctagatttcaaatacaaaaatgtaacgacattagttaattttaaaatatatattgtattttatataaacatatatatttttaagtttttaaaaatccacgtctgtttctaaatctgaacacatacactcatacaccatacacagtcttcttcctaccttttgagagtcactaccttctgaaaagaacctttcctaatgtaaattttcataagtaaagaacaaaatcaccattaatatcaaatggcaaagtttttatacatttccgatgcccaaattaaacctatttatgctaaagcaacaccaagtcacactaaaatgaacccaataatgtcaatatttatcataagttgttataacacaacataacaaggaaatagccctttaattcatcactaacatggttacctatctgcatatgttccgttctttcctagcagttatgtatcatgcatatcatgcacgtaagcctgtgaccataacatgtgcatttgaccatcaatgtttaagtaattgtacttttagttaaaaaataaaacaaatgaaactatcattgataacaatgcaaatgcactaagatcatcactattccaaaccagcaaaccaggagttctcttggaggaagagatggcaagaagcaccaactgcttcgtgcctgttccataaaacattggccatctattttctttgggccaaccaatgagcattcaaatgcccttccatctgtcctctaccaagtccagtcatcaggactgggtcattcttctctagtgttctttaaagacagccaagcggacacaggggtgctatctgcagagttcggtgaggacctgatcaaagataaggtgacttatgaagctgtcccatattaagaggtgtctagataagacaacagagtagaggaacaaaaatataccattttagttagagcaaaagtatctttatctgtgtttgtgttaaacacatatgcatccatgtgtgccgtgatgcatctaatcacagttggcaaagtgttgcttagtagtttgctgagctaagagacttggtgtcactgggagatagtgaagccaacaaaaagagtgtaatgcttcctttgataaagataattcatctcatcccagtgagtctctccttttgcttgggatgcccaaactctccaaggaaggagtggaaagcagagaaaagatgagggagacaggaaaccagaacaggggagacacagcaacctgagacaaaaagttaaaatctatcgaggatgggaattagagagttgcaggtattggcggggcctcagatacttcccactctaaccatcgttcccactccgaaggaagcaggaaaaagagcacaggggcatcaaccagacctgcctataaactcctcccatccatcctcagggccaccattttcacccaggctctgtctagagcccaggtggcctgctcaactccgctcactttgtacatgggtctctgcatcctctctgaaaaaagtcaggtgctggtctgttgaatgtggctatagaaggtaatgacgaagtattcatggagatgaccagacaagtggagccttcttaagaggagatgccttaggactgggatcccgtaatctgtggttttcagccaggggcaattctgatccctgggcaaccttgagcaatgtctggagacatttctagttgtcactactcagggtaagggaggatgctactgacttctagtgaatagaggccagggatactgttaacatcctaaaatgaacagggcagccgccacagccaagaattatgtgcctccaaatgtcactagtactgtggctgagaaaccctggactaaaagaagccaaccctaaaggtcagcttggtgatgcaggagcagccagattacatggctaagagggacacagttggacagagtcagacgcaggacatctctgggcttcagaaggacttctaactcaagttgatgaacaaatgagaagtcagaattgtgttgccgaaacgtcggaagtttcaaagtcagaatcaagattccagcaattacttgatgtttcccagtcttaattttttcatctgtaagactgggatcctaacattgctccataggaatttgctaagactaaagaagatattgaacatgaagaacttctcaccagtgattggcaagtaataggcacttcacaaagagcacttctcttccattttcttgctctaggtaacctctggaatgaacattacagagatagagcaaggaagtggatggttagatcttttccccacagcccgactttttcagagctccttgatcttccttccttttgtaattttttctttctatcccacctccttctaagaactgaaatttcccatccatcagtgatcacatactcaggcaagggcttgaggtgtaacttttttcaccttgtgactcatgaagatacagtagggtgatctcaccaggaacctatgcacataagagactaaagagcctcatagaaaataacttatcctggaagaataaaaagtcaacaggaaaagagtgtttcaaggacaacaggtaacctttgaaagaaaggggtcattctaagcacagcataagcctcatcatgaattcaccctgaatctctggacaaggaaacattaaaaaatacctattaagaaccaaaattgtttctgcaaaatttctaagggccactgaaagcacaaatattattggatttataactatgagggagaagctggcattggtggagactttgcttatgagggctgcccactttattctgacaacaaagttggtgatatggtggcctctatccacctctattcaccttgacagaacgcattggttgcaactgtagcagcaatgctgttgagagacatctgcagtggaagtattcccttccattgcagatggaagtaatcaaatttctccccacagagactcacaggaggggaagaaagaggtggtatattagtccgttttcacactgctgtaaagaactacctgagactagataatttatgaagaaaagaggtttaattgactcacagttccacaggctgtacaggaggcacagctggggaggcctcagaaaaattacaatcatggtgaaagggcaaaggggaagcaagcaggtcttcacatggcagcaggaaagagagagagtaaaaggggagatgctacgcactttcaaacaaccaaatctcgtgagaactctatcatgagacaaaactaggggggacggtgctaagccattagaaaccacccccgtgatccaattaacttccaccaggccccacttccaacatcaggaattacaattcaacatgagatttgagtggggacacagaaccaaaccatatcaggtggtgtgcattcccacagcatggggaggacacatagagtaccatgggcacattccctggatatccccaagactatggagggacaacttgagcagtggaggcagagcagccagagaaacacttttgggggttgccacttggcattcttttcttactcaaacagttatggcacaagttacagtataagagtaaaccattattctctcagaacacccagtgggtctgctttcctgttgctaaaaatcctaacaccaggtttcagcagtaacaataagatgttcactgtgtccctggggccatgcaaatactgcagagccttaactttagctcacaaacctttgacaggccagatccactatagcacgtgatggtgttatgggtagggggagggaaattactgctcttacaacttagctgatcctcaattgatgcttctaagttgctgtttcctcacttcccccactaaaattaatacattaagtccagatctttctgcttagggtaaggaaaagtaaagctaaggctgctcgacttgccttacggtatgctgtgagacaaacaagagtccagggtcccttgctcaccttgaccgtcactgcctggcccttggaatctatacagtgtaaataaagatctgagggaaaaaaatcctggctctctgtgatattttagaggaatgcaaaaaattagacctaaggcatttgcattgaaactcttacattccattatacatatctgaagctcttttgctggttctttatgtctttgtggacaggatgttaatcttaaatcaagattgtaaaattaaacaattttaaatatatgcatgtttaactaaaagattttagagattaagaatcatttgtaaaattagattttacacgtttgatttaagaacatgtattgaatgttagccgtcaagtccccaaatccattcatttgtagatactaaaggatcccaagaggtgagttgattctagcccaagcccaattaatcctgactctaaacattatatgtgtatttttattgagtgcttcctatatgttggggtactgggcaaaaagctgtttgagcactgtatctaatatgtctgcaatatttccctcttcactgtggggaagaaatgtttcactcttctcttaattttcatatatatgtgtgtatatatatatatgcatctgtaccacacttccctcttaattctcttatatgtgaataaatacatatatttatatgtgtatatatgtgtgaatacacacacatgcatttatatatacataaagataaatggcacctaaagtatggcgtcagtgttcactccagctcattgattcccgtcggtttgtagggccaatgtcaagtttttcacgaaaacaaaaaatttctgaacttttaatttaaatatccttgttatggtctgaattatgtctcccctaaattcatatgttgaaatcctaaccccagtatcttagaatatgactgtatttggagatagggcctttaaagaggtaattaaggtaaaatgaggctggtagggagggctctattccaatctgactggtgtccttataagagaatttttgggacacaaagagacacaccaaggatgtatgcatacagacaaaagaccatgtgaggacacagcgagtaggtggccatctgcaagccaaagacagaggaatcagaagaaaccaaccctgccgacaccttgatttcacacctctggcccccagaactgtgagaaaataaatttctgttgtttgagctacccagtctgtggcattttggtatggtagttctagaaaatgaatacgctctcgtttttgaaaattcaggtttttaacagcactgtgtaggtcaaacaaaaacataactaaaatgaagaatgaactctcatacataatgggagtgtgcataaattgcttcaatctctatggagggtaacttggaaatatctatcaaaattaaaaatgattatttttgagtcagatattccattcctaaaatatttatcctgcagaaatattcttgtgtgtgaagtaatgtgttcaatatttgttgcatcatttcaatacagcaaaccacatacatgcccactgatatgggactagtaagtaaattatagcacacctatacaatagaattatgtgcagttattttttaaatgaggtagctctatatagaatgattttacagatagagtgccaagttaaaaagtatcagaactgtgtgtgtgtgtgtgtgtgtgtgtgtataaccatttgtgtgaaacaatgtgtaatgtgtttcaaaatggcccctcaaagtggratgtgaaatagaaaaaaatatatctgatgctgaagtcagggttttttaccatgaccttaaggcatttattagggataccacacctatacccaaccaagatctctcagcccatttccagatgggcactcaaatttcttagtgcagttggagccctgccctacacagctaagagaagctgtgatcatcagacttcatgacttctttttccctgggcaggcttctactctggcctttcctggcccctccctgctttgccactaaacaccgcctgagatatggacagcctacccagaatgaactctccctttgtgatgtctccttgggtgtcaacaaatgggctactactgtctccctcttttgaacaaaggctctctatggcctggttagagcatttagcttaggaggcaagagtattccacggagcacaacaacctcattatttatatgatcaactaaatcttacaagtgctgcatacagttgcatactcacaagcacattagcatataaagtctctgaagtctccgcggtgtagaaaagtggttgccctttttcatcccacagttgcccaagattatttaactaatgaatcttctctctttgttgcacatctatgcacatcatgtaaaactagtatttcccagtgtgtaacacacttgagaaaatctcttctaaaccaagcacagcttccattcttttctccagcttgctctttatagaagagactcaaattaccttcccaaacaaacaaggctccaaggattacagctaacaacaaggataaaacaacaacaacaacaaaaataagactaaataggagagggagagaaacccaataaagaggtaaaatttaaaattaaacgtcaaattttataatttgatggttctatttatttctgattaagaaaagaaacctgatcatggaaagttataaattagaaaccaggaggcaagcaggcaggagaatagacaggaatgttgaaggtcacagcaggcaatgggtcataaatcaggagccaagagaacacaaacacctgagaggaggtcaaggtcaatggttctactctggacagctcatcaggaaccattaaaaagccataggagtgagatggctatagagtcttacccaaaagatgattgaaagattactaatttaggtttgattggcctgaattctcaacagccaatatgtttatgcatgttgtacatctaatggaacaccattaagatggctgacactgtcgatttatgcatttattgacataattctggcagactttttctaacaaaatgtttatatattttttgtttgttcatttgtttgttttttgagatggaatctcactctgtcaccaggctggagtgcagtggtgcgatcttggctcactgcaacctctgcctcctgggttcaagcagttctcctgcctcagcctcctgagtagctgggacaacaggtacgtgccacaacgccccccaaaaatatttttgtatttttagtagaaacggggtttcaccatgttggccaggatggtctcgatctcttaacctcgtgatccgcctgcctcggcctcccaaagtgctgggattataggcatgagctactgcacccggcccaaaatgtttataacaatatagaaatacattatatttctaactcatgcaaaggtgccttatgagcaagcaacaatcctgccccaaggtctgcctggtctctggaaggccatggaggtaatggcaggagggcagctcttgaaatcagatgacctgcattctatacccagcaccattgagcagttttcctcaccattttaggtttgagtgtcctcatcagcaaaatgaaatctatttctagatgatgtttcagttacatgaatatattagattctttctcacctctcatttttcacatatgctattgcttctacttggaatgcttgtccttcactcatccccaggctggccctccacattcttcaagtctctgcataaatgtcaaatcttccagaatgctttctcttctaccttggttagatcccctactcaaggcttccatcagccatcctccacccaccatcaattcacatcaaatattatcataattatttatttcactgtttgtctttcccactagactttaaatacccatggacagaaaacatctctctctctcattcagggctgtgtctccactaccaagcacacagtagaaactcaataaaaatttgttacatgaagacatgaacaatgttaaaatttatatggaaaccattaagtctttttttaacttttaagttcggggtacatgtgcaggtttgttacacaggtaaacttgtgtcatgggggtttgttatacagattatttcatcaccgaggtattctcattttttaaaagaatttttctgtatctagtatgccacttggtttgtcaaagttagccaaattcacttgtctcctacttaagaaagttaattattgaagcctgatttcttatctctgcacatttttataaaactaaagtgctatataggcacaaatatattcttatgaagttgtgcatgttgtgaggacgtgaaaactaatttccactttagttgtactcagcaactcaaacggaatgaagtcgttttattaacaaacacccttcctcccaatttatttagtaaattcagattaattaggattatttcactttaaaagagtggactcttggtgttaaaagtgggggtggtggtgagggaagttctgttattatcgatatggaaatatcttgatcattttctcagggaaagaaatcaagataaagaacaccaaaagtgtgatttgcatgaccctatcccccagtctcccagaggactttgtctttggcagtcatgttttggaaggccaaaaatgatcctctgatactaaaagggagtagaaagacgagaccaactggatcttattgagaaaaggggcagcatttgagggaggtggcatatacccctacaggaggaagaatttactccctgggaggtaagattcttagcacctgcagatgtttaacagcacagactgtgaagctggactgcctgggttcaaatccgagctctaccctattatctggggaactttatatgttacttaatggtgtggtgtcaagctcactcatctgtaaaaatagggatagttatggcaactacattacagggttgtcatacaggtaaaatgaattaatgcattcaggagattagaaaaatgactaccataataagttcttaatactcatatatgtcaagttggacttttattatgtttagctctatattcgtgggcagggactgagagagaattgcttttgtaagatacagagtacactccagcctagcctgaggaaattggcaaaaactgaaatggcctgaggaaattggcaaaaactgaaaattcctttgggtaagggagcccaaaagagctgaggtcacttagaggccagactataatcgcttgagattctccaattctctgactttggtgtaggcagtggtagcaagggagaaggcagaaggcaggtgaagacaccagttaatgcagtaagggtggcagaactgggaaacaaaagcagccaagaagcagagatgggaaatgcctggagaagacgatcactagactctccagtcaaatgtttgctaggctttccttttcaggtggcttctgaagaacagcataacaaactgcctcatggtataggagacatctagagcccaaagcctgtataattgttcctcagttttttctcaacagggaaaatcccattagataattccaaagtgttccaagcacccagcctatttaatggtgccccctggagttgtgtaacacagagatgctgagctgagagatcataaattacgtttatccatctataagtgatttgttagcctattatttccaccttataattctgtaccatttcctttcactgcataacagaaactaatttacatctgcaactaatttttgcatttatttatgtatttatttagagacagagtctcactcggttgcccaggctggagtgcagtggcaccatcttggctcactgcaacctctgcctcctgggttcaagcaattctcctgccttggcctcccaagcagctgggactacaggtacataccaccacactcagttaatttttgtatttttagtgagacagggtttcaccatgttggccaggctggtcttgaaaacctgacctcaagtgatctacctgcctcggcctcccaagtgctgagattataggcgtgagccactgtgcccggccaatattttcatttagagactactgattcatcactaagttgtcaggagtggtatgtggtgtgtgtgtgtgtgtgtgtgtgtgtgtgtgtgtgtgtgtgtgtgtattagcctcttttaagaggttatttagaagaggaagacataattattcacttcatttatgagttgctctattacaatttggttgttcctttcgcaaagcattcgtgacattgttagaacttgtcattaagtcctttggcggagggctctacctctaatctttgcacagcactagcttcttactgtcctattttctcacccatctcacacactgcagctgaaaattgtggctgggcttgcatatgtaattagagttgtgcctctttgccaggttgtttcttcctcctctactaattrgtctagttttccctttaaggcacgtaggaattatcagttaagtcaaatgaaaacaataggctgggtgatgtcagtttttgaaactgttgattactttccatattatatcatatggtcatgaggattactctgcacttatgggtaaactattcagctactcattagctcaatccagacacatcgaggcttgtcctggtttaactaacttttaagccatgtgacacaggaaaaacgaattcttcttcaagagttaaactgactatcatgctaagaccttcctttcctgatggcatttgtagtcatttttctcacaagccatcagttccaagacaaggatttggaagaaaaagcaacaaaaataatagtgcttggatatctcttaagaagctagggccatattttgcaaatatattattgtccattttcaagcatcctaacaagatgtgatagactcagaagcttcccagtagtagcataggctgttcctactaaatccagaggtttatggttatcctagcacaaggaatagcagcttcagatgttggccatggggcaattgttactcttactcccatctctgggagttctcgaaaactgtggtcccagaaccagcagcatcagtatcacctataaacttgttagataggcacatttttacggctcactccagacacaatgaatcagaaactctgtgggtggaagtcagcaatctgaatcttaacaaattgtctgggtgactctgatacatctctatcacatggagccccactgccaaccataaggcaaagtagatatgggccaagcaggtctgtacaggttttggtgaaatccttaaagctcatactgttaccatgagtcttagatcacagaaaacacagtgttagaatcattgttacttctatgcagaaaaggaagaaggaaaaaaatgcgccaatttcctggtaaatttccccaacgrttttaacaatctttaccatatgcaaaatataatgttctcaaagattaaataccactcttgagacttaaagaaaagagaatagaagaccatacttgggaaaagaaatctctctcctgctatgggagaaatataacacttattattaggtaattcaaaaatctgttgcattggtttctaagacaaagaaaacttcttagacagagtcgccaagatgaatgagagtacctttccatagtgactttttcagtgttgacacacaacttctaacaagaaatgttcctaaagagtttaacctaattactaaagttctttttactcctgtcataaaggaaggggaggggagttcagaaaaaattgccttgaaatcagagtcccagactcttacacattccttacattcatggcattcatgagaccgtcaggagaccacccgtaaagacagacaaaagaagatggactggcggcagcacaaatagtaattatcaaagccattgccaagtggttatcccatggaaacacatttctgtatagtcagtaagtggcagtaatgataactgagggcatgccagccaatagaagaccatgaacagaacaagattcttcctgaccttatcagcaagagagggctttgagggaatggagatgcctgggcactgaggtcaccagcactcaagaggccaccccaccatgtcctcatcctgtgtgaatccaattgcttacttggattagctttgccactttacaatagatgcttagaggaaatcaaaataatttagcatgctaagtgaaattatacaaccaggactaaccaggtaatttaatgtagaggcacagccgctttgttcattagcattggccttggtcaaattatggaatctctcattgcttcagtgacctcatgagtccagtgggaatattattgccaacatactactagaagactcttgagagaaatggataaaaagggttgggttctgttgtattgtactgtacaattttgcatgtattttatttgtattttgatgaacaaattagaaatagcccatattccaaaccattctcactggaatcaagtgaggaaatcactaaaccagtaggcaagtatcatattttgcctaacattgaatgtttaaaaaagaccagtgaaatgcttctattaacagcagagttcttcattcagtgtgtgtgtgggggtgtgtgtgtgtgtgtgtgtgtgtgtgtgtgtgtgtagaaagagtactttaagccaactaaaaggcgagattgtcaacagagcctaggagtctgagaagtttgagataagcgatggtgatacaaacatcattagcactgagtcttttagaatacatattctatagctctccagcaaaccaagtcttcacatgaggaagtcactgaggcagcaggtagatgccatggtcctggtcatcaaggaggccctacattcacttctgcttgctaatggcatctctttgggcaagctctgaacctctccctaagcaacatctgtccttcaggcttagccagccagagtagctatgccacggcctaagggcagggcaattaagattcgttatgtcacatcaagagaagaattccaaatactgggccctccaccaacaatgcagcatcctcaccctcccacttcaagccctgaaatgttttcagtaaaaataactagctaatcataactgctaggaaggatagggataatctcagtgaggtcacaacgagctaaaaataagtcttttgagatcaaagagttacactaagaaggagacagaaaattcaggatataataactaatcttatatccttctgttctttctgaacctcaattggggcttggatgctgggatattgggatgaaggtgtttgtcccaaggccaagccgtatgctgaatcaattcctagttctacacaggaaagaagcatcattttagtctcagataaattaatagtacgcagctaaataactcawaacagaaaagtcatcatagtgacagagttgtaaaagccagttgcaggaaattgcacaaaataagcagaataaatattactggagtgaattggatgttttatgcaacaaccacctgacactccaactttctttcaaatttcacttttcctcccctctcttttttgccagatgaatgtacttccagctggacttaagagaagcaacggtgtcaaacaacgactcattaagaaatacacacctgtcataaacgcaagaccctctcaggggagatattgaattgtgttccctgcttcctatgaaaaggtgcaatgaaaaaaaaaattaactatcaactaccagatgtttctagcatctctattagtttgagaaagatgaaacaattgctgcattgtacagatgtgtaactcacagaagtattttggatgtgggaggaaggctcaactaaatgtgtcttgagaataattgatcttttctttttggcactgcttcataataacaggaagaaatctcctcctctccttgaattgacacattttttaccaacactaagaataaatgaacatatatttaaaggtgcaagcatatggatatgcatttttcagtctgactttgcttcactgcatcaattataattatcttgaacttcctggtgacactcatacatgcacgtttcatgatttgaaagctttctagttgtagaaagctgtaagtactgtaaatcccattctccaaatagtaagaatggagtctggtgaggagaggttgtgtggtcaatggtatagagaaggacagagctaaaactattagagcctatgctctataactattaagagacaatatatacaaaatgtttgagttactcttgtcctcacaagcaatgctcgatgttctagtatatggagaagtcatcaatatgtgctattcaagaaaagggtcaggagtacacagtggcaacagcctcaacttctgcctatggttccacattattgcatctcccaagtgaatgggctttggcttcagccccttgtcatctcagtgccacaggagagctaaagaagggaaagcagagggggaatgccattttatgtcatggagtacagggctcacaaacaggctttagctcaacatgccaaatctgatggattttctctagtggctgtcctggctctaactggaaaaggattctgaggttgtatctgggcttaggcaggaagagaggtgaaatctattagcaacatttgccagtactttggaaggagatgctatcagctcatgaggaattttccagcttggggccctgtaacagttaaaagtgtggactttgaggccaaactgatctaggttcaaataccacagctatactacctacaatctctgtcacactgggaaatttacttaacctccctaagattcgattttctcctctctcaagtagggataactaatattatccaaaagagctgatataaagattaaataaaataatgtatggaaagtgtcttgctgatttcatgccatagagtaaaagctaccagaatgacaactgtggctatgatagtcatagtatccctagccacagtagtagcagtagcagaagtatcagcactaagttgatagtatcagcagcaacagtctcatagttatggtaacagtagtaacagtcgtaatattagtacaaaagtaatttaaggacaggcctgattttttttctggtatggattagacatgaaaattaatgagagagagagagagagagagagagagagagagagagaaagtgcaccatgttctgattagctaagtaaactggaatcagaagccacctctggagcttatagtccacaggtaggtaatcatcattcagttgaggtgactccctcagccctagagaggtttgcttttctctcttggtgctctcagtagtgtggcatgtgccatatatattgtactgaaactgtgctgacactcctgaggcgaagggtatagcttgagctctccaagaaagagatgaggcaatgatgtgtggtcaggtattactgaaaatatttcaaaggcaaagaaaacagaaatggagggatggctactgtcccttgagccaattcattatcccactggtactggcccttatgatcctgctttttgagtggcaccgaacggtgagttatcatgtgtcttgaagagttgagagaatgtgtgatgagtaagaaaaacggagttcaggagcagttcaatgttgagaacacaggtggtgactatgttccctttggattctggagccactaagtgtaacagagtaggtttcagagaatcaaagatcatggatgttttacaaaggctctgtgcttcagttaaaagacagttcaatttgttagagaaataatggccagcttcacacaaatagtggaaaaagaacaaattcaggaggaggagtttaaaagaattttaaagagcactttcggtggaatactaaaggaatagcagctataggtcatagacttttattcctggaataaacctttgagatcatttaatccaacatcattatttacagattaataaacgcacatcttgtgaataacagcatgcggaaagagcttttaaaatcaggagttattgtactaaagagagagaaggagtccagaaatggacacgcagactgtggcgtcatctaagtacaagtagtaattgaactcatctatgatgatacagagggaagagatccatttcagcttccaagcaaaacatatagacagtgacacacccataatgaaatggccaaatggataccacccaaacatagataactatatggcccaaacaatgtgaataaattgaggaaattggatggctatatttcacattttttggcgtatcaagtgaactttaattactttttgctcctgggataaatttttctatctctcaaagattcttaaggaaagaaaggcagattcaaaatttgcagtgtttttgggaggccgaggtaggcagatcacttgaggccaggagttgaagaccagcctagccaacatggtgaatccactctactaaaaatacaaaaattagcyaggcacacctgtagtcccagctactcggggtatgagaattgcttgaacccaggaggcagaggttgcagtgagctgagatcccgccactgcacttcagcttgggcaacagagcgagactcagtctcaaaaataaataaataataaataaataaatattttttaaaaattgtacaatgtgataccatttggccaaaacatataaatacataaagaaaaaagagtataagaaaggttaaataggtctagtggtgaaccaaatacttatgattacattaaagaatgcaaaaataatcattcttgaaagcaaagctaaatgagttaaaatagtatttaatattaaacaatatggatctacagtgacaaataattccaacaaaattcataagatgggtctacaagagggaggaatgaaaaagaagctaatgacctcaatttagatgggattcaaataattgcatttattttgtgacactgataattagagatatacaggttgcacatattctataatttaacagtgaaatcataataaaaaatacattcagtgtttctagagacaaagcagcccaaaaaataactagtagtagttatgagcactgactactaatgtatcaggtacttttaaaacatttattcctacaaccctctcgataaccctaccaaatgggtactatttttatccctatttttcaagttttaaaaatgaggatatttaggcacaaagaatttaagagcttctgattcttgaaatattgaaatgggacccatgcccgactaggcatatgcttgagcttatggtcttaaccaatattctacacatggatcaaaagatgaacaccagtaagaatactaggaagctgtttaaaaaaaataaatgaagacatcagaagataaaatatattagtatgaaaattaacaaatttgttaaactaatttaaaaatattttagcaatagaattatatattatttagaagagataatatatagaacaaaatgttcagaagtattaaaaataaaaggatggcaaatatgtatcaggaaattgaaagaaaaaatagaaagcattaaatgcagattgcaataaataaaaaataaagcaacactacactaatcaaaggtataatccacaataaaatataatagtcaagcaatgctgtccaatagaactttctatgacaatggaaatgttctatacttgttcagtccaaaatggtagctactaggcacatggggtttttgagcactggaaattcaactagagtatcatataaactgaatttaaaattttatttaattctaattaatttaaatgtaaaaagtcacatgtggtgagtgcctaccataatggacagtgtatgtctaggtctctgtagaaatatatatgaagtaatgttgctacaattaaacagagtttaagagaagcatatttcagtgttttattataaaacaattctgaaatattcaatagaccaaaacaaaatacaatatagaaaaactgaataatttaattgctaaaattacttaatagttacatatagaactttgcctcaaggaatgtgtattcacattcaaggatgtttacaaattgtcacccacaaatagcctatttttagatttccccaaagtagacattttaccagctacaatgtaatgacttagaaatttataacaaaattttaggcaaatatacaccaacaaaaaaaaaaacaaattggaaattttagaagcattaatctaaatttgtgcacgtatataatgtaaataagctctacaattaaagacaattacaacatatcaagataaacaggttgtggtaaaattgtacacaaaggtaacttcataacattttattgaaattaatcaataaaatagtggaaataaatgagctaagtcacttactaagagaacaagattataagaaaagtcaagaaaggaaataataaagataaaaggcaaaattaatgaattggaaaatagaacaaagtaataatttcaaaaccaaatacctgagaaattgaaagattaaaaaaaaatacaggaaaaccctcagtatagttttaggaaacaaaactgagaaatatcaaacaccaaaatgtagaaatgagaaagggaatataaaaaacagtcatggaggctgggtgcggtggctcacgcctgtaattccagcagtttgggaggccaaggaaggcggattacctgaggtccggagttcgagaccagcctggccaacatggtgaaactccatctctactaaaaatacaaaaattagtcaggcatggtggtgggtgcctgtaatcccagctactcgggaggctgaggcaaaagaatcacctgagcccaggaggtggaggttacagtgagcagagatcacgccactgcactacagcctgggcgacagagtgagtccctgtctcaaaaaaaaaaaaagaaaaaagaaagaaaaaagaaaaaaagcagtcacagagatgcttttaaaaatattattataatcatatgctaaaacattttgaaatctgactaaatggattatttctagcaaagtaaaagttaccaacattgacttgagaagaaataagaaaacttctggctataacagtaacttctaaaactatgattattacaaattatctccaaaaaatccaccatgtccatagagctttacagatgagttctatcaagttttcaagagacagaatactgttgctctagaaacatttcagaccatgagaaatgtagaaacgtaagactgattaaaaatctgacaaggaaagattatagaaaaaatgatagactaagctattcttaaattcataggcaaaaatcaacattgaattgaagcaaatcaagactattaagacagctgctgaggccaggcctggtggctcactcctattaatcccagcactttggaaggccaaggcagggggattgcttgagcccaggagttcaagaccagcctgggcaacacagtgagacctcctcactactaaaatgttaaaaaagtagccaggcatggtggcacacacctgtagttctagctactcagcaggttgacgtgggaggacgacttgactctaggaggtggaggctgcattgagccatgttcgtgccattgcactccagcctgggcaatagagtgagaccctgtctcaaaaacaaaaaaacaaacaaacaaaaaaaaaccaccaaacgatctgctgtatattgaaaaatgacacaccttggaaacataaaatttacctaggatttagtactagaaattttactactttgattaagcacttgaatatgtcaaaggagaaaaatattatttcaagtagatactaaacaaacatttgtgtacaaaagatttgaaaagacacttcaaaagtaaaatatacagagagcaaaaaaaaaacccataaaaaggtgcttgacatcactagtcattaaggaaatgctaatcaaaattacaatgggacacaattacacacctattaaaataactaaattttaaaaattaaccataccaggtgttggtggtgagaatgcagagaaactggaactctcacagactgctggtgggagtataaaatggcacaaccactttggaaaacaatttggcaggtcctttaaaagttaattatacatctcccatacactccagccattccaagagaaaagaaagtatatatccataagaaagacttacacataaattaccaacccagttttcaatagtccaaaactggaatcagcccaaacgtccattagtggttggatagataaacaaattgtggcatacccatacaatggaacactattcagcaataaaaaggaattaattacttatataagcaaccatataggtgaacccaaaataattatcctgaaagaagccagactaaaagagagtacacactgtataattcaatttatatgaaattctagaaattacaaactagtctataatgacagaaagcatgtcagtggttgcttggggataggagacagagaggggctagagggaggggttgaaaaacacaaggtaacttttggaggtgatgagtatattcatcatgttgattttaatgataatttcacaggtgtatacatatgtcaaaagttacctaattatacagtttaactgtgtgtacttcattgtgtgtcaattgtaccttttaacaaaaggatggaagtgaaagaataaaaaaagatttaacagaaacattctgaaagaacactagtacacactagctagaatagacttgacagcaaaagagatttcaaggtaaagaggctcttcataaagtggtaaatgaaaaattcaccaggaatatgtaaagatcccaaatgtgtgtgcattcaacagagtagcatcaaaatatataaagcaaaaaatggaaagtactactaggagaaattgtggaaatgatactcatagtaatacaaaggaagatgactctctcagaaatcaagtatatagcaaggaaatagaagactttgacaacacaattaacaaaccttaattaattgaaacagaaaatttctgcacccacctaagacaattgagcttattttcaaatattcatggaacatttacaataatgaccatgtaatagttcacgaagaatatctcaacaccaaagaactaatatcatacagcccatgttttctaatcacaattcagtaacatacagctaaaaaatcgtatttaaataataataaaaatacagtagggatctaaaaatcacacatcgagtttccaatcacacatatcagcctagatacacacatgttcacctctataccttccccaaacactattaaaattacagggatataaaaaggccaaaactcacaaagataaagaactagggggaaaaaagccacagccactgtattttggaagcagaaatagagatgaaatttacaatggtaataagaaaaaccccaaagcaggacgattcataccatagaactccggaatcactcaggaattagaaccactggttacctttaaaattgggttacaggtaaatgaaggcagaaataaagatgttctttgaaaccaacgagaacaaagacacaacataccagaatctctgggacacattcaaagcagtgtgtagagggaaatttatagcactaaatgcccacaagagaaagcaggaaagatctaaaattgacaccctaacatcataattaaaagaattagaaaagcaagagcaaacacattcaaaagctagcagaaggcaagaaataactaagatcagagcagaactgaaggaaatagagacacaaaaaacccttcaaaaaattaatgaatccaggagctggttttttgaaatgatcaacaaaattgatagactgctagcaagactaataaagaaaaaaagagagaagaatcaaatagacgcaataaaaaatgataaaggggatatcaccactgatcccacagaaatacaaactaccatcagagaatactataaacacctctacgcaaataaactagaaaatctagaagaaatcgataaattcctcgacacatacaccctcccaagactaaaccaggaagaagttgaatctctgaatagaccaataacaggctctgaaattgtggcaataatcaatagcttaccaaccaaaaagagtccaggaccagatggattcacagccgaattctaccagaggtacaaggaggaactggtaccattccttctgaaactattctaatcaatacaaaaagagggaatcctccctaactcattttatgaggccagcagcatcctgataccaaagccgggcagagacacaaccaaaaaagagaattttagaccaatatccttgatgaacattgatgcaaaaatcctcaataaaatactggcaaaccgaatccagcagcacatcaaaaagcttatctaccatgatcaagtgggcttcatccctgggatgcaaggctggttcaatatacgcaaatcaataaatgtaatccagcatataaacagaatcaaagacaaaaaccatatgattatctcaatagatgcagaaaaggcctttgacaaaattcaacaacgcttcatgctaaaaactctcaataaattaggtactgatgggacgtatctcaaaataataagagctatctatgacaaacccacagccaatatcatactgaatgggcaaaaactggaagcattccctttgaaaactggcacaagacagggatgccctctctcaccactcctattcaacatagtgttggaagttctggccagggcaattacgcaggagaaggaaataaagggtattcaattaggaaaagaggaagtcaaattgtccctgtttgcagatgacatgattgtatatctagaaaaccccattgtctcagcccaaaatccccttaagctgataagcaacttcagcaaagtctcaggatacaaaatcaacgtgcaaaaatcacaaatattcttatacaccaataacagacaaacagagaggcaaatcatcagtgaactcccattcacaattgcttcaaagaaaataaaatacctaggaatccaacttacaagggacatgaaggacctcttcaaggagaactacaaaccactgctcaatgaaataaaagaggatacaaacaaatggaagaacattccatgctcatgggtaggaagaatcaatatcgtgaaaatggccatactgcccaaggtaatttatagattcaatgccatccccatcaagctaccaatgactttcttcacagaattggaaaaaactactttaaagttcatatggaaccaaaaaagagcccgcatcgccaagtcaatcctaagccaaaagaacaaagctggaggcatcacgctacctgacttcaaactatactacaaggctacagtaaccaaaacagcatggtactggtaccaaaacagagatatagatcaatggaacagaacagagccctcagaaataacgccgcatatctacagctatctgatctttgacaaacctgagaaaaacaagcaatggggaaaggattccctatttaataaatggtgctgggaaaactggctagccatatgtagaaagctgaaactgcatcccttccttacaccttatactaaaattaattcaagatggattaaagacttaaatgtgagacctaaaaccataaaaaccctagaagaaaacctaggcaataccattcaggacataggcatgggcaaggacttcatgtctaaaacaccaaaagcaatggcaacaaaagacaaaattgacaaatgggatctaattaaactaaagagcttctgcacagcaaaagaaactaccatcagagtgaacaggcaacctacaaaatgggagaaaattttcgcaacctactcatctgacaaagggctaatatccagaatctacaatgaactccaacaaatttacaagaaaaaaacaaacaaccccatcaaaaagtgggcgaaggacatgaacagacacttctcaaaagaagacatttatgcagccaaaaaacacatgaaaaaatgctcaccatcactggccatcagagaaatgcaaatcaaaaccacaatgagataccatctcacaccagttagaatggtaatcattataaagtcaggaaacaacaggtgctggagagaatgtggagaaataggaacacttttacactgttggtgggactgtaaactagttcaaccattgtggaagacagtgtggtgattcctcagggatctagaactagaaataccatttgacccagccatcccattactgggtatatacccaaaggattataaatcatgctgttataaagacacatgcacacgtatgtttattgcggcactattcacaatagcaaagacttggaaccaacccaaatgtccaacaatgatagactggatcaagaaaatgtggcacatatacaccatggaatactatgcagccataaaaaatgatgagttcatgtcctttgtagggacatggatgaaattggaaatcatcattctcagtaaactatcacaaggacaaaaaaccaaacaccgcatgttctcactcataggtgggaattgaacaatgagaacacatggacacaggaaggggaacatcacactctggggactgctgtggggtggggggaggggggagggatagcattaggagatatacctaatgctaaatgaggagttaatgggtgcagcacaccagcatggcacatgtatacatatgtaactaacctgcacattgtgcacctgtgccctaaaacttaaagtataataataataaaataaaataaaaattaaaataaaaaaataaaataaattaaattgggttacaggtaaaattgaaaatagcacacaaattagctgcattttaaaaagcagttagggacatgtatctcttccctaactcaaacaatctggaaactactcccatttcagtaaaagtctgcagacctattctctggcagtgatgaatcaaaggaaccctggacttgcggctggtcagagaaaaggatgctgcactgtagacagaacaataaagtaaaaatctactgcctgatgagtgagatcccactgagaagccagcattaaatatcccaggagggagatggaaaacttctccctgggaaactgagctcaaagaagaggctcaaagctactgagatttgtaccccccacctgacccagataactcatcccagtgatcctacattaaagtccacactctataaggccctcctcccccaacatccacacaggaatccagagctatcaattagctcttttttacatggtggaagcaaaggatcctcagaccttcgagaaagcctctaatgtgagtgataggtgaataccaaagaggaattgaagaaaatagaagtaaatcagtgagaagatacttcaaaaaactataatatcatccaagagataaaaaagatatggcattcaggaaagtagaacagggttttatttttaaaaagaaagaaataaaaatcagatcatagaaattaaaatcatgataacagtaattaaaatgtaggagaaggattagaaatttagaagaaggattagaagttgacaatcttgaccagaaattaaaacaaacaattgggaaaactagagaggaagagaaaaacattagaaaataagtttaagaggtctaaaatccaaattattagaaatttcagaaagagagcagagaatagtgtagggagaaaagtatataagaaataatacaaaaataaatttcctaaaatttaagaaatttccagattaaaaattcctgtcaagtacccaacacaacagagtccttcagtgaggttaagtactactctgttttattatatggctacaacatggtgtaccattaatagttaactatataccagcaagaaatacagatagagatattcctgtcaaggaccatcaagatacatgaggaaagcatcccagagcatctttgtatcattataggatcaacttccctatgtcaccatgaggaaatactcatagaaatgttctgccatataataaaaaaaggacaaataccatatgatttcactcatatgaggtacttatggtattcaaaatcatagagatagaaagtggaatggtggctgccaaaaccttgctgggaggaaagaaggacaagttgtgtttaatgggtacagagtttcagttttgccagatgagaaaagttctggaaatggatggggatggtggttgcacaacgatgcgaatgtatttaatgcgactacactgtacacttaaaaggattaaaatagtaaattttgttacacatattttaccacaattaaaaagcattaaataaggtatttgggagttattgggaagcaaaacattcaaaattttttcttttgtaaaataaggaaagaatgaaagaacacttctatttaacattctcaactgcatatatattgatgtgcacacacataaaaacataatgtgtgtatagcatttttcactcaatatttaactttgttatttcatactgactccaaattcataggtgtttatgcagataatcacatgactacatatagtaactcagactgtaattttactaaaaatggctttatgttcatgggtggttatacttaacctagcatcttttgtcttataattacatagcttaaaataaatgactaatgtgcagacattaaaaatgaaaaacagaaatatagctgggtggtcagacaagctttgcattatttaaagagaatgttccggaatggtaaatttataatagcatatgttcagaatacaaaacaatgaaaaatatcccccctttatagttttctgcttacaaacatctcttcttatctctctcttctcctattatcctcttatcgggttagaaacaaactttgaaaagttatcttctactctatcacagctttgaatgaggatcagtattacaccatactatttatagcctctaagcagggagattttctgagctcgctgataacttaggtctgcttgaactatcttctcttaagtaatcaaagctctttatttctttcccactttgcatttagtggaaaaagaaacagttgaagtctatgttttaggttcaaattattttttaatgtactcattgaagaaacattttaaagtagattatcgctaaaaacaatagtcttgtataccatatgaaaccatgtatgtgccattctagataaggaaaaactttcgttgacagagaaaagatcagtagcagttgtctggggtcaggggtgagaagaggagattcactgtgaaaggccataagggaacttcttaaaaaaaaaaaaattcagtagttttagtagtacaagcgctttttggttacatggataaattgcacaatggtgaagtctgggctttactgtatacccatcacctgaagagtgtacattgtacccaataggtaatttttcatccctcacatggaacttcttgattgaggtgctggtaaccaattgtacacaataccacaatgtatcacattgtacactaaaaatgggtgaattttattgtgtgtaaataatatcttaattttaagaattgctttgttaaaaaaataccaaccctgtagtctcactactaaaacactatcagtattaatacattggtgtgttttccaacaccatttctcacagacacttatttcttcatttgtaaacataatttggatgatatagttttttgtagcttgtttttattgtaagcacttgttacattacatggtcttggaaaacaatcattttcaatggctacctaatattcaatcaagtaataggaattactgaatggtcaaaactatttaaccacttgtctattgatagccacattggttgtcaccaattatttagttacataactattactgagaaaaaaattttgtgcacgaagttctttttttctataggcttcaaaattcagaagtatttttaggatatatttccagaagtacaatattgagccaaagggtataaacatttttttttttttttttgagacagagtcttgctccgtcaccaggatggagtgtagtggtgcgatcttggctcactgcaacctccgcttcccaggttcaagcaattctcctgcctcagcctcccgagtagctgggattacaggcgtgtgccaccatgcccagctaatttttctatttttagtagagatggggtttcaccatgttgatcagattggtctggatctcgtgatctcatgatccacccgcctyggcctccaaaagtgctgggattacaggcatgagccacagtgcctggccaggtataaacagttttaaggctcttgccaaactctagattcttgccaaaaaagccatactaatttacactgcttccagcaacgcttaatgaccttgtcacctccccagagttggatatattatttttttaatcttaaagacttcctaatgacctctccccacaacctttcagccataattacctcctccatttttgtgtgtgtgtgtgtcaagcttttaacaacttttccttttttggtccctttcattcctcattttctcttccttcttccctcctctcatccaccaggtccccttacctctcccactggtttctactataattgatgtttttcttccttattgagtggaaaacctccactgtaatataaattgggaaggaagctgttgctttgaccaaaacagaacttaaggcatgagaaaaaccaaaacaaaacagctcttccctggaacatagcatggccagagaaaccaaaagcatttcaaaaccaaactggagtgtcagagaccagatattgaagactgtcttagggagagggagtctgggagggcagagcactcaaggagacagatgtgaaagctgtcaaacttcctgactacattcctacatcaggggataatgcttgaaggacagcaaaccttagtctgatggttatatcttcccagatgtagagacacaggttctgactgtgtcagggtccatggcccctggacctttatattgaggcacctgacctgctctcagggttgcatgaccccttgaataacagagggaagtgttaagggcaacatgattttgtgtcatgggaagtcagggaccccgaacagagggaccagctgaagccacagcagaagaacataaattgggaagatttcatggacatttattagttccccaaattaatacttttataatttcttacacctgtctttactgcaatctctgaacataaattgtgaagatttcatggacatttatcacttccccaatcaatattcttgtgatttcctatgcctgtctttactttaatctcttaatcctgtcatcttcataaactgaggaggtatgttgcctcaggaccctgtgatgattgtgttaactgcacaaattgtttaaacaatatgaaatctgggcaccttaagaacaggataacagcgattttcaggaacaagggagataatcttaaagtctggctgcctgtgggctgggcaggacagagccatatttctcttattaccgaaaacaggtaagagaaatatcactgaattctttccccagtaaggaatattaataattaacagccctgggaaaagaatgcattcccagagggggcctctaaaatggccgtcctgggagtgtctgccttatgcagctgtagatagggatgaaacacgccctagtctcgtgcagcgcccccaggcttgctaggattaggaaattccagcctggcgaattctagtcagaccagttctctgctcttgaaccctgacaatgcgtgcacagcgggacatggaagttcattagtgattctagtttcgccctgaccttctgccttgtgatcttttgttgcccttgaagcatgtgatctctgtgacccacaccctattcatgcactccctcccytttgaaaattgctaacaaaaacttgctggttttatggctcagggggcatcacggaacctgccggcatgtgatatctccctcagacacccagctttaaaatttctctcttttgtactctttccctttatttctcagaccggccgacacttagggaaaatagaaaaggatccacgttgaattatcaggggcgggttcccctgataagtttgtgaaggattcaaggattccagcatggtgtagtgaaaggagcatggacctttgaggcagacagaccaggtctgactttgtagttcaccacttactagttcttacacatgttacttactttctctgaacctctgtttcctcatctgtgaaatatattatcatttcctttcttaaatatttcccttcttaaatatttcctttaaacagcaaaaacctggggacataagagtaatctggccctagtggaacaagcacacaataatcagctaaaagaataaataaattcataaatttccttccccagtttggactctagggttagttatttcactggctctcctgaaaaccttcaatttgcctattatgcccaattctgtcaacctccaacccatagtagtcatttgctttcaccattcctaagtttgtactgaaggctgctaaaaaaattacatgaatgttgttggttaccattataaacgtatttgtgatccagggtatttctgtttgcaattcattggatatgtcaccatgaaaaatgccaggtaaatataagatgaaaaggcatgggatttgatattgatggtgaattcttatatcagcaattagagtgcagggctctttcccctttggatctagaagtgggcaggagaagagtatagagatgattccaggcaggatgggacaaaatggtaatagcacattaaaggaactgagaataattcttactcctggagaaatctttcacaaggtggagaactgttgtgtgtctgtagaagaatctggggaatccaatattcaaaaatcacagatgaggaactgaagaactcaagagctaaatatctagaagtagggactaagccaactctagttttttaagctgttgccaatgctgaaagtcattgaaggattgtgaataaaatttcctagttagaaatcataattgttaacttctgaaaagaaaggtttctgtacatgtgccaaatgtttccattcatgtgaacatataaatttgaatgttgttctgtggatcacctgttgaaagctcaaactaaggtgtctggactgtcagtattatgctcgtttggttgccttaccagaaatccttgagtgtaataattacctaaggaaatttttcatgctgtctgcagtgatttatcacaaggaattgtttggtggttttaccacttagaaatctataaaggaaatgaagactgttcactttctgcagaaaacctaacccatgtacttaatgcttactctattgtatttattttatgtacattatacactcttctaaaaccttgaacataggggtttcaagatgaattagtggcagtacccactgaacacagttaacgttccgatgtatgctatgtggaatattccagtgaaagaaaaatatttttaaaggtaatagcaggaccttcatgttaagatgaagtaaaagaagacattaatttccaacagtagaagactcaagtctgcttgagtgtcgcttctagttttccttctacatctttgatgatcctttcccagttttccgtcttttatactgatttctttccatccccttaaaattacacctccccagcccctatccagatctctgctccttttttccctacatactctcccttgtttattatatctatgcccatgactccaactaccacttaattactaatgattttgaattttatctacaacattgactgctctataaaattccagatgtgtattcccaactatttccttcaagtacttaaaatttgatgtctaaaattaacttatcctctcacattcacttcaggacttgctttttccactataattcccatctcaataactttcattactattcacctaataatgtaaattggaaaacttgagttatccctatttttcttcctcatgacccattactttttttgtttgtttttggagacagagtcttgctctatcgcccaggctggagtgcagtggcatgatctcgactctttgcaacctctgcctcccaggttcaagtaattctcatgcctcagcctcctgagtagctgggattacaggcatctgccaccacacccagctaatttttgtatttttagtagagatggggttttgcaatgttgccgagggtggtcttgaactcctgagctcaggcaatccacctgctttggcctcccaaaatgttaggattacaggtgtgagccactgcgccagccccattaatttccatgtcataaagtcctactgattgtcctctctagagatctcacagatacacctgccaacccccccatcactcccccaccacatcttcactgtgaccatctcattagggcctcattatttttcacatggactatggtatcagctttcaaactggtcttcccactatgagcaattcttcattcatgcctcctcccaataccaccasggttcttgcttgaaaatagagacatcaaaatgtctgtcagtctttcaattaaaactttcccaaaggttccccattgcttatggagtaaagtctagataatttagaactatatcctagtttgtccccaaatctgatattaacttttcttaatctcatctccttatattactccctacctaactaccaatggtcacgtcaaaaccatccctatcacactctaacttagcctacttccttaatttcttcttttctttgcacaccctcttctttctgccttggccaaaccataaatacctacatatttctatcagtcgaggtcctcaagtccaaactatactcattctagcaaaaggacatttattataggatactggtagttcacaaaacatattgagcggtatgaagaagcttacaaagttcccagaagagtcagggacttttgtgtactcagatgccaagaacaatacccaaataccctagcctcctctttctgactcaacatcacagatttccccacccctgcattgctcacactaaagctctacttctgtctccaaaaggcaaacccacacacctaccacttccattgctcacctatatatcaatgtctcctgtttacccctctgactgctggaatctaggtaataggcaagtgtttagctccaagtgagtctggtgaagaaaggtttttgccttctatattggggatgcaagaagtttcccaaccattacaagagtgtttaaacggtctaggcagctagagaatctggcaactacccacaacatccttcctctttgatggccagatttatatttcccttccaaaactaatcaccagattccttcaggcaattggctctcaatctcatgaggcatacccctgccatggccctcagcatgctgtactggaattatgcatttgcatttccctcacttataaattccaaaaaaatccttgagcatcatgggtatgcctgatctttctttacattattctcttctccttatttaacatatagccaatgtctggcagatggcaagcacttaataaattttctttttggaaaaagtgagtaaaaattggagtcataattcaaatgttctttatctgcaaatattttagtgatatacctttagctgaattcttttacttaatattcccaattcaagggaagattttcaactctgctgcaataatatagcattttaatacacaaagtgtttaaccaatactaaaacccttttaaatagtatgtggttttctaatatgccctagcaaagctggaactctagcatgagtgttcccaaagcttaacaaaacacaagcaatttgaattcaggattccatgatgtcattaacaaagatgtgactttgaaayggaaacagaatagtggggaagatttctgagaggagacttcaactgtaaaagtcattttaaatgaattctatttgtttcgttaataatcatgggatttgcattgatgttacattgcctttactttaaagcagtctccatggatctgctgacagcttcatgagctgattgtgacaacagtctatgtccaatgaaaagaaatgggcaagtagggagtacgtatttttataagtgaacataaagagaacaatgaatatgcaagttccctttctacctttgaaatatatatgcttagctttttgaaagaaaatttggtcattcagagccaattcaaggtatttaacgtccatctttgatagccatttagtctaaattgtgaatccattagttctgtgagaaaaacaattcacatagagcctgaatggtccctccctgcccctgttccctaagttgtggccctaattccatggctctacagtcttgtagagtagacaatgtatgtgagggatgaggggtggtgtaggggagacataacacaacaaataccaaatatattagaaaacacttgcttgaaaaatgtgcatctcagatccaccttgatcattgagaataaaggaaaaaacaaagtcaatttttatattcaaacccactcttctccccacatttttaaagatgaaaacaaaagaaaatgagaaactcaacactgagccaagatcattcattctctctcaagtaacaaaacttctttaatatgaaaggaaaaccatactaacttccctatcctaaaggcacttactgtattcatgagcttttcattaaagagaagaaagaatctagttcaaattcctacaatatttatcatcacaggcactatacagggctagtttaaacgtactgagagcatttcagttacaatatagataatccgctttccaattataacagctcagtttaatttcatggtagacttggcgagtgaggaaggatagacaggcattcatccatagtcttgatacagttcttggcttaatttcaccaatatacagggtgagctatgaggaaccattaattaatgtccaaaagaccatgtggaagatggatgtttattcaatgaaatgactattttctcagcctgtttccacactgtgtgaataaggattttccatcaaatgaagaaaagagaacttttcagaaatgtctgtgcttctaaacattaggctgaaattcagacagttctcctaataaattctgacagtgtttatacatgtttttaatctaatcatttatgtattcttttttcttctaaaataattaatctgttaatgcttgtagctttggcaaatagcagaattgtgtttttacagctatggttgccccagcctatacatagttgtcacttctgttttcctacaatacttcagcactagatttctcttcctcaccctttcatctgcatccttccttgctctatttttcttcctttttctctttccctctcttctgttcttctacctttctccattagctattatcataatatagaactgagatgtttttatttatgaaatatcttgcaccttaaataaagtggaaaccatgataatactaactacgttgggttcttgtgaggattaaataatatacataaaatgcttagaacaatgccaaggagagatgaaaagctatgtaaggataagttagcaagaattatcttgatttttggtagttattgaataacattttataatccttgttattaatttagaagagaatgtgtaaacaatggtttttcatctattgaggacagcaacaaaagctctaccctacaccccagaaaactgcctatatacacaacattttgcacattacatcagagctctcatcgatatctttcatccctctattgactccttagttgcccataaaccttacttaagaaactctgctcgatagagaaaaagttttcctaccctgactagtaccagattacacaaatgaaaaacaagctatgtgcttagaacactaccaagcgggtgggagagagggtagaggagggagagagagggctctttgaaaaaaattggttattgatacttctataaataaataaaatatttaccatggggaaaaaagtaagacaatgtggcatgtttttgtacttcttttagggtttggcattattttattttgcattacattggaggagttcatttttttaggtgtcagagccatgatccatccataccctgcctgaagactgaaaatggtgtggtcaagtggaaacagcagagattctgcaagcaagagaactggagtttgtgtttggattctctttttccacttccttgctttggacaaggcactacatctctcagaacccttgcttccttggctctctgagggtaagatcacctacctcttatgcttattggggagaatacaagatcggtgtggtaaggtgcttaatagttacaggttcccttgactttgtttttttaacagtaaaattgtgctgaataaatagatcatggtgaagcgtgttgctcacattattttaatggcaattttagagactgtcactccatgatttctgtgcattattgatcatgagtgacaggttttgtatttttttaactgcaaaatttgaaattagaaatattatcatagcatactgttgctactctgagaattgagacatccttaaacaacagaaggaaattgtccatgtgactattttcttttattttataggggaagatatggagaaaaaaaaaggctgagaataggacaagaatgaaaaggcaaaactgcaatttcacataaattccttctgcttatgccatttgcagtaattaatgtactgtaaataggacaattttttgtattttataaataaattttcactgtgaggaaaaagtgccatttcctttacttcccatccacatattgtgccgaaagtgcactttttattattattattctgtacttttaaatatttctacacaatttatcaaatatccacccagaaaccctaaatattgaggtggatatctctgaaaacaattgtcagaattcctttccttttgaacacccatcccaccaggcatgaggattaaaggcagatatttgggtatcatgtgattctcctttgggagataatgacacacatgcagaggctgaacaatgtaaataggctaacatcttggaaaatcatcccaaaaaatttgtgtataaggatttaaagatttcttctctttcttttttcctttctaaccttgatgattactgtacttatcttttcttatttccccactctccctttgacaaaaccaaagatgatacttggttttctaatttccctatctgaagcattctatatgagatatacaagtttcgttctccttttcttcttgtggtgggaagaaagctcacacttttcatttgagacactgaatctaatgaacaataacatttatatgaaatgccacctattccatcaataagcattattgaagatctattatatgcaccaacattaggcactaggggcacaaatatatgttagatataattagtgtcctttacacatgaactgtctaagacgagagacaaatgtttaagtaagttttataacaggaatacactctttaatacaggcatgcactcaggagtttgctgacacagagaatgacatgatgaattctgcttaaaagaaaggggtatgagagatacgatctcaggaagctaagatgtggaaaagaatcttaaaaggtgagggaagactagatcattggaaacacccctccaatgagggacaaactggacaagctgtttaaaacaacttgttgagaaaagctggaaaagttgtttaaaacagctgctttaaggcattgaactgctaacaagggattaaacaactttaacttcaaggaactgggagcagacagaactgcagagaggtaagcctgccatttgggtattccttctcctttaagacatttgtcaagcccaaatgagggaacgaagaagctgagaagttgagcaaaatgtctgacagtttcctaagtctaggagaacaaaattgggagtccaggatcaccaaagaaagtgagagcctactcaccatgcaaggctgtggagtgggaccttgaggagttgcagaggaagagtcaaggtaagttggaaaaacattattcctcccagggactccaatccaagtgccaggcacatggtgatatgcaataaatgattgttgaacaattgattaaatgatcacatctgtgaatcaagggagtgatggcccctcttctgccagctgccccatcagagagcacacaatagctggatggccaagtggcagaaggcaagttggcaccaagtgccaaaagaatgtgaatccacagagtcagggttctgaggtaggaggaattaggcaacaagagaaagagggtggaagggacatacagctaagaccgggatatacagctaagaccatcatctctagccaactctgttccacttggaaaacaggagagagagtggggagagagagagagaaaagagtgtgtgtggaaagagagagagagatggggagagggagggagagatggggagaggacaggaagagtggggggatggtggtagaccacaacttagttaagaaacagggcaaacttcattatattacatatcaatcatagttttctacacttgtacagaaaatttactcctgaaatccactacaatattaactattaatatcaatttcaatttgcaccacactggaactagtttcattttaactatggtctgtggggatctcgatctctcttgatttctaatcctactctagatccccattatttaagggcttgaatctccaaattaaactgttttcttacctgattgaaattgttttccttccttgttaaaacttatccacattctaaaaacttaaggtttcatgttaaccactcagaagtgagagttgttcaaatctgtgcatgattttctgaaaaattagagttgtgagtgaacaaaggccaagttttcattttgtagctgaatgataaatgaggtgaaactaggatagcttttataaaaaatgcaaaataaagatttgtctttctcttcctctcatgcttagaagaataagctgagtgccctaaaaagcatatttattcaaacagcaaatctggtcttattgaactgttctctgtgggtgccacatgtttacaaatatccttatcctaaatttctttcttttctctcaagctaatatcctgtatggtgtgcattaatgcaaaattgtttaaagggtgaaaaatcaaaagtcaggaaatgcccagttaaggatcttaagaacagtgagaacttggccacactgcataccctgggcaaattatgacacagtttttaccacatgaacagaactgtattgaaggtataaatttaacaaggaaaagaggaatagaaaaattacattcaggccacaacacccacgtaattagggtgtagaagttttggaatttcctgacaacttttctaaagtttggtctttgcacagaaatattgtggtaacatagttttttcatttaatttccacgagtttacaagagaagaaagcattctagagaaatcctcaatttagcagttcctaagctcaatgttcttaattcatgtatctttatagaactgcaatggaacaaaaccaatcaaagcaaaagattaatatgtctttataggctttcattctttacattgtattgagattttttcctgagctatgatgaacatactgctaaagtgaagttttaagtttgtcatttggaaatgtgaaagcataggcatttgtgctttaaaaaaatttttttgagcaaaaaataaatggttaaaggcgagtgaagaagaatctgaactgaggaaccctcattcattctcattttctttcccagccaaagtcttaatggttgaagaattaagtttacacaaggataactctttagtacgctttctcgctctatatgtgcaaataataatcacatgtagtaatgtggtttcctagataaggtcagatgaattcatttgtatcttctgagaattaaaagtcagtggctatttaaacacaattttcctaccaactttccaaagaacttgtagatttccaacaaaattatttgtgaaattctgagtgtgaaaaataatgtatttttaattttatgtaggtgtatggatgcaactactccatcattaaaacattttctgaattgcagattcaaatgtataaaaaagattatgcagattactacgtttaatctagtttcataaaaagggtagaaattaattaattaggcatttatttcttaagcagggtgagaaaattccatatacagaattgtaaaacttattacaattattattatttttattacatttttaacttaaagtttgtattttctttttaattatactttaagttctagggtacacgtgcacaacatacaggtttgttacatatgtatacatgtgccatgttggtgtgctgcaaccattaactcatcatttacattaggtatatctcctaatgctttccctccccactctccccaccccacaacaggcccctgtatgtgttgttccccttcctgtgtccaagtgttctcattgtttaattcccacctatgagtgagaacatgcagtgtttggttttttgtccttgtgatagtttgctcagaatgatggtttccagtttcatccatgtccctacaaaggacatgaactcatcmttttttatggctgcatagtattccatggtgtatatgtgccacattttcttaatccagtctatcattgttggacatttgggttggttccaagtctttgctattgtgaatagtgccgcaataaacatacgtgtgcatgtgtctttataacagcatgatttataatcctttgggtatatacccagtaatgggatggatggatcaaatggtatttctagttctagatccttgaggaatcgccacactgtcttccacaatggttgaactagtttacagtcccaccaacagtgtaaaagtgttcctatttctccacatcctctccagcacctgttgtttcctgactttttaatgatcaccattctaactggtgtgagatggtgtctcattgtggttttgacttgcattactctgatggccggtgatgatgagtattttttcatgtgtctgttggctgcataaatgtcttcctttgagaaatgtctgttcatatccatcgcccactttctgatggggctgtttgtttttttcttgtaaatttgtttgagttctttgtagattctggatattagccctttgtcagatgagtagatcgcaaaaattttctcccattctgtaggttgcctgttcactctgatggtagtttcttttgctgtgcagaagttctttagtttaattagatgccatttgtcaattttggcttttgttgccattgcttttggtgttttagacatgaagtccttgcccatgcctatgtcctgaatggtattgcctaggttttcttctagggtttttatggttttaggtctaacatttaaatctttaatccatcttgaattaattttagtataaggtgtaaggaagggatgcagcttcagctttctacatatggctagccagttttcccagcaccatttattaaatagggaatcctttccccatttcatgtttttgtcaggtttgtcaaagatcagatggttgtagatgtgtggtattatttctgagggctctgttctgttctattggtctatagctctgttttggtaccagtaccatgctgttttggttactgtagccttgtagtatagcttgaagtcaggtagcgtgatgcctccagctttgttcttttggcttaggattgtcttgggaatgtgagctcttttttggttccatatgaactttaaagtaattttttccaattctgtgaagaaagtcattggtagcttgcatccaaggatggcactgaatctataaattaccttgggcagtatggtcattttcacaatgttgattcttcctatccatgagcatggaatgttcttccatttgtttgtgtcctcttttatttcattgagcagtggtttgtagttctccttgaagaggtccttcacatcccttgcaagttggattcctaggtattttattctctttgaagcaattgtgaataggagttcactcatgatttggatctgtttgtctgttattggtgtaaaaaatgcttgtgattttcgcacattgattttgtatcctgagactttgctgaagtcattaaggagactttgggctgagacgatggggttttctaaatatagaatcatgtcatctgcaaacagggacaatttgacttcctcttttcctaactgaataccctttatttctttctcctgcctgattgccttggccagaacttccaacactatgttgaataggagtggtgagagagggaatccctgtcttgtgccagttttcaaagggaatgcttccagtttttgcccattcagtatgatattggctgtgggtttgtcatagatagctcttattattttgagatacgtcccatcaatacctaatttattgagagtttttagcatgaagtgttgttgaattttgtcaaaggccttttctgcatctattgagataatcatgtggttttttctttggttctgtttatatgctggattacgtttattgatttgcgcatgttgaaccagccttgcatctcagggatgaagcccacttgatcatggtggataagctttttgatgtgctgctggattcggtttgccagtattttattgaggatttttgcatcgatgtttatcagggatattggtctaaaattctctttttttgttgtgtctctgccaggctttggtatcaggatgatgctggcctcataaaatgagttatggaggattccctctttttctattgattagaatagtttcagaaggaatggtaccagctcctccttgtacctctggtagaatttggctgtgaatgtgtctggtcctggactttttttggttggtaggctattaattattgcctccatttcagaaactgttattggtctattcagggattcaacttcttcctggtttagtcttgggaggatgtatgtgtccaggaatttatccatttcttctagattttctagcttatttgcatagaggtgtttatagtattctctgatggtagtttgtatttctgtgggatcggtggtgatatcccctttatcattttttattgcatctatttgattcttctcacttgtcttctttattagtcttgctagcagtctatcaattttgttgatcttttcaaaaaaccagctcctggattcactgattttttgaagagtttttgtgtctctatctccttcagttctgctctgatcttagttatttcttgccttctgctagcttttcaatttgtttgctcttgctcctctagttcatttaattgtgatgttagggtgtcaattttagatctttcttgctttctcttgtgggcatttagtgctataaatttccctctacacactgctctgaatgtgtcccagagattctggtatgttgtgtctttgttctcattggtttcaaagaacatctttatttctgccttcatttcgttacatacccagtagtcattcaggagcaggttgttcagtttccatgtagttgatcagttttgagtgagtttcttaatcctgagttctagtttgattgcactgtggtctgagagacagtttgttataatttctgttcttttacatttgctgaggagtgctttacttccaactatgtggtcaattttggaataagtgtggtgtggtactgatgagaagaaagtatattctgttgatttggggtggagagttctgtagatgtctattaggtccacttggtgcagagctgagttcaattcctggatatccttgttaactttctgtcttgttgatctgtctaatgttaacagtggggtgttaaagtctcccattattattgtgtgggagtctaagtctctttgtagatctctaaggacttgctttatgaatctgggtgcttctgtattggatgcatatatatttaggatagttagctcttcttgttgaattgatccctttaccattatgtaatggccttctttgtctcttttgatctttggtggtttaaagtctgttttatcagagactaggattgcaacccctgcctttttttgttttccatttgcttggtagatcttgctccatccctttattttgagcctatgtgtgtctctgcatgtgagatgggtctccggaatacagcacactgatgggtcttgactctttatccaatttgccagtctgtgtcttttaattggagcatttagcccatttacatttaaggttaatattgttatgtgtgaatttgatcctgtcattatgatgtttgctggttattttgttcattagttgatgcagtttcttcctagcctcgatggtctttacaatttggcatgttttgcagtggctggtaccagttgttcctttccatgtttagtgcttctttcaggagctcttttggggcaggcctggtggtgacaaaatctctcagcatttgcttgtctgtaaaggattttctttcttcttcacttatgaaattctgggttgcaaattcttttaagaatgttgaatattggcccccactctcttctggcttgtagagtttctgccaagagatcagctgttagtctgataggcttccctttgtgggtaacccaacctttctctctggctgcccttaacatgttttccttcattgttgatgtgtctaatattgacagtgtgggagtctaagtctctttgtaggtctctaaggacttgctttatgaatctgggtgctcctccattgggtgcatatatatttaggatagttagctcttcttgttgcattgatccctttaccattatgtaacacctttctttgacttttttgatcttcgttggtttaaagactgttttatcagagactaggattgcaacccctgctgtttttggctttccatttgccttattttgagcctttatttccattcctttattttgagcctatgtatgtctctgcatgtgagatgggtctcctgaatacagcacactgatgggtcttgactctttacccaatttgcagtctgtgtcttttaattggggcatttagcccatttacatttaaggttaatatttttatgtgtgaatttgatcctgtcattatgatgctagctggttattttgcccattagttgatgcagtttcttcatagtgtcaacagtctttacaatttggtatgtttttgcagtggctagtactgatttttcctttctatatttagtgcttccttcaggaactcttctaaggcaggcctggtggtgacaaaatctctcagcatttgcttgtctggaaaggattttatttctcctttgcttatgaagcttagtttggctggatatgaaattctgggttgaaaattcttttctttaagaatgttgaatattggcccccactctcttctggcttgtagggtttatgccaagagatccactgttagtctgatgggcttccctttgtgggtaacctgacctttctctctggctgcccttaacatttttttccttcatttcaaccttggcaaatctgacaattatgtaccttggggttgctctcctcaaggagtatctttgtggtattctctgtatttcctgaatttgaatgttggcctgtcttgctaggttgaggaagttctcctggagaatatcctgaagagtgtttcccaacttggttccattctccccatcaatttcaggtacaccaatcagatgtagatttggtcttttcacatagtcccatatttcttggaggctttgtttttccttttcattctttttaatcttgtcttcatcctttatttcattaagttgatcttcaatctctgatatcctttcttccacttgattggttcgactattgatatttgtgtatgcttcacaaagttctcgtgctatgtttttcagctccatcaggtcatttatgttcttctctaaactggttactctagttagcaattcctctaaccttttctcaaggttcttagcttccttgcattgggttagaacatgctcctttagctgggaggagtttgttattatgcaccttctgaagcatacttctgtcaatttatcaaactcattctccatccagttttgttcccttgctggtgaggagttgtgatcctttggaggagaagaggcattctggtttttggaattttcagccttttggcgctggcttttcctcatcttcatggatttatctacctttggtctttgatgttggtgaccttcggatggggtttctgtgtggacatcctttttgttgatgttgatgctattcctttctgtttgttagttttccttctaatagtcaggcccctctgctgcaggtctgctggagtttgctggaggtccactccacaccctgtttgcctgggtatcaccagcagaggctgcagaacagcaaagattgctgtctgttccttcctctggaagcttcgtcccagaagggcacccaccagatgccagctggagctctcctttatgaggttgacccctgctgggagatgtctcccagtcaggaggcaagggggtcagacacccacttgaggaggcagcctgtctcttagcagagcttgagcgctgtgctgggagatccactgctgtcttcagagctggcaggcaggaacgtttaagtctgctgaagctgcacccacagccgccccctcccccaggtgctctgtcccagggagatgagagttttatctataagcccctgactggggctgctgcctttttttcagagatgccctgaccagagaggaggagcctagagaggcagtctggctacagtggctttgctgatctgcagtggggtctgcccgatttgaacttcctggtggctttgtttacactgtgtggggaaaaccgcctactcaagcctcagtaatggtggacgcccctccccccaccaagtttgagtgtcccaggtcaacttcagactgctgtgctggcagtgagaatttcaagccagtggatcttagcttgctgtgggctccataagaatgggatccactgagctagaccacttggatccctggcttcagccccctttccaggggagtgaatggttctatctccctggcgttccaggtgccactggggtatgaaaaataactcttgcagctagcttggtgtctgcccaaatggctgcccagttttgtgcttaaaacccagggccctggtggtataggcacctgagggaatctcctggtctgtgggttgcaaagattgtaggaaaagtgtagtatctgggccggaatgcacagtccctcacagcacagtccctcacagcttcccttggctaggggagggaattccccaacctcttgcacttcccagctgaggcaatgccccactctgcttctgctcaccttccatgggctgcacccactgtctaaccattcccaatgagatgagctgggtacctctgtgggaaatgcagaaatcacccgccttctgtgttgatctcgctgggagctgcagaccggagctgttcctattcagccatcttgcccagcaacaaaacttctacttggttaaagttagaattttattcttaaatttattaaacattaatattaatgcttattattaatcacagttctttttcctgaatagcaatgatatcagcagctaatgcttattgacttcttacattgtgctaagccctttgcttatttatctcatgtragctactcaaaaatcccatattggagatgttattactatccattttactgaaatggagatagctgcttaacagggtttaggaactcacatagtaagtgcgagaaatggtaaaaggtacaccttgctgatgtacactgaattctgtcacattgctggtgaataccactcaatagaaaatatgaaaacaaccacaacatatcttcttcatgatctagcgcaattccagcatctggagagtgaaaagtgtgagaaaaatgaatttagattccagctattccaaatgagaagttgattgttgaagaaacaaacactgaaatgtttgatctttcatcaggggtgtcaatatattacaaatattttaatgttactctaaggaacaaaagggaaaacagaaataatcccttcaccctatgatgtgctaaaaattgagaaatggaagctctcgtttatttggtcaggttacttcctgaaggtgattttgtaagggaaatgtttgtgattgggaaaaggaaattcttattttcttttgtggcatttattcacacatggaataagtgaattgaattttacagtttataatcttgttcacttataaacagccaataagtgggaggtatttgaaaatacaattaaatgaaaacatcatctcaagaactaatattatgtgtctttaatctactgaactttcaattctttactttaaatttattttcatttttgtccaagttatgcattcacatattttaaagagtcaagtactttcacaaggtttcaataaaaaacaaaagttacctgcttcatccactcaaatgtttcccttcccagaggcaccatgatagacatacactgcaatttctgaattttttgttctagtcattgtctatcactcctggtatgaaagatgaagattttgcttttgcaaaatctcaccccactcgtactcctacatatatttctcatcttcatcctcccactgtatttatcatgtgattttgcttagaccatcatttggtttttacatcatactgactctgtaaatcctatttataactaagttgccttatatactatgactatttttttttgcagcattctgtttttcttaaagttagcaatgatgtggtgtttgattgcttagctttgtgtgtacttactactaatacatttcccaattatcctcaagttgtatgtatctctcaggacattaggacaattttatatctctggataaatccttccagagtctgagctgcttcagtctggattgtttgccatctacacctgcattaattatttactgccacaaacttggtgggttaaaatagcacacatttattatttcagactttccatgggttaggagtccaggcacagcatagctgatttccctgtttgggatctcactggattgaaatcaaggtatttgttagggctgaattctcatctgaggctcaggatcctcttccaagctcatgtcactcttggcaggattcagttccttgtagatatgggactgaggccgttggcttctatagaccacccaccattccctgacatgtggtcctcgccacataaatggctgtctgcttctttaaggtgagcaggggagaatctctgatgtttcaaatctctttgactccttccctctatgatttctagactatttttaaaaggctcatctagttaggtaagacttcatcccggacaatctccctattgattagcttaaagtcaactgattagggactttaataacatctgaaaacctcttcattttcaccatataacataatcacaggagtaatatcccatcgtattcacagatcctgcacacactcatgtgaggggattctacagggcacatatatcaaggggtgaaaatcttgcgggtcatcgtagaattctgcttaccattatacctaataactggaagccacccagaactctccattcattatcatcacagagattccctcagcctttctcttgaattgaattctctgtttcctggactttgtgtcttttttttttctcttggtttattccataaatttctagaagcacatcttcaaacagcttcctgaaaaggggctacatgagttttgttttttagacactgaaaatggagttcttgaagttatttttcctcagaatttttagtgtgttgttgcttcattgccttctagcttccactattgttattgataagtttgatgtcttcttatacttgatactttgtatgaaacctgtttttttttctccctgagactttatattgtccattatctgtccccagctttgtgaaattcctcgataatgtgccttggatttggtctactttatccattgttctgggtgctcagtgacatccctttctatcaggacattcatgttcctcatagattctggaaattttattttgaattattttattagtgatttccttttatctattttcactatcctctattcatagaacttcaattattcttttttttttgacggagtctcgctgtgtcgcccaggctggagtgcagtggcgctatcgtggctcattgcaacttctgccttctgggttcatgccattctcctgcctcagcctcctgagtagctgggactacaggtgcccaccaccatgcccggctaatttttttgtatttttgttagagacggggtttcaccatgttagccaggatggtctccatctcctgacctcgtgatccacccgcctcagcctcccaaagtgctgggattacaggcgtgagccaccgtgcccggccagaacttcaattattctagaacattctagataagtctctattttaaaaaatattatctattttcttctctttcttctagtctttctgggagattctcttgattttatcttccaatatatattttttgattttttatgttgtttgagatggagtcttgctctgttgtccaggctggagtgcagtggcaccatctcggctcactgcgacctctgcctcctgggttaaagtgactatcgtgcctccgcctcccaagtagttgggattacaggcacctgccacacgcccagctaatttttatatttttagtagagatgggatttcaccatgttggccaggctggtctcgaactcctgacctcagtgatctacctgcctcagcctcccaaagtgctgggattacaggtgtgggccactgtgcccagggtatcttccaatagtttatgcgatcatattgtctatttctaaggtttcatgttcactggatatttgttttatagtatctacttcttcattgattcatattctctagggatattaatactagttattattaagtttttctttctatttgtattggcatttaaagtgaggtggggtttttttcataaacgtctggcagtccttggctgtctgctcatatttaagagtgaggcaggcgctaaaaagaaggctgggagctcatggcagggggagtgcttctcaatggtgctcttctctctaggataatatttggaaaacttttgatttgagtgtcttgtgcttatttctcttggaagataggttctcaaagaagatgcctttgaccccctccayagaagggggagaatgttttagaatagttgaaattctatgaatagaggatagagaaaatagaaggaaatcagtagtaaaagatttcaatataaaatttctagaatttaagaagaacatatatatctggctgccaacattactgagctatatgagggaagatggctagagatcttaggtcctatacataaggtttatcttagtccccatgttttctgtttggtatctctgttttagttgtacctggtattgcctaattcaaagatcatctgtttatcatccttagagaataaacttcaagtctcctgccagaatgggggatggatatttgttcagatgtataaatttggattggagatatgagggactaaatttttaaacagtctttcaactgattattccacctgccaaatcctgcttctttgtaggagtctgcaatgtacattaggttatttctccccttttccaacttccagattaggattcagctttctcatgtctgttaaatcatttaacccctaccatctgtccaccaacttccaaaatcgtgtcactgatgtctcctatctcatactttgttctcatgtatttatatcttctgtaaacattcctttattctcatttagtgggattctgggagggagaagagctaagtgtatgttcaatctaccatttttaactattcatatgcaagacaatactcaccaaagccccaatgagttttttgaaaggaacatcaccagatgatttgaaagcctgcctgaaggaatacacttgtgagaaagccaagaaatttctgggagaatatataatgggatttccccctacaagatatcaaaatgtattttaaatatatagtcactaaaatggaatcatattggtgattacagacagattaatggaacaaaaacacagcagaccaaagacattcttatatgatcacacaatatttcaaattagtaagaaaagaattaaccaggtaactaatcagctgataaatgatattagaacaaatgactaacaatttttcaatatatacatataacatcagaacaaagtttggggatctggtctccttcctagggtctaacaagagtcccaggggatgacaaaaactccaagagtgtctttcagtgtgtggttgtaactatgccatttttctttgctctggctcttgtggtcctcctgaaggcagctggcttttctgattcaatccctccactacacacacatgtacatgcatatacacatgtgcatgtacacctcctcctcccccagcagatcatgacagccttaactgcagtttccaagctcactgagcttagtatttggttgccagccttatcagaggtcccgcctcttccccaaagccagattgagagcagggcaacatttccactgctctcacaactccctacccttatctactgggattagaaatcctattcctggtggactagactgccacctcactgcttgaaccctctgagccttgatattattcaccctgtctggaaacaagggcctcatatctgtccttgaagcaaaaaactatccacacctccagaagaggaagccctggtgttacagttatctcatcctgattaacaaatcacgcccaaactttccaccttaagcaatgacatttttttttttttgctcaagaatttgcaatttggggctgctcaaaggccgaggactaggatataaaatcatctagaggctagttcactaacatttctggtggctaacgctggttgccagctgggggtctcagctagtgctgttagtcagagcacacatggtctcctcatgcagttgaggcttacttatagcatggagcctgggtctcaagggtgagcatgccaaagagggagagccaggtagagccatattgctttataggacctagctttggaagtcatgcagcatcacttccactctaatctatttgttgaccagtctcaaagttccactcaggttcaagggagaacaaatagattccacctcttgatgggagggtggcatggttctggaggaacatgtaggactggatagattgctgcagccatttttagaaaatatcatctgccacacctggctcactatattaaaaagaagaggaagaaactgaacaaaattgagaaaaaaaatctatagaaagaatcaacgaaaccaaaagtttgttttttgaaaggataaacaagattgatagactactagctagatgattaacaaagaagaaaagaaaatccaaataagcacatcagaaatgacaaaggtaacattataactgaccccacagaaatacaaaagatcctcagagactattatgaagacttctatgcacacaaactagaaaagctagaggaaactgataaattcctggaaaaacacaacctcccaaatttgaatcaggaagaaagtgaaaccctaaatatatctatatcaagttccaaaattgaatcaatcataaaaaagcatattaaccaaaaaaagccccagaccagatggattcaaagctgaattctatcagatgtacaaagaagagctggtactaattctactgaaactattccaaaaatagttaccgatcactaactcattctacaaagccagcatcacactgataccgaaacctggcaaggacacaacaaaaaaagaaaacaaacggccaatatccctgatgaacataggtgcaaaaatcctcaacaaaatactagcaaactgaatccaacagtgcatgaaaaaattaattcaccatgatcaagtaggcaaaatccctgggatgcaaggttggttcaacatatgcaaattaacaaatgtgagtcaccacataacagatttaaaaacaaaacccatatgatcatctcaataaatgtggtaaaagctttttataaaatccaacacaccttcatgataaaaatcttcaagaaactaggcatagaagcaacataactcaaaataataagagctatctatgacaagtgcacagctaacatcatactgaatgggcagaaatggaaatattccccttgagaactggagcaagatgagaatgcccattcccaccacatctattcaacataatactgaaaatgctatgcagagcaattaggcaagagaaagaaataaaaggcatctaaacaggaaaagaagcaagctatctctcttcacagatgatatgattcgatacctagaaaactcgaatgactctgtcaaaaggctcctggaactgataaacaacttcagtaaagcttcaagatataaaattaatgtacaaaaatcagtaacatttctatataccaataatgttcaagctaaaagccagatcaagaatgcaatcttacttacaatagccacacaaaaataaaatacctaggaatacatctaaccaaggaagtgaaagatctctacaaggagaactacaaaacactgctaaaagaaatcacagatgacagaaacaaatggaaaaacatttcacactcatggattggaagaatcaatatcacttaaatggccatactgcccaaagcatactgtagattcaacactattcctatgaagctagcaatgtcatttttcacagaactagaaaaaaactattctaaaattcatatggaaccacaaaaagcctgaacagccaaagcaatcctaagcaaaatgaccagcatcagattacgcgacttcaaactgtactataaggctacagtaacccaaacagcatagtactctacaaaaatggacacagaccaatggaacagaatagtgaatccagttataacacacctagagccatccaatctttgacaaagtcaagaaaaataaggaatgggaaaaggactccctacttaataaatagtgctgggatagctggctagccacgtgcagatgaatgaaactggatctgtacttttcactatatacaaaaactaactcaagacgggttaaagatttaaatataagacctcaaactataagaatcctagaagaaaacctaggaaacaccattctggacatgggcgttgggaaagaatttatgactaggtcctcaaaaacaattacaacaaaaacaagaattgacaagtgggacctaattaaactaaagagcttcagcacatgaagataaactaccaacagagtaaacagacaacctacagaatgggagaaaatatttgcaaagtatgcatctgacaaaagtctaatatccagaatctataaggaacttaagcaattgaacatgcaaaaaacaaataacccatcaaaaatgggtgcaacacatgaacaaacacttataagacataccagctgccaacatacatataaagaaaggctgcatatcactgatcattagagaaatgcaagtcaaaaccacaatgagataccatctcacacaagtcacaatggctattactaaaaagtcaaaaaaacaaccaatgctggcaaggctgcagagaaaagggaacacttatagactgttgatgggaatgtaagttagttcagccactgtggaaagcagtttggagatttctcaaataacttatgacagaactgcctttcaacccaggaatcccattattggacatatatccaaaagaagacaaattgttctaccaaaaagacacttgcactcgcatgtttatcacagtactattcacaacatcaaagatatggaatcaatctaggtgtccattaatggtggactggataaagagaatgtggtacatattgtgggaaagagtttctggggtgccagttgagttggtctctcctgtgtgagacacccatgggaagccatgggtggcctctgaggagaaaagtctccttactgccttcatgtctttatgccccaagagcataaccgctcagtggcattccacaggttgctcggggagataacactcccttgaagcagtggagtacaatcaaacatcttggctcctcctgaaacccgctcccacccatttcagtccccataagttaaagatcttaagtagtttagacacacgcctttgctcaaggaaattcaaagaaaccgccactgctatacatcttattgaatgactcacgagttctccttcactgattaatccttttcctcatcccttcctccccctcccatctgccctaagaacaaagagcttgtaaaccaataaattgggcggagcccgagagctctgggccatgagcaagcctccgagggtccggtcccctggacctgccttttaaacgcttattctgtctctttctaactcctttgtctccgcaggactcggggtaccccctgggtggtgtggggctggttccccaacacatatatgtcacagaatactatacagccataaaaagaacaaaattatctcctttgcagcaacgtggatgaagctgaggccattatcttaagcgaattaatgcaggaacagaaaaccatatactgcatgttctcacttatcagtgggagctaaacattgggtactcatgaacataaagatggtaacaatagaaactggggactactaggtggggaggaagggagggatcaagggttgaaaaactaactattgggtactgtgctcactacctgggtgacgggatcatttgtactccaaccctcagcattatgcagtatacccaggtaacaaaactgtacatgtaccccatgaaactaaaataaaagctggaaaaacagaagaggaagaaaaaatgtttcctttgtttttgtgcattaaaagcccataggcaagaaaatatacagttaatttctcaattaggctaccctgcccatctggtttcatggttgagagacaaatgctaatgaatcctttggtacatcaattaactctgctttgcttcaaggtcatggattaggtccctacatcgagtcagtcaccttgaaaacaaatgatactgcgaacaaggacaaccagacatccctcacaccccgccaaatagaatgtctcggtgtaaatcctttactactggcaaatgatctactaaagagacatcttctgtgcctaaaaatgggcagcccataaacatttacagtgataggagaaggaaattattttcttttttcttttcaaataaatcatttgcacattaccactctattgaactcatttatagaaaacaagatcgcgtttttgttttgttttgttttgtttttgtttaatgaggaacaaaccatgttactgttaaaatgcaacattatttgtcttggcaactacatttggataaatctttatggaggctctattgtttggttttctatcattgctatactttttaaaaatgtgctcgtgaacggttagcaattgcctatcacagtgaacttttcctttgggaactggggatttctgacacacagaactgcatttcctttatattgtgttacaaatacttgataattcaaaccaaattccaggttagtcttagtaaaagacatgcccaacaaatggctagtttctaaaattcataggtgatatatttgcatctggagttggtagaggaagatgtaagagcaaatcttgcatgaagaatagtttagagaaagcttgatttagttatatcctttcttgttccaaataacatttaaactaagtaagcaagctttgtacaatctactaaggatttttcttaagaaatgagtcagaaaataatttgctaataactttaaatatattgtgaacaagaagcatggctcaattaattcccagatcttactttgaaaaatggaatttcctgagagacttgttagaaatatagattcccagggctacctttaagaatttgagtaagtctggggtgacactccagaatctgcattttaaacaatgcccccatgtgaaacggatacaactggacctactaacctacataaaattttatttttagtttttagcaatttaatagaaaactcttactctatgtaaagcaagtattaactcattaaatcctcataactaactaataatgtagggatattgttcccagtctacagatgacaaagctaaaccacagagaggtcaagtaacttgtccaagggcccgcagctgaacccaggcaatgtggctccagagtctgtatttggttgacttttaagagacttaatcacacatacataaaaataaactatataaaattaaatcagcatgtcgagaagaacaaaaataaaatatataaaatcattgaactgtaggatcaatgaccaaaagtctagaggttgtcagcttccctctttctcagacctttgtagctggagttactatagacacaatgctaccaaatttctgagacaaagtggccatacagtatcaagtggtaccaccaagtcttaccaaaagtgctactcaattgttggccattacaattcccataattaccattgtggcaatcatccttatcctttgaattctccactgggactgcctggagctcttctgtgatccacacttggctggcattgtcctagccattgacacctcttgccaactttgtccctgagtggtgggtgtcatttcccataatcccataactactgcctggggtccttctctaagggactcatcatctaccaccacaaagtctgtccttctagtgtctaacactctgaccctgcagccagactacattcctctggccacaaccatggtccagaaccaaacccacatcttttttagacttgacatcctcaacctcacactagcccaatgcctcagagcactcaaattcagaaataagttacgctgctccacaaggatgctttatgggggtatttcacacccgaatatctggaatatgttgatatataactatacttacttgttatcagatctaacatgaccctttccttctctgaaaataaaaaaagccaaaatgaaactttaaatttttaaatttacatataaataatttatgatgcctttgaattagacattttcaacttttgccttaaacagatggggtctgtcggatcccataattttgtttcagaagtttaacttcatgaattgactttatatgaaatatttataaacatcagagatgtggtatagaagatagactcattaaggtcctttttttttttagctcatcaagaggtgctttagaaaactaggacttgttcttagctgcacatggagtatgaaaaggtataaggctaaatgttttattcctcaacatgtgggtcatatataatcaatttgatattgtgtttccttggttttattgcttaattgtatttatatatcatggaaggcagcagaaagaaaacatgtcaattagccattctcacaaaaaaaatttgaagagaaagatgatctgtcaaggtaccatggcatggtggaaaatattattgtcaatggagtcagagagatcagggcaaaaattcaagtttgcaacttcgaaagtttttagcttttcagaaccaagtacaagttaatgaccttattgccatactataaataattcccagtagagaagctggcaaataggcctcactgaagaaagttaactggtttcttaaaactgtgctttgaaccatagaaaaaaatgggagcaggtacatacggaccctaccgtgtgccttttccaaatgtctaaattttgtattatgttattatattaagttatttggggatctaataagctggattgggtcattttagtatttgagatcgtgttaggcgagcaaaagggagagtaattgtgctgtggatgtgaaatgaaagggtcagattagttcaagtcatctctcatttgctggtatactccatcaagaggttaggagatgacaagttgccatgggtgtgaatctccaattgaaccaattaactccacctaattcagagcctcagatgtgggtaatggaggtatagcagaaatactgaactgattacattgaagaggtcaccaagggaagactgcaggggaaaatttatcctgcaagcggaaatccacaacaaaaacaaggaacctgatgacaagtcgacctggaagactcaagttcttacagtaattttgagttttaagttctccctcaagctcatgacttttcacttcatttaagtctactcaagtaactgaggttttgtcaaaggtcaccagtgaaaccttggtcaccaaactcaaaagcttcgtttcaatacttttcctctctcaattcagcggggcttgcctctgctagacacgtcttccttcagaagcattcccttgattctacgacaagtttttactgtaagttcccacttccttttttgtccctttcttacttgttttattcccttcttttcacctcttcaggtttctaaatgagggcacatctcacagcttagtttttggctctcttttattaatatttactagcttttagttagtacatttacacctttggctgctacttttctatttcaaatgttaactctgaagcatggttgaaatttctaaactccttatacacatctctaacagatgtcccactggctcctgaaactttgcatcctgcctgtattagttggttctcatactgttataaagaactacctaagactgggtaatttataaagaaaaaaggtttaattgactcacagttctgtggactgtgcaggcttctacttctgggaaggcctcaggaaacttacctgagaagagaagacaagggaagcaaacaccttcttcacatggaggcaggagagagagcaaagggagaagtgccacacatttttaaaccatcatatctcgtgagaactcagtcactgtcataagaatagcaaggggggaaacttcctcatgatccaatcacctcccacgaggcccctcctccaattcgacatgagatttgagcaagaatacaaatccaaaccatatcaccgccactcttcttatattctctaacccatgctcccaaattccccaacacagctcctctcactcaagttgcccaggttcccaaacttggaatcacctgggacgttgccttgtctttcaccctcttaccttaagaggtgctaattactacagattctgcccgccaaaatcatctaggtctgtgccattcatctgatccttccatagacgctctgtgttaacattacatcatgcctggagctaacacatcccaagagaaatacaggccaaatgtactgggagtccagaggagattattaattcttaaatggaccattcatgtatctgttccagatgataaaaggcaaaaaacactgaatgattaccaatccaaggaaagtcacccaaaagtgtactgaaagactaaaacgaatgttgtgtcttaaatagaagctaattgttgtagaaagaatgatctttacaaataacagggctcttttaaaaacagacagagcaaaagtttcttccctcccctaatcagtcaatggatggtaatgatatgatggcaacataagaacataaatccrtttttccaggtggtttttatggaccttctgaatcagaatcatctggggtagctgttaaaatgctgtttcccaggtttcatcctgtactcttcttttgtagtgccctgggacatccttttaaaayaagttatccctatgattcttatgtacattaaagcttaaacgccactaaaaaataagcaagagaaaaggtcaattacatcaaaatatgataaattacattttttatacttgtctctagttttcaaactttatagttatatcagaaaaaataatgagtaattttaaagtttctagtctctctctggattttcactatatatatcagagaataactcacagataagttcttttaaataattaagaagattctgtaaaaggagaagatatttgaagcagaacttttccatacattttcaaaactactgttaaactcaagagtgacctaaataatctaatgtttttttaattgaaaaagtttttaaaattccagatatgtaggaaaaagataataaaattatgatactattgttcttttttcaaaactcaagttctcttgctaattgttaaggatactgatttatttgaaacacaacatgtttctgcttcataacaacatgtgtattattttacatttttattggcaactttcactgtaccctggtgatttctagaaatccgcatacttccctgctgctaaaagtttccaaaaaataataaacaaatgattattaactcttgatatttttattctatgatcatgtactttataagaagcacttgaaaaagtggagctattaactttagggaaaatagggtccatataccagatctcaactgcagggatattttgttaggtagacagaccatcaagagtagatagaaaaacacccaccacaagtgtattattcccaagaaagagtgtcagcatttggacttccttccgttagcactaaacacactcctaacttttcacctcatgaaaggaatgtcccctgctcatagtgaagttgctatcatggccagtgttgctttttgcacaagtgtctagctcagtggttctcaactgggggtgttttgagcccccaggtgacattttgtagtatctaggtttatgtttaattgtcacatcttgggaaagctactgacatctagtgggtagagcccagggatgctgctaaacatcctacaaagcacaggacagcctcccacgacaaagaaatttaaagtccaaaatgtcaatagtgccaaggttgagaaaccctgggctgaactcagagttccataaattagtgcctatttccataaatttttaggtctgtcagttcctgcttcctgactttctaccctaatcatctgaagcttcagagtttttcatatcaccatattaatggtgactgatctttttgatacctctcttgacccatatcctcaccccgatccttgacctaaccctgtccatccggcagttttgatccttctttatcatctgaaacctctattcagattatttgccatagaattgtctgtccctctctcacacaagaataatcttcttgagtgtgagaactcttaccttagtctccccagcatccatcatggtgcctcaaacataacaggtgctcaatgaatacttgtcaaactaatgaaataagacttgcattgtaccaaacactgatgatgactcacataacataaaacataaccatttccttcaagyacttacatttttgggtgaaggtacacaccagaaaagatagctagcactgtaaaacagtgcttaatgagtaacagatgtataattcagacaataattactataaaagatttctggtgagtgtgagttcccttagaatgcagggaagcagagagtgcctcatcgaatcgaaaactgaaatatacttgaaaggatgaggatgctttgtataagctaggaaatgtggggaggccattccagcctggtgagatgagggtggaaagtagagcataagcaaagcttgtctttgtagaagaattttgccacatagaaccatggcatctaaaagcatgttcatggggtcctcttttgtacttctcacatagtattccaagaagggggagcatacagaaaagcagtggtagaagcccagatgtcatccattaccctagatcacactccctccctggaaggagctcaaatccagtgactgtcaaatagagagggatccaaaagcctggcccccttgcctcaaggcaggacaactttgaagagccatcccagtgctaaagcttcctgacccatgaccattttaactcctccctctttctcatccttccatccattgagcattctccaataaattacttgcatgcaaatttccattttagagtctgtttcctagagaacccaaccaaaggccacaggatgggaaaaacaacctatgctgatggcagttagaaagcttgtggcctgacagcttttaaaactgtccctcttgcacactcagcagttcaggccattgtaagtaggtaaggagtaactggtcaaccttttcgcttactctacagtatctcacttcactccccactgacccctcatatccctaggaattttccccacccaccctttaacaagaccttctctgaaagccttcatcatgggggctaaatgactcatgatactttattctcacctaacaggaattaaggttgtcattcaaccttgattcaaactggataaaagaatcagcttgccattagagactacttggggaacatgagggacctttatggtgccataccacagtgaactacatggtatcagagacgatgctatgaactcaccaaaccccattttcttttttgtcctcctaggagaacaaaacatgtcctcaatgttatagatttcccagccttctctgtgatgcaactaggccatacgactgaattccgagacccacataatgtgggtagaagtgatgcctgccacttctaggcctgttcccttaccgcgtccccacccccgaccccccatacacaattcttcatgctcctttttactttttctaccatttgtttgtagttaatccagttgaatcctaaggtctcagggcatggagccataacatgaatggagcctgagcccctgaatggctgaatgcaatagagcctttctctacaccataacaaccatgcttgggctatgccagagatattttcatgtcacctggatcctagaaaattcaagaaaaagaaaagacttctttgccattataggtatagcaagtggagataatgtaatcaaaggcataatcacttacaaaccaacaaacaactggcatcctatatttagctatggaagatataaatggatcatgtaattatattcacccatacatattacacaccattgcttgtgtgttaatgtgcttaaattttgtttcaaaaacaaaatatcctactgtgatgctctgagtaaacagattcttagcaaaattaatgaacaatgcctgaaaagagaaaacttgaggaaaatgaaccaagattttccctgaaaagtgaaaaataggaaaagatataaggttggttggataaatatagaaattacacgaactagacatttaagaagtgtgttattttaaaggtcaaaataaacaaagcatgatatatattaactcactattaccatgctttctagatgtctatagtccatacttggaaaagaaaatagccaagtgaaaacaggatgacttgcttttctcttttaagcaattattcttttctgtggaaggatttagctatgcttcaattctctggagggactctatttaaaaaaaaacaatttatattgttatacttgaaactatcttcacaaagggctcaaatttgaagtagtagaaaactttggtttcaaacctataaatgcaactaattttattctattctaaattttattatcaaggagcacattgcatattttaagtcattctggaaggaggtttccaaaaaatctttctgttcataggagaatttgctaaacagcaacactttcagccactcactaatatctgagcacctcctacactcattagtgattcaatccactgtgtgttcatgtgtgtktgtgtgtgtgtgtgtgtgtgtgtgtgtatgtgtttctcatcattttgctgcattggaggcagttttatgcctccaatttttaatttttaatttttttgcatacatagtaggtatatatatttatggggtacattagtcattttgatatagtcatacaacgtataataattacatctgggtaaatggagtatgcatcacctcaaacatttatcctttctttgtgttacaaacagtccaattatactattttagttatttttaaatgtataatatattcttgttgactgtagtcaccctgttgtgttatcaaatactagatcttattccttctatctaaccatacttttatacctattaatcttcccctacttgcccctccacccacccacccactacccttcccagcctctggtaaccatcattctactctctatcttcatgacttcaatggttttaatttccagctttcataagtaattgagagcatgagtttgtctttctgtgcctggcttatttcacttaacataatgaccttcaattccaaccacattgttgcaaatgacaggatctcattcattttcatagctgaagagtagtctattgtgtatatgtgccacattttctttatttactcgactgttgatggacacttaggttgcttccaaatcttggctattgtaaacagtgctgcaataaacatgggagcataggtatctctttgatatactgatttcccttctttgggggtatatacccagtagtgggattgctggatcatatggtagctctatttttagttttctgaggaacctacaaactgttctccatagtggttgtactaatttacattctcaccaacagtgtatgagggttcccctttctccacattctcaccagcatttgttactaccttacttttggataaaaaccattttacatggggtgagagaatatctcattgtagttttgatttgcatttctgtgatgatcaatgatgttgggcaccttttcatatacctgtttgccatttgtgtgtcatattttgagaaatggttctttaaatattttgaccatatagagttgtgtgagctccttatatattctggttattaatcccttgttagatggatcatttgcaaatattttctcccattctgtgggttgtcgctccaatttaccagttgtttcctttgctgtgcagaaggtttttgacttgatgtgatctcattgtccatttttgctttggttgcttgtgcttgtggtgtattaatcaagaaatttttagccagaccaatgtcctggagagtttccccagtgttttcttttttattcttatttgcttttttcttttaagaattctacatgcaggatggcccccaacattttcttgtagtagtttcatagtttgaaatcttagatttaagtctttaatccaatttgatttgatttttgtatatgatgaaagataggaatcaagtttcattctcttgcatatggatatccagttttcccaacaccatttattgaagagactgccctttctccaaggcatattcttagcacctttttcaaaaatgagtgcactgtaggtgtatgtatttggttctgtgttctctaatctgttcaattggcctatgtgtctgtttttatgccagtaccatactgttttggttactatagctctgtagtataatttgaagtcaggtaatgtgattcctccagttttgttctttttgctcaggatagctttggctattctgggtcttttgtggttccacataaattttaggattgtttctcctatttctgtgaagaatgtcattggtattttgatagagattgcattgaatctgtagattgctttggataatatggacattctaacaatattgattcttctaatccatgaacatggagtatctttcaatttttttgtgtccttttccatttctttcatgagtattttatagttttcattgtagatatctttcacttctttggttaagttaattcctaagtattttacgttattagtgactattgtaaatgggattacttttcaatttctttttcagattgttcactgttggcatttagaaatgctattgatttttgtatgttgatcttgtattctgtagctttactgaatttatcagttctaataatttttggtcaagtctttaggtttttccaaatataaggtcatattatcagcaaacaatgataatttgactttttcctttccagttttgatgccctttatttctttcacttctctaattgccccagcgagaacttccagtactatgttgaataacagcagtgaactgggtatccttgtcatgttccagatcttagatgaaagacttttagtttttctccattaagtatgatactagctatgggcttttattatattgaggtatgttcattctatacttagttttttgagagtcatgaagggatactgaattttatcaaattttttcagcatcaattgaaacagtcatacggtttttgtccttcattctgttgatacaatgtatcacattgattgatttgaatatgttgagccatccttgcatccctggggtaaataccacctggtcatgatgaatgatctttttaaggtatggttgaatttgatttgctagtattttgttgaggatttttgcatcaatattcatcagagatactggcctgtagttttctctttttgatgggtccttgtctgactttagtatcagagtaatattggtctgatataatgagtttggacatattcctcctctattttttgaaatagtttgtgtagggttggtaatagttcttctttaaatgttttgtggaatttggcagtgaagctattgagtcttggactttcctttactgggagacattttgttatggcttcaatgtagttacttgttattggtctgttcaggtgttttatttcatcatggttccactttggtagtttgtatgtgtctacgaacttacccatttcctctagattttccaatttattggcatatagttgctcacagtagccactgatgatcctttgaatttctgtggtatcagttgtaatatctcttttttcatctctgattttattttctccctttttttgttcactagtctggctaaaagtctgtcaattttgtttatcctttcaaaaaatcaactttgtagtttgtcgttattttatattgttttcttcattttgaattcatttatttctgttctgatttttattattccttttcttgtactaatttggggtctggtttgtttttgcttttttagttctttaaaatgccttgctaggttatttatttgaagtttttcttcttttttgatgtaggcatttatagctataaatttccctcttactactggttttgctctatactataggttttgccatgttgtctttccattatcacttgtttcaaaaatcttttcaattttcttcttaattgcttcattgacccactagtcattcaggagcatattgtttaattcccatgtgtttgtatagtttccaaaattcctctttttgttgatttctagttttattccactgaggtcagagaagatgcttgatattacttcagttctgttgaatgttttaagacttgttttgtgacctaacatatggtttatccttgagaatgatccatgtgccaaggaaaagaatgtttattctgcagcctttggatgaaaagttctgtaaatatctgttaggtccatttgggctatagtgcagattaagtctggtatttctttgtttagtttctgtctggatgataagtccaatgctgaaaatggggtgttgatgtttctggatcttttattgggttctacctctgtctttagttctaataatatttgctttatatatctggatgctccagagttgggtgcacatatatttataatctttatatcttgttgctagattgacccctttatcattatatgaggaccttctttgtctctttttatagttttttcttgaaatctgtattgtccaatataagtatagctcctcctgctcttttttggttttcactgacatggaatatctttttccatccctttattttcagtctatgtgtatctttacaggtgaagtatgtttcttataggcaacagataatgggatcttgtttcttcatcctgcccagggcagttccagtaatgctgtccaagagctaaggcctggactcagggactccaagagcctgcttgttgctctactgcaaggtgaccaagctggtacctaaggtgcaaaacaaagtcccctttacttggagtctttccttgtagccaccacagctgggaacatgctaggtcacacctacagtcagcacattgcagtgcccaaggcccacagtgtactacctgatggttgctttgggttattcatggcccaagtctctttagtcagcaggtaataaatcctgccagcactttgtccttcccttcaaggcagctggttcacttttggccccaagtgtgtctagaaatgttgtctgtgtaccagggcctggaatggggtcctcatgactctgcccagtgccctatcctactgtggctgaaccggtatctaagatgtaagacaaagttctctttactcttcactctcctccccttaagcaaaaggaaggggacactttcattgctgcaagtttcactgcctggggtttgaggaaaagtggtataagcaatcctttagctatcccagctggtatctccctaggtcatgtgccaccctagtcctccagctctgagtccagcccagggctaagagttgcctaggaattgcaggccttttgccctagactgctatcaagtttacctaggaccccagagcactttggcctgatgtggcaagacttgccgagaaacttgagttcagaccaatagaatgggaaattcccctctggctaggtctagtccaaatgctccctccatgcacaggcaatggctgagcccaacatggctttgctctctgctatgacaaggcagcactgagttcaatgcaaagtcccccagacactgtgctctccctccccgaagatcacagactctctgcactgcacagccactggcagaagatgggagagtggtggtgttggtgatccaagactgtctctctgaccctcttcaatgcctctttcaatgatatgaagtcaaaaccaggtactgtgattgcccacttgattttttggttcttgcaatggttcttttctgtgtgcagatagttgttaaaatttgatgtttctggtggggtacaaaccatgtagactacgattctgccatcttgctccaccccctctgagttctcattactcattattggcctttcaggttttagattttttcatggttcaatgttgctaggttctatgtgtctaggaatttatgcagttctcctaggttatccaatttatcgacatatacttgcttatagcaacctctatgagaaatttaaccttaaatttctgtgggataagttgtaatgtctcctttttcatctctgattttatttcttttggtattatccatttttttcttagtctggctaaaggtttgtcaattttgtttatctttacaaaaaaccaactttttattcctttgatcttttgcattgttacttcatttcaatttcacttatctctgctctgctctttattatttccttttcttctactaattgtgggttttgtttgcactgcttttcccactcttcccaatctctccctgtggctgtcactgccccaggcctgtgacaaatactgcctgactactgccaatgttcattcaaggtccaagggcccttcagtcagcttgtggtgaatgctgctggcctgggactctcccttcaaggcagtgggctcacctctggcccaggacagatctagaaatgccatccaaaagccaaggcctggaactggtgactccacgagctcccactgtgtccaagcttgtacctaggctgcaaaacaaagtctcctttactattccctctccttttctcaaaaagaaggagtccctctacacagtcaattcagctggtaatgtgcctggttacatctaaagccagtacttctctgagtccctcccaaagccgacagcaaatactacctgggtactgctgctgattatttgaggcccaatggctctttagtcagcaggtgattaatcctgcctggactgggtccttctcttcaaggcccagggtgtatctagaagtgttgtcttggaggtaggtcctggaatgagggcttcatgactctgcctggtgctctatcctactgtggctgtgctggtatccaagttgcaagataaagtcatctttactcttccctctcctctcttcaagtagaaggaaggaatgccttccagatttgcaagctgcactgcctgggtttggggatgaggtggtacaagcactcccttggccaccccagctggtgtctcactaagccatgtgtccccctccaaggccactggctctgagcccagcacaccaccaggacttgcccaggaattgacttcctgtggcctagattgcctttcaagtttatttaaaaccccagagcactttagcctgcagtggtgaggcttgccacaactaaggtcccagttgctgggatgggtagttcccctctggctagggctggtctaaatgctcaatctatgagccactgtggtagggcagcacagaattccaatgcaaagtcccatgatcactatgttctccttcccccaagtgcacagattctctttccatgccacgcagttgctgctgagggatgcgggaggagtggtgttagcaattcaagactgtctctcctaccctcttctgtgcctctttcagtgatttgaagttaaaactaggtactgtgatcactcacttgatttttggttcttatgaaggtgcattttttgtgtggatagttgtccaattttgtgttcctacaggaaggacaatcagtggaggcttctattcagccatcttgctctgtttcctcttttatgtgtctttttatttggaatcctacactgcctcagggcaaaaaatgcactagataggctaagacacaatgaatggatattcaagcagctatacatataaacttaagtttatatttctggtagtatatatttatgccctgtaaataaaacgtgttgataaattctatttctcttgatttatataaaaatgcaaaaaatatgatgcatttataactgcagcatcgtcaagtatatttctgactgaagatgactctaagtaggtatcaatgagaaccaaatccaatgcatacaattttacacatctaacgattagaaagattgtccacagacaggcttctggctacatacatttcaaatcttgcttttcccccactacttgcatactttggtgacaagtaacatggggcacactcaggtcacaatacaatctctggtctcgtgcattgggtcacaacacagggtggctcagcaccgtggacagtattcctggaagcctttcctacaccagagcaactagtcataacatacacagaagtgactggtaatcaataagtatattccaccaatgaactgtgcgggtgtcaaagtgcatgttcctgctgggaattttaaatctgtatctttcatctatgagtaaagataattgaaagttattttatatccccaacttaactttcccttagttagatcccccaaaagcccacagctgctcaaacatctctcattttgaagggaagtgtgatggaggggcttttgaaacgggaagggacaacagtcttagtcaactgtggttaaattatctcactttttcaagttttacagaaaaaaatatgaagacatccccagggctcctctcagcattctggaaggaactcatccagtagtgggtcctcaggcttaagcttcatcagcttcagggtgttcctacttctacatatgggttttctttatttccttataaaaactttgtattatggaaattttcaaacatatacagaagtcatgatgatatataattactcaccatatacttattactcagtttcaacaactatcatctcagggcccttcctatttcctccatgaccctgtccactcttctcttccctccccacaccacaattattttgaaacaaaccctacacttacatttcacctacaattatttctgtacatacatgtttaggtttatatttcttatatggggttttatgccaaatctatcagtggccataattaaaatgaatgttttgacttttacaagaattatatttatttctactattttcataacaggaaccaaatctattcaacactactcacttttaacatttacaataaagatgagtgctcactttgacagcacatatacaataaagatgagatttcatttgaactgacaatgaccttttttttcacaataagctgtgaataaacttctgttccatgaacccccatgtgttttatttttatggctaataatagtcgttaatcaatcatcacacatatatacatacaaatcacacagaaagacacatgtaatttttcttcctgtatctcacttctctagcctaaactgaactagagtcttcaattatgggtaaaagtctgtaaaaaaggcattagagaaagaaataagaaaaatacaaaaaagtcatctaacctattaatagttaaaggaacttaggccacatcccaccccacacgtgcagatttttatatcacagtttgtttgttattatatcaccatcattacatgtcatgccattttcatacatcataaaggatacataaaataaaaatattttaaaatctaattactagcattttagtcaaagttgagagaaggaatttaagttggtacctttagttcaaggagaaatttatatgatttcactattctcactagtaaaataaagtccgttgggacacactgccttagggaattttcctttagaaccataaaggctccaacatgcgaaaaaaaaaatagtattttaatatgttagagagcattggtatgtgccttggctcaggaattgctctgatattgaagagttgtgataaattccttcgcaatttcagagtataccctaggcttgaatccaagaattctggggtaaacaagacaagcatggttcctaccttctcagaacttatgatctactgaaacagaccaccatgcgaggaagcacaataaaatgtggcagttactacagcagagtgattacaggggctttggtagtgcagagtaaaggagatgaatcaggggtgacctgggaagtgattaaggtgatgaagctgagactcagggtattattgttgagatttcattttagtgaaaggatagctctgtgcagaggggaggagagatgagaggagacaatgtcagggcaggaagaacaggtataagactactgccatgagtatgggcaagggaaggtggcaccccacaccagggcagtggcaaggaaaatgggaagaagtggacagattcgagagccatttcagagttaacatccacgaagtttagtgacggattagtaggagtgggaagaaaacagggagtactggatatgtgtcctagaagggaaagtggcaatttttgttgtgtgaagttggacaaggagttaagctatttgacttgtatattcctatttcagttgattctccagagacagacaaacatctcaaagtagagctcagcattgcacttcatgaaattttgaagaatgtgtgcaagtggtgtaattactgttataatttaatggggctgctttgtgccttgaaagctaggaagcaagcatgcctttgtgtgttcaaaatgctaattgaattatctctgactttagtttatgttccttaagtacaaactcttaagtcaggccaaagggatcacagctatgttgtaccatacttaactaccttttttataagcaaggatttttattccaaaaataaacagaggcatactgacataaacccataaagtatgtgggctggtactttaaagaactatgtatttgcacaaggaccaggagagctttcttaaaagggaccaggtcctgggaattctctctaaaagtgatttatttctgtcaacattcttcttcaatttaaacatacacattcacatatatttaaattcctccagacatttgagtttaaagttttactcctgatctactgagtaaatacctttagcaaataggcaataaattaagtgaaggcagctttctttttgaatataccttcctcatacaaatctccatctaaacacctaaagatttgataatatttatttcaagatatttcctatatttatatatgtattatgtgtgtatatatataacatatatattagaaaacgatggaaatgtctaaaatttgctgtttttttctcacagaagagttttcttcagctttctgacaatgtagatttcaaactttatagatgtatttatagaatcattttcaacaaacatttgttaaacacctactctatataggtggatgcgctagtgtatgtcaatgtgtatcattaccataataagtcaattgtcaaaaaaatcagacaacttaactgacaaataataatattaaacaacctcatggccacaaatggaaacagacttaggtgaacactttctacctttctagtttatttagaggacaactaagaacaaaaacaatcatttacaaagcttgttcccacaccagttagaatggcgatcattaaaaagtcaggaaacaacaggtgctggcgaggatatggagaaataggaacacttttacactgttggggggactgtaaactagttcaaccattgtggaggtcagtgtggcgattcctcagggatctagaactagaaataccatttgacccagccatcccattactgggtatatatccagaggattataaaccatgctgctataaagacacatgcacatgtatgtttattgcggcactattcacaatagcaaagacttggaaccaacccaaatgtccaacaatgatagactggattaagaaaatgtggcacatatacaccatggaatactatgcagccataaaaaatgatgagttcatgtcctttgtagggacatggatgaaactggaaaccatcattctcagcacactatcgcaaggacaaaaaaccgaacactgcatgttctcactcataggtgggaattgaagaatgagaacacatggacacaggaaggggaacatcacacaccggggcctgttgtggggtggggggagggggagggatagcattgggagatatacctaatgttaaatgacgagttaatgggtgcagcacaccaacatggcacatgtatgcatatgtaactaacctgcacgttgtgcacatgtaccctaaaacttaaagtataataaaaaaaattttaaaaaaaaagcttgttccctagtgaatcataacaggaatcgtccattctacaaccctgacaatacattttccatagaattctgataatcatcttcaacaaaaagatattgtacatggccagtgccacaaatcaagttatttcacatcccaggttattactgagtgcccagaaagtctttacattatttatattttctgtaaaataatatttagttcccagtaggaggtaactttgcattaaatgatgtaacagcactttggaatatatatcctattagtgtgtatcatattagtacattatccctaatacaaaaatttcatctgttagtttaatggaaagctttactttctcctcacttataacttacagaaagacatattgaacaagttagttatgtcaatacatgtctgttaagctgaattccaaaaggaccggaagaatttcttaaaatgctctgcttacactgctgctgcattaatatcgctgaccctattaaaaacatacatggacagttctgtatttgtaacattttgtatgatttaaatgacaaggtaccataaaagggagccaaaataggtgttttgatgtttcaaaagtgattctctggggcagagtgagagtgattgtccagttaatttgaaagtgattgccctttaaacctgagttgggagaccatcatcatccagaatagagtgaattttgttgtgtagttgttcttcaaaccttgaggtgccaaggaatcttgctggtgtgaagactggttcataaaagcagaaatcgccctgagatgtggtgaacttgaccttgtgacttgacctttcagtcaaacagcccaccatacaacaaacagctgtcccaataacacagcgctttggctctccctttactactcaatgaaatgtcatagagagaacttcttacctagttccaaggtttgttcctcggttcctgctccatccctgcctttacccagcttcaaacatctggtctccactttctgtcttctgcttccggtcctgcacctgcactttgggagatgtggacacttagatttttggcaccttgtcttaratatggtttgaactcactctggtacccatgaatctggctacccctccactcaaactctggtctccaggagttctctgcctgactagtgtatccatcagactcaaccctgcccagacagagcagaacaaacagtctgccctctgtcctgtgaaggtactttatcagtcaatcaggagaggcttggggatgcttctgtgaccaacagctccaaagtcttctgcagtctaaagcaaaggtttacatttgacttattctatgggcccaccatgagccagctgtgactctgctccaaatcaccctcacttagaggctcctcttcttggaacttcactggtcacattaacatgaggaagaaagtatattgtactgcaaaccagttcttaaagacttgcccggaagcaaattgcattgcaaaccagttcttaaagacttgcccagaagtgatacatttccagtcacaattaattggccaatgcatcacataggcatgcttcatgtcaggacgcacagaagatcccactcaaagacaggagaaccaaagatattgctgaataatattaacttctactgttaccagaaaggggtcctgatctagaccccaagagagggttcttggatcttgtgcaagaaaggatttggggtgaatccatagagtaaagtgaaagcaagtttattagagaaataaagaaacaacagaatgcttacttcttaggcagagcagccctgagggttgctggttagctatttttatggttatttcttgattgtatgctaaacaaggggtggattattcatgagttttccaggaaaggggtggggaattcctggaactaagagttcctcccctttttagactacataagktaacttccaagcattgctatggcatttgtgaactgtcatggtgctggtaggagtgtcttgtagcatgttaatgcaatataattaacatataatgagcagtgaggatgaccagaggccactttcattgccatcttggttttggtgggttttggctggcttctttactgtatcctgttttatcagcagggtctttgtgacctgtatctagtgataccagtcctgccaacctcctatctcgtcctgtgactaagaatgcctaaggtcctgagaatgcagcccagtgggtctcagccttattttacccagcccctattcaagatggagccactctggtttgaacgcctctgacaccaccacaggcaccaatttttaagccaaaattttccaaccttttgttcatggaactgaaatagaccacagtattggctgcttagatctgttagctctcatgaaaacccaaagaaagctttaacttaatgtttaattaggacataagagggattgactgagaagaaataaattcttcctagaaaaacttctcctggaacaacaacagtcatttgtagcaatatattaataatgacagctaacgttacatttatcaggcatttgctatgcaccaagtatacttttaagcactttatatatattaactcatttaatcatccagcaatcccatgatgtaagtactcttttgattcttgttttataaacaaggaaactaagtcacagtgatgtttagtaatgtgctcagggtcaacagctctcatggtttactggttgctaatttaacccttaaattatcagcataaatgtataatgtggttggttcttctgataactccactctacactgggtcattgtgaacatcttggcttgttatttttaaagcaatgtctttctccaggcttcagtagacaacatttctggcacatttcaagaaggaatggactgggtaaaaatgtgcagtacttccacttctggctagaatgtagaaagtcacaagacagcatcattctcaccctaaccaccaaaacaagcctgatgagctacaaaatctaagttttataaaattcaccagagagtggaggaggcaaagaaacataaatcaacatggttccggaaaacagtgagcctctcataggtgagaagacggccctaattgttctcaatctgagcaaaatgatgggtggagaagaaatccaccatggaagagaacaaggagaaactaggcaaaattttaacaaaagtttaatggtcacatgtgatctggtgtgacagatgagaatgctaaggagctcagccacagggtctgcactgacccatcaaatcattcccataggctgtcaccaaatgctcagggtattgtgccaaaggctgtgttttggactgtttttgcattgctataaagaaatacctgagactgaataatttataagaaaaaggggttaattggctcatggttctgcaggctatataggaaacataatggtatctgcttctgaggtggcctcaggaagtttataatcatggcaaaaggcaaagggggagcaggcacatcacatggccagagcagaagcaagagagtgatgagagagatgccacacacttgtaaacgaccagatctcacaagaagtcactcactattgtgaggacagtaccaagaagatggtgataaaccattcatgagcaatccgcccccatgatccaatcacctcccaccaggccccatctccaacattggagattacagttcaacatgtgatttgggtggggacaacatccaaactatatcaagctgggataggtagaaaaaagatacacccgtgagataaatgaggactttcctaagtgcaaggcagccatgtccaaaaacagaactgaaaactccagaaagcacatctgaggcactctaggctctgaggtactgaaggcataggtaagttgagagaaatctatctgtgatactcccacaagtcaacaacagaaagacaacccaataaaaatgggcaaaagagttactcaaacagatacatcacaaaacaagattgtatgaaagacaaataagtacacaaaatagtggccaatatctttagttaccagataaatgcaaattaaaccaaaatgtaaaagaccgacaacatcaaatattggtgagaataggaagcaactagaactcttgtgcatttctatttacagtgtaggctgggcacagtggctaatgcctataatcctagcactttgggaggctgagacaggaggaacacttgagcctaggagttcgaggctgcagttccagggcaacacagcaagatccttctctaaaaaaataattttaaaaacccactaattaaaaatgttaaaattctaagtcagagtatgaaatagtacaaccaatttgaagaactgtttggcagtttctaatagttaaacaaacatcttccctaagacccagcaattccactcctagacaactactgtagctgaatgaaaatgcatgttcatgaaaagacttatttactaatgatcgaaactgtcttatgcataatagctcaaaactggagattacctatatgctcacctatgtgtaagtggataaaactttgttcatacaattgaatactattcagcaataaaaaatataaattactcatacacccccaaagatggacgtttctcagaaacatgctgagtgaaagaagtcaaacagaagagtatatatgtatgaatccatttatatgaagttctagaactgccaaaataatatatgatgatagaaattaaaacagtaattgaagtgacccaaaaggggccaagagacacttctggtgtggtagaaatgttatctggtttcggatggttagtacatacagttttcaaaacttaactgaaacaaagttttgtgcaatttattgaagtataattatacctcggtttttaactgtacatggtcaaatatcgctatttcagaatattgagaatgagtcagctccaaattcagtccatgatacaagagttaaaagccaggtcctgcaagccacccaaggtcaatatttttaaaatcatactacttttcttattcatagcatttaatggacagctacagacaagacagggcttgctataaaaagggcacaatcccatacttaatgagtgatcttttccttttagctgtctctagccagtgttatctcatgttgattcacccaaaacctgctgatgtgtcactgctataatctttcagtgtcagcctataattgtttagggtcagcctttaattcattggggattcctactctaaccacgcagagcttatcgactgtatggctggtgagagctctaccattaactgctggactgtttcattattgccacttctgatctcaagttctctatataagtctatgcaaacactttcctgtgagggtcctttgacatactccaaactgactacaggtgactgtaagtgagaacaagaacatctcctagtcttaacactgcctaaaatagcacttctcacactttaatgcgcatacaaatcaccaaggaatcttgttaaaattaaaatcctgattcaataggtccagagtggagcccaaggttctgcatttccaacaagctcacaggtaacggggcaatgctgttccatgggccacattttgagttgtgaggaccaagtattcttttctctatggttatgtcctctgtttctagaaatcgcctctctccatgtgtggatttgcaatccaggctttgatattcgacagctttaagctcaaacgtgcaagcgagggttccagcagtggacagaggatagcttttggatttcaaaataaacatttggacaggcattctagttttcatgtattcactcacaatgaattcatctcccccaatgcactcccatcatcaatctggaggattttcattgaccagcagctcctgcaggacaggtagcagatctttcagaatcatctaagaccagagcagtgggccacatgcaggagcctcaccaacacttcagctcctgcttcagcaggagcaccctgtctgatagccagggaaggaggaatgtaggtcagggagtccctctctgggatgggccagagtctgcttcaataatcaggtcggggggaagggcttcttttcccagtggttctgctggatgcaacgttgctcctcaggcaaacataaaggaaaacagattttgccccaaagtgacctttgggcaatagcattacaagagatggtaagattacagtgacagtattatatctgacatcccatagggacatattttgaaagtcttaaatctttaaataaatatttacgatgataaaaatgttatctctaagcaagagttccagactttattttttaaaaatgtacttgaatcattgaatctaagcaattctgaatattcataaatcccccaaccattttcttaaggatttaatctattatttagaacgaaactttatatttaaaacaggaaatatcagtgcttaatgtggtgtgatacacacgagttatttcagttgatcaggtttactgttaattgggtcagtggcattaatcctcaggcatgcaaatactttgccaaagaaacacaaacaactaaaactcataggcacataaatgacagcaaaagaagaactcttcaaattgttcacagttttgctagtttaacaagatgaactagtcatggtatgatgaagattaggagttgcaaactttgcatagcctgcttaaaatgtaaaaataaattctaagtgaaggcagccaggtaagtgcttccattaaggtacagggatctgtccattcacagagatctggagatttattaggaaatagggacttcaaggtgctcagctgggatacctagtactcagcaagacagttacataaacatgaaccaatagtcaagtatttattttattttcactgcttgtcatcccttctagaagtcttcctttgccatcctagggcattttatgacagtggttcaaggcattactcaacatttaactgggactagtccaatatgttggtggtgatcataaaatgcatactctcaggcaaggcaaattttcctaacatgggtttagctaaagaatcagaacttttctccacactcaaaatgagcagtaataaaagctgaaggtcatcagacatttgaggataagcagagataaattattatagaaaagcactgggttcttttgcaatatagtatcattaccatcatcactgtcatcatcaccattattgctaccatcatatacaattgatagtacaataaatgggagaagttgaattaaaaataattttggtaataactattaaatctttacaattcatataccatttgagtcagcaatttctctccaaaatatctatcctgaagaaatacacatgcaaaaaaagcatgcaaaagcttaatattataaaatgtcaatccttgccaataaaagtccagtgaaagtccaaatatgatttattttgggcaaattggcaaacggactctaaagtttacatagaaatattgtttaaaacaaggaaaaactgcaaactccctaagtaatttcgaagacaaattcatttaacaaatgtttatcaagtgcctattatgtaccaagtattgctttagccaaagggataattaaataaaactttggtatgcacctatgatagagcactaggctgaatataataagaaaatatttatatagaaaaaaagaaaataatttatatagaaaagaaaataatataaaagtacacttaacagatgtgaaaaaatgtgcaagacatgctgtgaagttaaaaaatcagtacaatatatgcaaaaatgctatttttaaaaaatttatcttgatctgagcatataaatatataaatgcacagaaaataactagtaaaacatgttattaacaggagatggatgattacttctggagagaaaagtggaattgagttgagtcatggaaagctttggttttgtataatacttggatttttaccagaagaatgtacttatcatatgtgcacctgaaatacatcgggctacctgaaaagcactgataaaacattccttgggacaatctggcctagaataaactgcacttaatataatgttttcaaaaactttcatatcattgctagtcatttttctaggagtttaaattctgtagactgattgtagacaaagtttatttatttatttaattatctagtggtggagggggtcactgaaaagtaactataattttttaaagacttattttagagtagttctaggttcacagcaaaattaagaggaagacacagagattatccatatacccctgcaaaatgtatttttattggaagaaaaggcaggagggcagataggttagagagagaacaaactcggatgatgtttaccatcagtcaaacttggattctaatctttattctggtgcctggtaaacatgtgtaccctcagaatgtacgcttttagtagaaaataataggacacctaataaaatatggcttaaacaacagagatttgttaactcacacaaccaaaaatccagaaacagaacagtgccaggcagggcaatctcaaccgctctcccttgactttttcttcatggttgcaaggtggctgctgtggttccaaacaaatactgcatcctcacaagacagcagtccaatgtaaaaaggaatgaggatttttatttatgcaagtctttacttaatcagagagaacacatttttccaacagcatccacaaatttccccttacatttagttggccagaaccaggtcacatggccacattcaaatcaatcactggaaaagaggaggaataccatgtttgacttaaacccaatcatattccataccctggggctgggccctctttcctgaacacagaactacgtgatacctgcagtaaatctggattcctctgttaacaaaagaagaaaaaaaaaaagaaatcatcattgaacacccaaacaaccacatttgctacaataagtaattaaatattcagtttgttcatctgtaaattgggccaaatgacctattctcataattgcttgaaacactgagattgcatatgtaaagcacttgacttatactagctgtctgatgaatgccagttttctctctccaccttcttcctcaataattctaacactatttcaataaggaacaattattacaacaggaggaggaagagtgaaggagctcagaactgggattttctacacccaaacagacagattatcctggagcagtggttctcaaacttgattgtagaccccaacacctggtgaacctgttaaatcacagattcctgggccccatccccagtaggtctagggtggactctgagaatctgcatttctaacaagatcccaggtgatgttgatgatgttgttcaggacaactcttcacaagccactgccctgtagcgaggcatgagccatgagccatgagccatgagcatgaatgttggcgtcagttgttctctgaatccccatcagcgaactcagggccacgccagccaaggacactggggagcagagctgtgaaacgtatgacatttctgaatagtttcagattatttccaggctgcaaaacttcagactgaaagactttatttggggataggccccttcaggtaagtttgaaagaagaggaaggccacctaccaacacaagccagctacatagtcgctcacctgccaacttcccaacaaagggagaacaaaataacaaacactcaaattctaaatgcctttaagggtttacaagtatttcaagcaaattatccttccttcttttatgcctgaaaaaaacatttaagcagagaccccaagaatttagggctcttttgcttctttgccaaaggacagttctccttgattgggctccgcacaaaatccaagactggagccccagacaaactggctagacgagcctgctctcaattgctttgccaacaatggaccaaagaactggattagcgaaaaaattctttctgtaatttgatgcaacagatttttcaaaacaatattttaatttgcataccaagccaaattccctctcagaggagagatagaatgcattccattgtgtaagacaatactcattcattcccacgcaatgatgtcagtgctcagcaagcaatgctctctctgcaattctatttcttgcctttaagtttctattataaaatttttaccacttcagaatcatgcatgatattgcaaatctttctgttatcgtttttacaaaaccaaaagagacaaggctgtcaccaactgcctcacgcacaattatttaatcactttttcctcttggtatgaataggatttctgaaatccatcttcacctcccaggactttcttctgatacgaatactgatttggatagtttacttttgccagcttttaatgttcagggagcagtctcactgtttgctgaaatgataggaggcatttcagggttgtaaggctgaaccctggcaggaattttgaggttaatgggaaacacactgggcattttcttaggggaaatactctggcacagggaagattaaagacaaaatgcattctaacacataaatgatataaaatggcgtgaagtagcatagcatggcagggagattttggcaagagcttgttcatatgattacatgaaagataccaagttaaaaaaaacacaatattctctctctctctctcccccgccccccaacaaacctgcctgcctgcctatttttttcgagttttattttagactcagagaatacatgtgcaggtttgttacctgggtatactgtgtgatgctgaggctcagggtacaaatgattctgtcaccccaggtactaagcatagtacctgatatggtttggttctgtgtccccacccaaatctcaccttgaattgtagtccccataatctccatgtgtcaaaagcaggaccaggtagaggtaattgaatcatgggggtggtttccccatgctgttctcatgataatgagtgagtctcacatctgatggttttataggtgcctggcatttcccctgcttgcacttattctctctcctgccaccctgtgaagaggtaccttccaccatgattgtaagtttcttaaggcctccccagccatccggaactgtgagtcaattaaactctttcctttgtaaattacccagtcttgggtatttcttcacagcagtgtgagaaaggactaatacagtatacagtagttagtttttcaaccctttccctattccctccctcccctctctagtaattcccagtttgtattgctgccatctttatgtccatgaataccccatgtttagctcccacttataagtgaaaacacatgctatttagttttctgctcctgcattaatttgcttaggataaactggatacctattacatatcccaaaattttaatattaaagaaaaaaattgaatttctatttgaactccaactgtgtgctacttcttttaattgtgaaaagcttgaaaaatatggaacagtgaagaaaagaaaataatacagtatcaaccagccaaaattagcaactactcacatctattcaatataacttagctatttttaaaataaaaaagagcagtttaatttttaaaaacccttgatttttttttgtgccccatttgccttttcattatttaacttgttgggtactcttccagtacacaggtttttaattttatttcatatacatcttaatcccataatatatcccaaaacaatacataatatagtcttgtatgttttctagtatctacataaatgctattgcaaatagtatttatgatactgaaactttatttttttcattcagtgttatacttttgagtccatcttttttgatacatataaatctaggttatttttaatgatagcataacattccattctatgactacactacagtttatcttttagtcagctaatgaaaccttcagctgttttccatttttcaccattacaaacagtactacaatgaacagtattgtccgtgtttcctaggcactaggggaagaggttttcttgggactatattaaggacagaactgcttgatcggaacatctgcatattttcagctgtgctagatattatcaaaatgttctccagagaggtgatagcaattggtattccaattggcagcactgacagtttctgttttccctaattcttgtcaaaaccctaactatatctttcttaaagtattccattcacccaagggtccctggtaaacaaccaaggtgagttttctacccacacctgggatgacactgcaagcaaatgtctcttcctctgctccccacccccagcatagaaacagagtgtctcttttgtgtagaaaactgctttcccacacagtagggttattagtcatgaagctatgaaggagtttctctctatgtacagtgattgatccaagggttggtatcagaacatggccaatcagactttctcttttggggttaatatgtgcaatgggagagaaaatatctgccttctttaaagaactgtaggagtgaggaccaagttgtttttgctcacctaaggatgaagccatggagaggaaaaaggaatcaagattatagaaattccaccccttggtatatgcccaattgaattgaaaacagaaactcaaacagttatttgtacaccaatgtccacttcagcattattcacagtagccaaaagatggaaacaacccaaatatctatctaccaatggatgaataaacaaaatgcggtatagacatataatgaaatattactccaccacaaaatgaaataaagtactgattcatgctacaacatggatgaaccttaaaaacattatgctaagtgaaataagccatactcaaaaggacaaatattgtataattccacttatatgaaatatctagaataggcaaatgcataatgacagaaagtacattagaggttgctggggcttggggaggggggagttgggaagttaatgcttaatgggtatgcagtttctgtttggtatgatggaaaagatttggaaacaaatagtcacratggtttcataacattgctaatataattaatgccattggattatacacttaaaaatgattaaaatagcatttcatgttatatgtatatattttatcacaataaaacatttaaaaaggcacaagactactgaaaatttaaaaaggaaaaaagattagatggatagatagatatacagacaaacagaaagacacatatgtatatctccttaccacatcatttgactccctggatcataccatgcctgaagtctgcactaattcttttaactttcagttacataaaccaatacattttacttttaaatctattttgaattggctggcactagaaacttaaataattctggatcctgttatttcaggcataatagtgtacagttaggaaggaaaaggatatatcttgacatctgtttaggttctaaaaattttatataaacccctgatattagcagaaaatcaaccaaatcttattctagtctagtcatgtatgtgtgtgtgtgtgtgtgtgtgtgtgtgtgtgtgtgtgcgtgttagcagaagctggtaatagctcggataaacatgatttcataagttcatttagctgcttgttacgggtctagcccaaccatagtttttccagatacatttctcctctggttaatgggctaaaaagaattaagtgacaaactgaaggggataaaggagaagagagtccacaaggatgagaagatgaagagtaaaagtgattattttattctgctaccaaacagaaaatgaaatgatccaaaattctaaggcaaaaataattctcatattttaagcatttgtattgacctggagagtgggtgctcccttttcaaaagtcaccatctcttttagaagataccaggagtctcctccttttttataaaggcaactaatcattattctcctgatttcacctgtcctttatagtaaagaaattgacaaggcctcagtggaaaaaaaaagaagaaggggcaaggaaaggaaggaaggaaggaagagaacacctccttgatttttattttcctttagtttgacgtttctgtcttcacataagtatagcaacagacaacataaatatagatagaacaaaataattaaggattcacaaaactagataggtaatttttgctttgaatgaattattgaaaacaaaaacaattatactttgaatctaacagtttcttcttttcagaaattacacatacagcaactggtagactggcttgtaatcttggtcatgatatgacagaatgaagcaaaaaataaaataaataaatttgcaaagagataagctgtagccttaaaagtattatttattgtagaatttccttaaggacttaaatatgagtggtgcacaacaaagttgtaagagatcccaaaataattgagtgttataaaaatcgcagaaatgcaacagtcttcaggacaggcaagaaagagagaatggatttgtgtgtatgcagtagggagagagatgcaaactggcagatgctagtgactccaataggcaaaatctgatagtaaataataggtcacattttttttataagtgtttccacaatggccaggtttcagaaatgcaaattcaaaaggaaattgggtaaaatacaataaaaacgaattatttgttcaacatgaaaagaaaaatgcaaagagaagaaatactgcaacattatgaaagttgaaacattatttttcccctgaatttctttttttttggctctgaaatagttccataaggattgaaagaagggggaggaaaaaggaagcaggggatctcattgaaaaacaaacagggtttccaaaattcatttatgcttctcttcatccagtttagtcctttttccctctctttaaatgcttacatgggtgctttttctgcctggtattcataagcaagacattttgaaatatgtagcttcataccaataacagggtggggtgggacaccacacaaaggagcttgccttccaaatacaagcacaaggaactgcctcttgaaacctgtaacatttccaactctgggcaggcacagctggcttcatgtgtcagtgctaggtaagaccttccaaaaggaagcaacatgaatggactacaatgtatagtccatatctttttataacacaattgaaaatattagctgatttttccacgtctgacattgtgtgggttttcagtatgcttcaccttcatggtagttagttcagttgaatgaataatgccatagttagaggaaaaaattattcagcagaaaggagggacaagtaggggataggagggataaatgacatggaaagtcatttgatattcccagttaagcttcagaattggggttttgaggataattccaaacaaaatccagacattggtttggaaagtgtttctttaatctgtgttctacttctgtggcattgcaatgaatgttatccccaaaactgtaaatgctttcttcaaaccaaatttcctgtgaattggcaacaatcaaagtttaattggagacaatgcaattaatgttgagaaggatatatttgctctgaaacttctggaggaaaacctattctggtttggtaaaataaaatatgaaccacagtcataaatgattcatcctccaaggtagttctatgatacatttgagggctcctttaaatactgacattttcccttgtaatattaggctataataattaaatgtgtttcagggagttggattccttatctaacatttattttaattcaaagtcatggtcttaatttcctttgcacagctctgaattgaggtaggaggcgggacttgactttggagatggggctctcagaccccagacgaaattgaggactagctaaaacagggatggggtggaagcagctttccacatgacatgcccacagtgtgccacatcagcttaccattgccatggcaacacccagttgttaccacccccttccatggcaataacccaatgacctggaagttaccaccccttttctagaaatttctgcataatctgccccttattttgcatataattaaaagtgggtataaatatgactacagaactgcctccaagctgctactctgggcacactacctatgggatggccctgctctgcaagaagcagtacctctgctgcttcaataaaagttactgtctaacacgactggttaacccttgaattctttcctggacataggcaagaatcctcctaggctaagccccaatttgggggctcacctaccttgcatcatcacctcattttctcttcatttaagcagataggttactgcttctattcattggctcactatttagaagcagagagcgatgaaattgtttcatatgtacatcaatgactatcatttgttaaacaggcattctagctgctttgtatattacctaatttaatcctcaaggcagtgttttcattgtcatttcagaggaaaaaaacaagtttctgaggtattgaaaaacttgactgaggctagattcaaacccagaactggtaccaccacagttctcactgcacgcaattttcactgtgctatgctatctccaagtgaaagaagttggcaatgccatcataaagaggactatgtgaaactaccaactaaatgttcattgaggatgaacagaacaagctatatcagattaaagattttttctaaaattttaccaacaagagctttaaaaaacattctagaactgtaaccccccttaatcctaaatcactaatattagtttatctacatttaaactattggaggtttaatttttaatatcctaattaagtgcttattagcatttttagaaatatagtatttactacttaataaaattaataaaaattgaaagtataagcaaactttaagttttcaataaaatacttatattggacctgaagaatatttcctacaagaaatcgaacatggtcttgtcatcatccttatgcctgtttttctctttacttctgagaagatctggtaatttataacagaacaatattgagaaacagaggaggagaagcagttgtgtttaacctgagaataaatcagcacactcctgccaccactgtccagcagccctgctggtgtccaggagaggtgctgggaatatttcagatgcactgcctaatgtggtgaaattgtatctccaactcataaatgctgaattagctacctcatctctctttctggtatttcacagakgagaaaagkgaaaacaagktgtccttagatcagacctgggaaaaaaagaggaggacttgttcaccaacttaagaatctgaaaaaaggtatatttctttttattgaatagggagttataaatatatctataaataaacatttttatgtgattgaaatattaactatcaccagactacaatgtggtatctttttagcagacagtaacacatatttgaaacaaggttctcaaatgccattgtgattttcacaattctaataatgaagttctgttctatcttgtatgtttccccaaatgatagccccaaaagataatttgtaacaacatatagagcttacagtatgcaaattaaagtggaataatattcaagcacctttcccatgtaagtccaaatccatccctccatattttcttgtgtatgattgaaatgatcttattagatcttaagaacataaaatgaggtaaagtgtgatcatcataggaagcatataatattaaggtatatgcatttttaaataatattctgattcctccaaaatcccacaattttgttaacagtctggtatacatttttctacatctctctctacatctttctcaggcccactgtaacatgtacctacattaaaaaaaaaaaaactttttacaaactttaaaaaaataggactctattactctacaatttgcttctatcatttaccaaaaaatctttgatatatttctgattaatacatgaaaggattaattatattttaatggttacctaatgcttcacagtatgaatatatagtaatttattaaaatgttcatacttttataggcactttggctatttctagtaataaacttctatgaacaataatttctagtaatttcttccataaacaatgctacagtaaacatcccttgctctatatatacatctatttgtaattttatttctggataaataagtctccaaattaggagtattgggtaaaagtgtatgtccattttaaaattaatagatactgccaaaaatcaatagcgatttatgcttggcttaatgtggatacaaatgttcacatatggaaatatttatagatatgtgcacatacatggcttactttgcaaacatatatttcctagctctgccagatgaaagagcctactagtaaaaagccaatttagcacccagatcttggtttttaatatcattctcaaataaaagaaaccagggagttttggagagatggctaagcctaaagctggtgcaggaaacacacaaaatgagcctggcgcatcttgtagtgctagaagtaaagaagtactaaaaaaacaaacaatcacaatcatgagagtatgccaaagggacacaggagccaagtgaaggagctccaaatggccacagctaggacaatttgagcaacaaaataaataaagcagcactggattataacccaagtacaaaataaatatccatgagtccaaactgttatgaataaataattgaatacaatccaagcagtattggattataacccaaagtataaaataaatatccatgagtccatattgatataaataaataattgaataaataaatacatgggagaacagacaaatcttacatgtagaagaattccaaataattctcatagatcttctgcccccggggggtagaagataatttcctacttcttaaatatgatctatgcatggtgacttccttccaaagaaagtagtatggaaagggccaaaaaaaaaaaaaaaagaataacttagcagtggagaaacctgacaaacactactcagccaggtgatcaagctcaatatccacattacaaagtcacattggtagtacgtgccactgatataacgtgatgagaagggtatgtcacttccgtggtctttcttccaataacccacagccccagctaattatgagaaacctccagatgaatcctaattgagggaaattctacaaaatacctgtcaaggtcatcaaaaacaagagaagtctgaaaaaccatcacagccaagaggaggccaaagagacatgataactaaatacaatggggcatcttggatgagatcttgggtcataaaaaggacattaggtaaagattaaataaatgtaataaacaatgggttttagttttaatgcttcaatactgatttgttactttcgaaaagaataccatgctaatgtcagatgttaatattaggggcaactgggtgcagagtatatggaaactctctctgtactatctttgtaacctttctgtaaatgtaaaagtattataaaataatagttttattattttaaataacagtagttttaaaaacagcaactaacgtggaaatttaaagaaaaatataatagcaacaaaatacttcaaaatacatttttaaaagcaggtacagagcctacatgaataaaaccattaaattatattaaaagaattaaaacaagattttctacaggaagaattcctttctgagaagacttaaggtcacaaaaaagccaatctactggtttaatactatttccataaaagtccaagcaaagttatttagaatgtgggacttttttttttttcttgatggagggttgggaggttgaatcagatcaaaactgattgtaaagtttcatgaaaattgcaagaaaattttaaaatgtaataatgaagatttgcttaataatgttttaaaacatataataaagttactataatgaaagtgtggcattaacatgacaacagataaagagatcagtataacagaatagaaaatccagaaaacagatccaaatatatatagtatgtgtatatacacacacttatgcacatgcacacacacacacacaaacacacacatatatatatgaatttaatgtctgttaaagcagtcataccaattcaaaaggaaaggaatagatgatgcatttggaagggagagaagaaaggaggtaaatagaacactacaagccaaactcaaaagccaaagtgcatacagcattttgaaaggattgaaggcatttgaacaagagcacagggagcagtttgggattagggaaagcagacaggagtatctttggagaaggctaaaatgccagcttgtgtttaggctttatccaatagtgaaaggaacactaaggaaagatttgattgagacagagagttgggaatgggaggagtagaagactcacatttattgagtactgactgtgtcttaggttccgggaaattgacataggaggtcatttactcctcattacaactgtgtgagcttggtagttttcaattagtaatttgctgttgttcttgttagcattcatcccactgttttattttttgtggtaatacttacattgttactttgaaatattttcttcatttttaaatatagagacaagaagtaatcatgctaatagttttatgtaaaaagattttccatataagagaacaaagttatgattataaaacaaaagaagcaaaaaaaaaagtactgttcacttgagttggaaatgttaatatgagctcacaagtttaaaaatatgtactttctggctctgtcaactaaaatgacctaggagcaacagcattctggtagaaataagtgcccaagtccctagattttggcctctaatttcattcccccactgaaaggtactagtgttccttggagagatggccaactcaaagtctgatatagtggaagagaagatacaagatgagcctgtgacaccatgtagtgccagaaatcaaggaagatttcaaagataaatagggttatttcagaaggaaactagaaccagcttaaagaggctcctactaatctatgatgaaaacatgagcatcaaaaagagtaactgtagttaagtgtcctcattttaaaagtaatagctatagaaattcaagctggggaaattcagttatttttccaaggaaatgcagtctttaagtacagtcaatgttgaatatgagtttctgtgactccaaatcaatgtttctaccatacaccacgcttctcgagcaatgtttaactgaagagaaaagtgcagaacggaagagaatacaaagaggtagctaggaaaaggcaggtcaagagcccaaatttatctttcactggaagaattttctagtaaatagtcccatccgacaagacaaaaggatgattacaaatatccaagcagcagctggataagatggccttttagagaaaccacgaaggtccctccttggaattaatatccagatgtcccaagtgctcctgcttcattgtggcacttccctttaatatcccaggagaagtggtcaaattcccatcccatgtcacaatatatttccctgcccaggtatctttgacatggagattcctaaagatagttgttgactattccttaagttcattcactctggtgcccttgaggctacagccagccttggaatttaccaccttaatatctcacaagctttcccagcaggctgcaataactgttctcacaactttgtcccctacagagacattgaccactcctttgatttcagaaagcaccgctaagaccaggctacagggtttaataagactttactgactacaggagcctaaaaggagagaactgtaatgcagaagagaaaacgtaaaaatggatatgaaatagcgtagctcccagtgcccactacgttgcagaattgagcccacctcccccacccccatctactcttcctggaaaggcttttgacggttgcctctcccatatccacactctcctgggacctagagagaggcaaccaaagtttatccttgattaccagcgtcaggtatgcttcctgtgagtgtacatctctgacctacaatgaagaattattatgcagatggcttagagctatgacttccctttggcataaccaaaagagttactgtggttgtctcttttcccctacaactaaagagcccccatcctcaatggagaatcaaagatccatttctagcaacaaaataaaccacagaaacttcaacactagggtgtctttttctcccaagactcaaatatcgcaggattaatttcttcaattaaggcccagggttaaaattccagggattcctttcatccagattcagaaatttcagtgaaaggaaagctgtggccaagcatgtgacctgagatgaaaagatcagccttgatactggggggaggtaaggtaaagataggaaccaaacatgatacccctcgcctttccagagcaaacaccaagggacaggttactcctccacctacccccacccattctatgattcaattagacccaagaactgcactttattttgtgtctcatcttgaaaactaggaagttgcactgatgtattgtgacctcagggtggtatagagtacagacatgcaagttggtctcagccatcatctgaaaacattctccacacctatccccagccatcacaggctgctgtccagtgtccagttgcttgctgcttgggaagggcaagcagtgggtctcgggtctctctctctctgtctctctctctctctctctctctctctctctctcgatccagtgggggaagagaagatttgcacactcctctcttgtaggtctggctctgtgcccctgggggctgacctaaatggactttgtgaatgagccttccaatggggagtctcaggatagtatcagagaaagtgaagagattcagtttgaagtaggaattcccccagtgttgtagctgcaaagtgatcttggtcaggttctgttagctgaaggtcacagcctagtcaggtagccctcttcactcagctctctttgtgtctgggtcctggaagctgatctcttccctccacccttctggcatgggatgccaacagtgtccactcactagcttacaggtagcgtacctacacttgaggttttcacacctttgtaactagaccctttactaaagtcttttcagattactcaacatgaatgtgccattggttatacaagcagtttaaaaacttctaactcatggccgggcgcggtggctcacgcctgtaatcccagcactttgggaggccgaggcgggcggatcacgaggtcaggagatcgagaccatcccggctaaaacggtgaaaccccgtctctactaaaaatacaaaaaattagccgggcgtagtggcgggcgcctgtagtcccagctacttgggaggctgaggcaggagaatggcgtgaacccgggaggcggagcttgcagtgagccgagattgcgccactgcactccagcctgggcgacagagcgagactccgtctcaaaaaaaaaaaaaaaaaaaaaaaaaaaaaaaaaaaaaaaaaaaaaacttctaactcataccgttgtgagatggatttgtactctctaggacagctgccttcttgaggcaggtatgcaagctttcacggggtccctttgggccaccctgaccacaacacctgtaacgtgacatggccttttgtctcactcactgttcccagtcccctcttagcatctgtcccagcattgcacacaattgcctcctaatgctgaggtccccttgcctagggtgatggacattcggatatgtcatcttgatcccttttcaaggaaagccttgttgtgctgagagtgctgcaggcagacagctctcagctggcagcaacttggcagcagaaggctgccacggccaaggtcacatccttcccagggtggcctatacccaatggccactggtcaaagcaaaggtataaaattcctgtcatttggcccaagtgcgaccattatgatgggccattttactccagaactctccatggaaatggccaaagctgactctgggcctgcattgaagctcagcttccctctgcaaatcccgctttcttcccctccttttcccaggtgttgaccccaagggtcatgtgcacactaaactattggacatgtgcacactaaactccttctcatggtgtacttactagagaaaccaacttgtaacaccttgctataagattcctgttaaaacaaccctgggccaatattcccatcacgagctccacagctggtctctggaatccatgcactttggtgggaaggcagttcccttccaaatggagtcccctcccctctaccataggccactcagcgttcctcagatgagtcaggcaccagcgctctgggctctccagtttcaaggcacagacctcacatttcagtgtaggttgcacagatgctcccctcactaggactggggctagaggtaggagtctccttgccttcattcttgggagtaagaaatgggactctcagtgctacttcttccaaggaaatccctctaccaaacacctctttcctctgtccccttgacccttttatctgtcaggtcattgagtcttctattcaggttttccatggtctacttagaattattgtcctggtggtctcttggagtgtgatgttcattgtcttcattccccagccaaaactgaccctggacgagtccccccttttaacatgttacattatggaaatgtttgaatatggcaagaataccttttggaagaactctagcagaggtctctaagtaggaaaatgagtggctgggggagagggatgggattgagacatacttttccctcctttttgtcttctgggattttgtgccatgtacatgcatgttatacctgttaggttgaactttatggaaatacaatttttgataattttttggtcaaagttttcttataacttgtctatactcagcatagtcaagtgtaaggaaccacaggttccttactatttggtgtttctcctaccatcagattataatcatttcatgtggcctaagctgttacctctttctctcaaacctggaacctcactatataattttcctacttacatcttatacactctaagattgcctttagaagcagaatataaacaggatgtaatctaaggaagatagtcacattcccattctgtcccaccctacatccaaggtcccagtaaatcgccctccttcaaaactccgctgaaatgccaccttcaccctcaagtcatttctgtatttctttttacggcttccagctcactgaggaaagactgaccatttcattgtgcaggtacttatcagaaaggatctcgtatgcagtattgtcctcatgcataggcaaatctttttcctttattagactattcacttttaaggaaaatatacaagtctttatatcccaaatgagaacagtgccaggagcagaacaatagacaattgctgaatgaacaaatgacttcgttataaaagctggcattattttatagcataaataagttcagcaaaccttttatgatggacactccttattccggtatgagtaaaatattctctctaaatgtgcagtgggacacaactgtggaatcattagcttatgctgactcactcaatggtccatatatgatagatgtcttggatacacagtcctagcacacagaaacatactctttctgaaaacatgcctcaacaaggaagggtagccagtaagaccctggctcctacagacgacaattctgttacgcttcatagcctccaaatttctatcttgcttctaagtgatgaggaatttcaagtctccaaggagaaaaaataacatgagaaaactttgtcaggaaactgcaggcccctggggccagagtttagaaaacacttacgcaggtgagactgttttcaagaagtttcgactatacaaattcctctttgtcagagtaaccacatattagtccaagacagttattatattttcttattataagcatgcactgttttctgcatctggtgcatttgccaaattgtagatttattcctatttctatgcatctgtgaaaagaatgtgtgttccatctcatcagggagttacttgaagtcacaggttgctaattccaaatgaatagaaacaatgattaatctgggagatatgggctcaccactatttatgtaacagatgtccattatgatgagttacacatttgttccatgtttacactagaatacaaaaaaagaggattcaactattttgtaaaaaagaaagaaagaaaaagaaagaaaaagagaaaaagaaagaaagaaaaaataaagaaaaagggggatgtgggaaggtagggaattaaaaaagtacttgaaaatgtttattcaggtgccaggttagatgccacagagacatacagtatgtctggagggtggcaggtaaaaagctgaggggaggtagagagctaggggagagagggaagtggggctcaatgttcctggcttcatttcagggtgtggagattaactcagtcaatctcacttggctgacagaagcattaatgccaaaaccggcaatttcatcagcatcagttacacagaagatgggatttcagaggaaagcacgagaaaagggagaatgatgtatgtgattttattcaaataattaaaaacaaagttggcagtctatcttcctgtcaagaagaataaatatcagactatggagttggaagaagtgcaagcagcttcctctgctccatattaactttggtccaatacaaactttagagctgactcttcacacaaacaaaaatccttttccaatgattctcccatgtgttttttcagttactctgtgcagcaagaggacatgagccagaggtaagtgtggaggagggtaccggactgagccacactcacgctgttagagtgagggccacaaatactacttctctatagctgagcaaaagaaaggactctagaaatttcctttctctccttattttcatcctgtcctcataagcgcaggccctgaatcaaagcagggcctggcccatagtaggaactgcatagataagdagatagatagatagatagatagatagatagatagatagatagatagatacatagataataaatatataatgcatgcatttaaacatggattaaattaacatgggttggacttaactaatgacatatgcacatggatggataatatttattaatggattcattatcttatatactatatttgcagcctaactgaattatagcagaagcagcatcgtaactgaaagttcaagaatcccttctgaatgtcataacatggctgctatgtgttctaaattatacctttccagagagtttcttttttattaattttattaataaaaaataaaaatttgactagattcactaaagggtattgctcataaaacattttaataaacatttctctgtatttccagtaaactcttaaattgctttttaactacttccaaaacattgaatttaagatgcaaaatgcttcacttttacatcgaaacctttctttttattatttaatgattacaagagaaatgaataatcctctctgcatttgtaacatgcccaagtccaattagagagcagaactattcttcagaaaagtcctaaattgattggactgctgggagccatacaaggcaacaacaatatacatatcaaccttaggcaatgcaggaagggaaacactgcaaaggtaatcagatgattatggaggaactcagctacttaaaaatggcacattgttgtccagattggaagtgtgagtgctctgagcctgttaaaaggttctttcaggcatccaaaacctctttgccaaaaaattaataatcttatttagtctaatcccaccaagttagccaagttgatgaagacagaaaaagactcaatttttgaaggaggtgggaattcggataatacaagtgtcagcagaggttttctgtgaagggccatatagaaaatattttttttggctttgtgtaccatttggtctctgtcacaatcactcaactttgccattgtagtgaatgcatccatggacaacatgcaaattaatgggcaaagttgtgtcccaataaaattttgtttataaaagcaagtgggcaagctggatttgcttcacaggacatagtttgctgactcctagaatattatgtagatggctctccaaaacagactgaagcctaagaaaagacgcagatctcaaggtcaagttgaaaattatagtgtttttaagttccttgtattttaaaatgtgcttagcagtacctttacttcttgtatagatcttatggtgtttgccttccaatagaattttccttaaattcatcttttagatgtgcatgtcttttatcaaattgtctgcataagcttgaattcagtaaaaaaaaaaaaaaaaaaaaaaagaaaagaaaatcattttaagcattccaggaataaagaaattactacaagtattagtcacatggatattggaatacctggggtattagggtcaagaaagttttgaccaaccatcagagcatcagacactgaatattttagcctgacacaccaaagtgggtggttagcaaaaacttgacagaaaactgctcccacttgcaagaatatctgagaaacctttgactaactgtttcagtttgcaccagcagagtatcttgttctcatgtactccctgcaaagccaatctaagtctcctgcctgcctaccatgtagctgcaaccaccccaagcataatagcttttgtttatctttcaaccctccaaaaaatagattatgttactctctctggcaaactaactcaagaatgcacagggaaagggacagaaaatatatagcactctacttctctcctgcaatgcagaagagctcttagaagaaaatggtagtgatatctacttggcaatggacaatccaccacagtttgcccctttgtcaatgcagcagccatacacacccttcttacccatttttaacttccatataaagtaaaccacataatgtttctgtcctacttgatgcaactattcttcatacatccaaaacccactcacactttcccccaaagtgaagccacaaagtcctatttgttattttatccataactggttgatctttatttgccttctaggtcggtcacaatagctgtttatcctgcaatttaaatattgaaatatgggcttaactcaccccttatattctgtgacagacagaggaatacaggacaaatatcattaatatgtacagatatattcatatcaaataaggaagaaaatatacctattacaatctgcatttctacatctgatcacatggcccttgttagtatctacaattttatttttctactactcatggggatcttagacacccagaagagtcaaatgaggtcattgtccatcctgaaggccaagttgggatttgcaattctccagtcatcaccaggtgatgtgtgatagtccagttcaggtctccctaactgccggggtacctaagagagcccaacgcctcacctgctcaagtcacccacttctgggcagtttcctggctcaaaggaggcaaacagcctacagtcggaagttccaaggaggggaagagatccacccatgcttctgtattctcatatacactcctcccacctgtgactctcattttttaacctttaaatctggtccctggtccacttgagtggtataaagtctaactctgtctctcccactcactgtgaaatccaatagattttacagagaatatcttcattcaaattacacctaaaaggcatgtattaactctctttgatctaagctggatagtggagttgattacaggctggggttcatggatttagattctgcatgaacacattttgctttgtaccaagaaaaagcctatttcaggacttcaaagtctaactcctcctggccagccagttctcaatgtgtgctggtggtcaagggcaaggatagtttgtgtgatgtttcagtgcaatccctccctcattcctaagaaaccaaaacagaaaaattttcccttaatgatagacttactgggcaagagataatgagattcttctttatttaaaaaaatggtcaaaatgttagtatcatctgaataagcttagtcaataaaactccccaaatacccaggctagaatgcccatttcgaaattatctccctatcccacatgcaggtgtacacacacacacacacacacacacacacacacacttttttcttaacctcaatgcaataaagatctggggatattgagtatcaagatctttggaatgtcagagtaaggcaccagaattcttgtttgcatgaggactttctagaggtcagtgttcctctaactctcttaatgataagaagcatcaatgacacttgttaaaaatacagcttctcaagtgcctctcctggaaattctaactcagtggaagggagctatgctccgtccctgggaaagctttagaaaaaatacagatttctaggtccccaacccaaacacactgaacctgaatttctaggaatgggcccaggaaactgtggttgtaaaaagttccttgggatattaaacaaaaattagtcagctttggggtttgctaggagaaatagtcaagattttaggactgattgtcagattctaagactaaggttttttgttgttgttgttgttgttttgttgttttgtttttgttttgttttgttttgcttgagacagggttttgctcttgtcgcccaggctagagtgcagtggcgagatcttggctcgcgacaacctctgcctcccaagttcaagcaattctcctgcctcagcctcccgagtagctgggactataggcacgcaccactacacctgtctaattttttgtattttttagtagagacggggtttcaccatgttttggacaggctagtcttgaactcctgacctcaggtgatccgcccgcctcagcctcccaaagtgctgggattacaggcgtgagccacagcacccgacccagattctaagaataagattcttaagcaaagagtcttaaagccagagtcaatctcaagggaaggttgatgtgtgtttctgagcaaacaggaaattaccatgaagtagaaagacggagaaaatgcattggcccaccaaggttcactctccttgctttttttatttaaaaaaaaaaaaaaatctcctctgcctttctccaatctggctgcagtcctatttgaacatttgagcagttaaataaggctttaaacacttccctctaatcaatcagcaaattatttccttctcctcaagatgtcactttcaattttaaaaaagacatatgccgtttttctcttgacattttaagtttttcaaatttcagaaaatgttcaataatagcaaaataaacaaccatatacctaaattcaccaattgctcatattttgccacatttgctttgttctctctctctctatttgagtgtaagatgaagctgatctcacagtacttcatccctaaattcttcagcatacactcttatgaacaagatattatcttattatcctactaaaccacaacactgataccacactgagaaatttaatattgataaaataacattacttaatgttattttaagtattttatgttatttaaatgttaaacatttaaatgttacttaaaataacattatttaatatacaatccatatttattcttcatattcaccgaatcatgtacttcatgactgctttcaaaaaatcatccaagatccaataaaggattacctattgcatttagtacaccaggagagggaatcttggaggtcatcttagtattccgcctatcacaaattagcttattactccttggtaatactctgctatgaagtctactgtgtttgatattaagatagccactccagctttcttttgattagtcttgtttctttccatccacttttacctatttccatctttatatttaaagttagataattgtaggcagcatgtagttgaatcttgcttttctatccaatctgataatctctgcatttaaattggaacgtttaggccatttatattgaaagtgattattaatatgattagacttaagcatatcatcttgctctctgttttctatttgtctcatctgttctttgttctctttttcctcttcctttgccaacttttcaattaattatttactgtggttctattttatctcctctgttaacatactcattaaaatcctttgttttgttattttggtcactgatttaggtttcatagtgtacatctttaacttatcacagtctaacttcaagtgtttttattttttttttagaaacttttattttaggttcggggtacatgtaaaggtttcttacataggtaaactcatgtcatggggtttattgtacttattatttcatcacccaggtattaagcccagtacccaatagttatcttttctgctcctctccctcctcccaccctccaccctcaagtaggcctcagtatctgatgtttccttctttgtgctcataagttttcaccatttagctaccacttataagtgagaatatatggaatttggttttctgttcctgcattagtttgctaaggatagtagcctccagctccatgcatgttcctgcaaaagacataatctcattttttatggctgcatagtattccatggtgtatatgtaccacattttctttttccaatctgtcattgattggcatttatgttgatttcatgtcttcactattgcgaatattgctgcaatgaacattaacgtgcatgtgtcttcatggtagaatgatttatattacactgagtatatacccagtaatgggattgctatgttgaatggtagttctgcttttagctccttgagaaatcaccatgctgctttccacaatggttgaactaatttacactcccaccaacagtttataaatgttccctgttctctgcaacctcaccagcctctgttattttttgactttttaataatagccattctgactggtgtaagatggtatctcattgtggtttttattgcatttctctaatgatcagtaacactgagctttttttcatatgcatgttggctgcatggatgtcttctttagaaaagtatcacagaaagaataaaacacctaagaatacagctaaccagggaggtgaaaggtgtctacaatgagaactataaaacactactcaaagaaatcagagatgacacaagcaaatggaaaaacatcccatgctcatggataggaacaatcaatgtcattaaaatggccatactgcccaaagcagtttacagattcaatgctattcttgtcaagctgccaatgacattcttcacagaactagaaaaaactattttaaaattcatatggaaccgaaaaagagcccgaatatccaaggcaatcataagcaaaaagaacaaagctggaggcatcacgttacctgacttcaaactatactacagggtcacaataaccaaaacagcatgcatggtactggtaaaaaacaagcacacagaccaatggaacagaatagagaaaccagaaataaggccacacacctactaccatctgatctttgacaaagctgacaaaaacaagcaatggggaaaagactctattcaataaatggtgctggagtaactgactagccatatgcagaagattgaagctggactccttccttataccacatacaaaaatcaactcaagatggattaaagacttaaatgtaaaacccaaaactttaaaacctctggaaaataacctaggcaataccatcctggacataagaacaggcaaagatttcatgacaaagacaccaaaagcaatcataacaaaagcaaaaattgacaagtgggatctaattaaacttaagagcttctgtacagcaaaataaactaacaacagagtaatgaaacaatctacagagtgggagaaaatatttgcaaactatgcatgtgaccaaggtctaatatccagcatctataaggaacttaaatttttaaaagaaaaacaaacaaccccattaaaaagtgggcaaaatggtgattattacaccatttcttatatagcagaagaagcttccaatagtatatttctatttctccccctcccaatctttgtgctgctgttaccatacatttacttctacctatgttataatacacatatgacaggattaattttttttaattatactttaaggtctgagatacatgtgcagaacgtgcaggtttgttacataggtatacatgtaccatggtggtttgctgcacccatcaactcatcatctacattaggtatttctcctaatgctatccctccccttgtcctaaatactaactgactggccccggtgtgtgacgttcccctccctgtgcccacatgttctcattgttcaactcccacttatgaatgagaacatgtggtgtttggttttctgttcctgtgttaatttgctgagactgatggtttccagggttattatttttatttaagcattcaattatctcttaaagaaatttaatagtaagaaaaaaactcttgtatacttatcacatatagtgaccattttgaatgcattctttctctttgtgtagatataattccatttgttatcagtttccttgtgcctgatttttttttaacttttctcatagtgtggggctgctggtggtaaattctttcagactttgatgtctaaaagtctttcacctttatttttgaaaaatagcctcattgggtatagaattctaggttgacaggttttttttttgtttgtttgcttgtttgttttgtcccacccgcccctggtatttcgaagatgcaaatccactgtcttcttgattgcattgtttccagtgagaaatctgctgtcatctttatctttgttcctctgtatgcaatgtatctttagtgtctttatttctctggatgcttttatgactttttcttcatcagaggtttagttaaatttgactatgatgtgtcttagtgtcattttcttcttttttatgctttaggtttattgacctacttagatatgtgagtttatagttttatatttttggctattgtattgaaattttttcctataatccctcttcccccttcagggaatccaattgcacatatatcttaggctgtgtgaagttatcacacagatcactgatgtgctgttcatttaaacaatttttctgtatgttttattttggatagcttttattgacatatcttcacattcactaaccttttcttctacaatgtctactctgtcactattcccatgtggtctactttgtctccaacattgcagttttggtctctagaagtttgaattgggtcttttctatatcttccatgtctctacctaactttttgatccatttgggtcttgctcttaagatttgttaggcggggccagagttgtgtttagaacgaattattcttccattattgaggcaagatccttcagagtttaccatctaatgcttcatgaattatgaggttttctaagtcttgctggtggaataggcactattcccatgccagtgagagtgctgcatatcactgcctgtaatcctttcaggtcattatttctctggttctgggtagcatcctcacatgaatacactgtcagtactgtgatggatattctgcaggtatccagagtcctatctctgggcagctctctcctccctggtactcttttctgtgaattctagccttgttgttctccctggactctcagctccacctcctcatatcatggagttcatcaagctccaccgacccccttccccagcatgatggtctggaaattctcccaaggcagtaagcttgggaaatcatagagttcacttcatttatcatctctcaaggaccactgtccttcattagctgatattagtgtcttgaaaatcactacttcatatattttgtgtagttttttttgtgttatttcaggtaagagggtaaatctggaccttgttattctatactagtctgaagtacaagtccatcatttttagttttgttctgtttgttttgttttaaacaataaataaattaggtcaatctcttggggaccttcactatacaacattcttttaacctactttattatactccctattttagaaaaccatgccaacaaacacatttcaaatgttgattagtcagaagtttcacaaagttaggtggttctttccttaattaatcagaagagtaaacttttcttgtaataactcacacaaaatccatgctgatttataaacaatatcatcataaagctaatatcaaatacaaataaatcatagatagcctaagtattgaaacattttagacatttatcaaagagttggaatactataaatcagctcaatattcagaatccccagagtcaacattctagctcccacatgatttttttggtgtctgtttatttagaacacaggctgagttcactatgaacagcttcaaactgaaaaggtgagagttaagtacatttcagtgtttgtagttttttccttctcagctttcttccatcaaggctcttcagatcattgctgtcaaagtctgtctccctccttcattttttagccctgttatagtctatcttcggcataactatatcctgttatagtctatcttcggcataacttctaactctgagtcctttacccaccattagttggggtctggtttgcttgcaaagaatgcatcattccaccattgtaagcatgtatgtacatgtaaacaaaacagaacaaaatccttgataggacaaatctcactgcaactgataccatcataataaaaattttcatataatacaggtttttcaatctcaaatattgattccatttattttaagtaatgttgaatacacacacacacacaaagaattttataggacagataaaaatggctttcaactggtataagacagtggattaaagtatcagaaggacctgggttccacttttgctctacccttactgtgattcccttatcatgttatttaatatctctaagcatcaatttcctcattggtaaaatgtacacaattataattttatcaagaaaaattatctaaaagttgaataaggttaaaagggtgcggcatgacctttcaaaattttaccagagcactgactggtgctaaaagttacttcattatctagggaatgtacctgtgtttgactttctattttctatttggttagaatttagatgactgaagttacgttaattcataaatttctatccaatagaaaagataacatcaaatactgtggttttattgctttgaaggatattaaccagttttaaatgtagcctcaaaatcttattcaacacttttttttccctcaaaatgtctataaataccagattcctcaaaatgctcttggaattagtttaattttgtaatggttccaatcattaatgagttaaatgactgtttggaatgttttcattccgtatgtatatgacattcatgtttttaacttgttaaaaattatactttaaccgtacctatatcatcaggttgttacgataattaaataaaaattaatataaagtaattaataaggccctaacacattttaatcaatgaatgttagctattgttattatctattattaaatgaagtttggttcacaagaaataaaaaatatattatatgccaaacttcacctatagatacccatgaggttaaaacaaaataaataaaacaaagagaataytgatttcctttgggacttttgagtcttccagtgtctagcccaaggaatcaagcttttgaatcagtagccattttcatggatgatgctgggacttatatttattgggatacataatcataaacagaataaatattgtctcataaagaaaaagaaatataattttcccacttcacatgactgataatagataaaatagctaaaaattgattaaagtaaaaattaatatttttcctttaaatcctgccttgatacacccaactgctatctttcattttatttcctttaattttaatgagttatcccgatttttttccaaaagtttttttgtttgtttttttccattgttgttgttttttttttttttttggagacagagtcctgctcagtcacccaggctagagtgcagtggcgtgatctcggctcactgaaacctccacctcccaggctcaagccattctcctgcctcaacctcccgagtagctgggattacaggaggccgccaccacacccaactaatttttgtatttttagtagagacggtttcaccatgttggccaggctggtcttgaactcctcacctcaggtgatctgcccgtctcagcctcccaaaacgctgggattataggtgtgagcctccgtgcctggcctttccaaaagttttgaatagctatatccttcactccttcgtgtgatttcaacaactgctaaatacagtggtgacttccctccaaaaaaattgtcccctaaaagaaagtaaaaaataagagggctgcatgatcaatttctccaatttcattatgattttggttcctgtttatgctcgaataactttctcagattataaatcctcaaaaagaactcagtcaattttaggttttgggggtttctttattttttagatactggcccaggagttaaatcagctttggctcagaggaaccaattgaattgaatcaactgaataattgaataaacattgaaacagcactccagaagcaattcctatccatactgatgtctaaagaacaatgaaaaagcatctatagaaagaaatacaagtactggagctaaaaatttccacatacaaatgaaactgggatttactctgcactgtacacaaaaccagagcctgggtcatcaaatactttttaaataccttcaaatattgaaacacaatgcaggaacctacttaattcattttaaaaagcaaataaatgaatatagagacttacatcaaggttaaacattcagctgttgttcagttccagtgaaccaaagaagtgtacactgaatttaaaataaaatgaagacacataatatatgaggtactgaagtgctctttacatttgcagagctagcttatgcttccagacaagttcagacatacatgtacatggatacacacatacttgtgtatatgcgcatgcatttatacatatgtgtaatatatgtatatatattcacacacacacacatttcctaaccaaaaaggaaaggcttattgttttcatgttgagcctttgaaataagacattagcactgagcaagtggagaaatcagagtggaagtagccatcattcaacattactcccagatccttgccactcaaaatgttgtctctggctcagcagcaacagtatcatctggcacctagttagaaccaccccacacctctcagaacagaacccaagtttttaccagattgcctaatttatgtgtccaaattaaagtttgagaagtgctgccctggatatgtgctgtccattaccaaagttactagccacatgtatctgttcagctattgaaatgtacttattgagactgagagattgcattgtaaaaatttaatgaattaaaatttaaaaactcatactcaattcagttattggaatacttttcaatacgtttgaaacaacttaggtacacgaatctaaatatagataagtatttctggtgaaaatatagcatccaaattaagaagtaagcataaaatacacaccagatttcaaagacttagtataaaaacatttacgtaaaacatgtcattgaaaattttatgattacaggttaaaatgataaaatttcagatatgttgggttacattaaatatgttcttaaaattcatgtgcttgtcttttacttttcaaatgtgactactaggaaactgcagctcacattctatttctactggacagcattcctttcgatccatggttctcaaatgtaaaattagtgcctggctcccactcccagatattctggtaaaattggtctggggttgaactgagcattgggatttttaaactcttcctggtgattccattgagcttccaaagtttgagaaccaccaccctggattaataacagattcattaattctgactaataaataatggcctcataaagtctttatatcttttgggaactcccatcattcttcaactaaaatatagagctgggaaagtagtaccatttcttaagatcaaaaggctggaagtttgggtgatattattctccttcaacttcaggcagagttaaatatacccaaccagatgaaaatcaatgttctttaatatcttcagaaactggccaccagttatttcagcagttcatttctatatctaatgtagtggatcttagacttctgtgcatttagaataatctccttgatagtttgttcaaaagcagattgctgggccttagtgagtcacaggagttctgtggtagggtgaccaagtgtcctgatttgcctgggacttttctgggaattgctcggtcctgggcaaagaggggcagtggatcaccctaacccagggaagtgcattactaacaagcagtccaggtgttacttctgagcacagtttgagaactacttctagaaacacaggctctcaaatactttttcagtgatactctttctggattaaccaactgtcctaggaacacaaccaacgaagttatacaaataaccagttcagcaaacaactgattgtggaaattgttctaatataattaagcatgtcatcaaattgctttaaagtgtatgaaagaactataaagagatcaccctgatagccttgatgagaacaattccattgtcagaaatttagcagattgagaccagggaggcaaagtaagtatgtggcttgaagtcatgtcaacactgagtttgaatcacagcttctgccatttgctagctgtgtaactttcaggaagttcctcaacctctctggatctcagtgttttcatctataaaagatgaataatttatacttacactgaaggctaaggatgagaatgagaaataatgcactacatcagatgaatcccagctgagggacattctacaacatacctgaccagcactcttcaaagctgtcaaggtcatcaaaaagagggaaagtctgagaaattgtcacagccaagaagagcccaaagagacatgataatcaaatgtaatgtggaatcctagatgagatcctgaaccagaaaatgtatattagataaaaactaaggaaatctgaataaatcttgggtgttggttaatattattgtatcaaaattggtttatttcttgtgacaaatgtaccatactaatataaggtgtcaataaaagaacaaaatgggggtagggtgaatggaaactctctgtatatctctgtgacttttctataaatctaaaactattctgaatttaaaagcttactacccccaaaaaagtgtctagcatagtagtgtccaggccagaagtacacagttaacaattgttgttactaattttgtgaattgtacattagaaatgatgctaacaagaagaacatcatcttgattcaacatctttaggaggaactatgagcttgaaacacttggacatcagagttgagagaagaggacaaaaggcaagatgaatgggcatgaagaccctcaaccatgttacttctgattggctttctttctggcattattcaaattctgtacttattttattcattcatctgttctctgctttgagcccaacgtctcctatctctgccccagaatataagctccttggaggcagagactttgtctttgtcacttctttatccaccatacccaacacagcacctaacatagcatggaaattttatctgaatttactacactgaatgaaacgattccattggacatcaaagggcagaggcaaacactctggactggatccagagtcctttttatacatgttttcttctcctagcttcctcgtagctccccacctttcaaaaaaagaaaagcaaacaaataccaaccccactctactgaccaagtaatttactttagggaaagaaaagacttcaacatttgggtccagatttgctctcttacgttctagcttacatttgcaaatatgggtgacatggctgaaacagaaatgtcttggtaattacttgtgctatatcacacctcgtgttttctagtcaatttaagcctcacaaaaattttgttacataagcagggcagatgcttttacctccactataacaagagatataaaatataaagctttatataaaagagatataaaatttttatatgaaaagattatttttataaaaagatgttttttaaaagaaggaaggaatttaaggtggcatcatcgtttacccagctaattcacaggggattatattattcttccggggctgccataaaaaaaatcccacagacagtgatttaaaaaacagacttgaattctctcacagttctggaggctgaaagtccaagatcaaggtgcaagtggttttggtttctggtgagccctctttcctcagatcactgtgctctccatggtcctttgggtatggagagagcgagttacaagccctggtgtctattcctcttataaggacaccagtcctcaccagtcctatcagattagggccccactcttaatgacctgatttgaccttaattacctctttaaaggccctatctccaatacagtcacattaagggtgaggcctttcaacatatgaatttgggggaacacaatccagcctatcaccagaatgttctctgacaacaggcagaagggttaccaggatgagcaaggaggagctaacacttatggaacagggaggaactaaccattaaaccaggggtcagaaaactatggcctttgggccaaagttgagggccaccttcaggttgtaaataaactttcattggagcacagccacatccattcatttacacattgtctgtggctgctttcatgtagagttcagtagttgccatggagtctatggcctacaaagcccaaaatatttactctctggcccttcacagaataaatgttctgactcctgagttagatcaatatatgagtgttcattttctccatgacataatgccataaagtcagtgttcctgtcacttcaccaatgaagcagtggaggctctgagagatgacgtgatatccacatcacacagctgacagtcagagagcccagagttggagctctacgactccaaagggtgccctttccagggcacctcatctctgggcccagggcttttctcctaggctcggaatggtgtgtggatatggctgccagcctgtggcctaggtaagtcatcccatctgcacaatggcttcctacaatcctctcagcctcgaagatcaagaacaattgtcattcagaccagaatgtcccatggtttccattcacaccttatcagcagttgactatagctatttttggccctcggtttcttgaaattttattttgttttggtttatgttttatgttgcggcatgtgttttatatgactaagattgacttagaaagcagatcatttgcattagggagccttgcaaataatatgtagaccttaagaggtttctagggataattttgggacttttagccccaaatgcaattgttggtacttttcattattaaacagaatgtttccttttcatttcagcattcaatattgaactcctggtgctttccttattgtaggaataaaagaagcaagtgaatacaactcaggttcctctttatggacatttgtcaatagaaaacagttccaagatcctctttgaattagtagaggcatttcccaaattatttacacaagaatccagagctttttcattaggcctatgttagaatctaaggaagcaaaacagcaattgggattaattttactattggctaatggattacttcctgtttccagcttgttgatcttcctgtccatacagacaaatgatttgcctggagattcatgctgcttttgtctgttcagcatcatttcctctgaggaacatcctctcccccatttcaggtggtcccaggtgggctgtcaatcacaacacaccagacctagccaatcatattgcctcacctccccagacacagtaattgattcaggggaaagaatgtgacccagtcagagcaaattcccccaaatgttaaagaagttaggagagaggccttcaaactaagtggcatcaggccaagagatagaggcagaatgactggatccagcccttcctgaggctttacccaccccagacttcctaagagtgtgatcccaaaatttctttttctgcttaagttaactcaagctggacttctcactcaaaatccaaaatgtgctcactaatataacatgcttccaggttttctgagtgtccctcagaaacatgtgtcagcaacttccagaggacatagggcactgagcattgggatccatgggtccttatcttagctgcaatcttagagcccttaggtcatccctatgccaagttggagggcttttgaaatggagagcctgttacacaggggatgcaacatgatttcatggatatatttatgtcttatgcacaaaagtgcattctagacttgctttttaagttccatatctctttgtcccctttggcccttcctggagtggaagcaggacaaattcttgtgctgatgacacttttttttttgagatggagtctcgctctgtcacccaggctggagtacagaggtgctatctcagctcactgcaacctccacctcctgggttcaagcgagtctcctacctcagcctcccgagtagctgggattacaggtgcatgccaccacgcctggctaatttttttttttttttttttagtagagatgggatttcaccattttgcccaggctgatcttgaactcctgacctcaggtgatctgcccacctcagcctcccaaagtgctgggattgcgggcatgagccaccacacccggctgctgatgacactttattggcaatcttgggaagggaaaaaagaccaagtagaagtagcaacgggacccctaacattgatattgcctgatgactgggctggccaaagtctggtgccaggacccctatcctaccagtggttccagacaccaccgagggaatctggaaggagaaataaagcccacaacacgccaccaagtggctgcaatattactcttgcagtgaagatactttttttttcctcctttgtttccatagggtacttttctaaacctgtccaaagtccctctcactagattccttaactgtcacttaaagtgttatctatgactcagaatttcctaacataaattctataacctccctcctttcctcaggaaagttaccaactgaggcctactcacaccaaaactctgatcctagtggctgtgagatgtctgaatgctgtttaaactgtgcacttacatgtgtttgcaggtagtgataaataagaactcttctttgttgtcgtgcttattcacagtttaacttggcttcctctgcttcagacagaagggaactgaagtaaattcttaagacacacaaggaaagaaagttctttgcgctgaaggcggttcgccaaggtgctaattccatctttggtaggtttctcccaggactgtgttcctcatccaggaatttccctgagcttgatgggtcacacgtccaaattccagctttgaataaataaaccaactaaagtgctcagttgcctcagggattagcagagcagttcacgaacttccatcgccccccagtggcaattagttggatctttttgttagggattttcttatgcttaaaatttaggttatcgttctcccctccaaagttgttttaagtttttgtttgtttgtttgtttaattctcacactgaagattataaagtctttgtgtggaggtatgttggtaatgtcaaattaatggcttctgggtcaccaggtcatagacggataagatgtagtatctgctttcatggttctaagtaaaagactgattttcaacctggtctctattctgaggctccatcctgagagaaggtgaaaataagcagcactaaatcactaaatccagaaaggactctcagtgggtggcatcaaggtaacctagagagccagttagccttggttgcatatagatgagaactcagccacccacagtgatagtatctactctgaaaacaagatataggctatgtgagattccaaaaataaaaagcagaaactgtgttgagggagaaagcttatatacatatgaagtagccaagaaacacttttctagcataataaattcataaattcatgcaacatacagtcaatgatttttgatagctagcataaagtacttcaccttgttttatagaaaaagaagaagtggaatttaggaaagtttagactgaagaggcttatcttcaactcaaaaaagggaaggttcttgcctccctgcccacagtggagttagtacttaagcttatttttcagatcatagtaaattcctttggttcaccacctgccatgctccacccccacaccccttttaaatttaaaaccaggtttgtagtcctttaaataatactgacccagttctaaattcctacacaccaaacagtcctgccaatgctaaatcctgagtagaagtgtttgtccttcagcttcctttactcagaatttgtctcctttccagccagaacattctccttccctggccacccctctccccttggctttggaaggcaaactttacctaatctgttttgtttaagaatcctaaatcttagtggtttaagggcctcagtattagtacacacaagcacacatatataaatttaagaacaaagaatgttttattatcagctcattgtattttgtataatatttgtttaataaattcacccttaaagtataagcctctgtcagttaggcctggcctccccatctcctggaccccaaggtcttattcacttgaatctcccagtccatggtccatggaatatcaagtttccctgagttatatgttactcctcagggacttaggctcctatggtcacttctgcctctggactcctctctctgcttgtgctggctcagtttacattgacctagaggggaaactctgcccctttatcatcttctatgaaaacccattcactaaattacttgctgattttgtaaaacactcataacaaaatagagatatatggatacttcttaaacatgacaaaaaactttatgccaatctaaaagttcgcaaaatgcttaatggatagacactagacacttttccacaaaaattaggaatgtctactgccacttttatttaacgttttgctggaaagtcttagcctatgcaggagaaagaaattagaggcatgaggccaggcgcaggggctcacgcctgtaatcccagcactttgagaggccgaggtgggcggatcgcctgaggtcaggagtttgagaccagcctggccaacatggtgaaaccccatctctactgaaaaaaaaaaaaaaaatacaaaaattagccgggcatggtggcaggtgcctgtaatcctacctacttgggaggctgaggtaggaggatcacttgaacttgggaggtggaggttgcagcgagccgagatcatgccattgcactccagcctgggcaacaagagcgagacttcgtctcaaaaaaaaaaaaaaaaaaacaaaagaaattagaggcattaaagttggacgggaggaagtaaaatcattattagttgagattatatgaaataatccctggaaaatccaaaataaacacacaaacattaagactaaagacaagagaatccaaaacataggagagtataaaatggatgtagtcattggagcttgtctttagtccattttgtgttactacaacaaaatacctgaggctgggtagtttataaagaaaagaggtttgtttggcttagagttctataggctgttcaagaagcatggaaccggcatcttctcagcttctggtgagggctttcatgttgagtcagcagagaaagtcaaaggcaaaccaggcacatgtgaagagagagtaaacatgagggggatcctcactttgtaacaatcctgctcttgccggaaccaatccattcccgagaattaatccagtcttgtgagagtgagaacccactaccattagaaagtcaccaagtcattcatgaaggatttaccccatgacccagacatcttccattaggccccagctcccagcactgccacactgcagatcaaatttcaaaattagctttgatggggacaaacaagtcatattcataccatagcacagctataccttattcctttcaccaggataagtttcaaatatataaatggtttaaaggaaaaagtgtaatttttttaattgaagaaacttgggagaatttaggacttaaaatatttttaattatgccacaacatccagaaatcatagaagattataaaattaagatccataaaaactactcaaagcaaaacttagcagaagcaaaaacaaaaaaagataattttagaaaatattccaacctcatagtgtagaagaaaggttaatttccttataaagaatgtctacaaatcaatttttaaaaaaagcaatacactgtgttgatgaaggtgtggaaaaacaggcactctcatccactcctgagggaagctacaaggggtacaaccacctatctcgggtcatttagaagtgactatcaaagttttaaaagcacattccctttgacccagtcattttaattctaggtattacaaagatatgctcacacagtgtgagaaatgatgtaagcacaatattactcattgtagtattgtcgtaataggaaagtattggatataacatcaatttagttgattagtaagggaccagttacataaactgtattaatctatatgatggaatagtgtacatgtcctaaataaaaacaaaatggaacactgtatgtactgatatgaaaatttacattttaattcttgaatctgttaaataaaaagaaagatggatatggaaaacctccaagatattttaggtgaagaacaacagttaaatccctatataaagtatgctactacttgtgttttaaaaatggggtccctcaaagcacatttcttggaaaactgcatttcatgtggtggtggtagaggatggtttgtcaacttgtcttttgcgggtttaatctttcaatcccactttacaatgagtccaaaccactcaaagagccttcccttccttcctttaaagctactcatgccttgccttattgattttccttccattactcctattttctccaagtcattaattcacaatgtttagaataaaaaaataagactgccaaggaggaagaaatttaggttggctagtgatgcattctcttcctaataggaaagccaaactaaagtcgcaaagttctttggtaaatttggaatgagagcaaagaaaaccaaagccttgaaggattttaccatccattcttatgtcttaacatccaaccaaacctgataatttacatttctttatctgcaaccagctctttcctgagttctaattctgtgttctgaaccgcttctgggatttcactgcctagataaccattatcatctcaagtgcaatgtgtctaacctgaactcatcttgcccctaaccctaaatatttctcaaaatcagcagccatttttttactcctgtcttcttatttacttcaccttagctttctctttatgcagtaaggtggtaatttcaaacaactgtaatctaccatgctcctcctttttaaaagaataatatgtcagaaggtctttggttacagtttatgctttaaaaattggagggcaaatccaatacccactggaaatttcattaacataaccccgtggtttccccatttctctctaccattggtaaccaaatccactactaattatttccatagggaagaaaacatgaaattcctcactcctctaggcaagactatactgatatctctcctgcctgtgtgggtggtgattcacatggctctccagagctcctccccaaagcaatgttcacttcacccattcttaccagtgctattcccatcttttttggcacatcatgttaaatctagtgactcataaaggcccacttgtggcaacaactggatcagcaacttaatcataataacttcaataataataacagttttcaccactcgaaaatagcgagtccccgcccccatttctgcttctgaatgattgtgtgtgttggtttggggtaggtagaaagaaggggcaatgagttaaatagtcccagtgtagttacataatgcacactacatgccagtatgtttgcatgtgtgtatatatacatatattgagcaagctgagaaagtagaagcccatgctctagctgccaggtatcaagcagaggaagtttctggcctttggttttccaagaatagggtccctccactttaatattattgacatttggggccagataattctttgttactagagttggcctttgccttgtaggatgcttagcagaatgccagacttctatccacttgatttcagtagcaaccactaccctcagtgtgacaatcaaaaatgtctccagatattgtcaaatacccccaggatagggacagcaaaatcagctttagttgagaagcaccgccatagagggaatcagggccctgtctcctatcaaatctcatacctgctgaatttcccagcatgagaagaggctgggcaacctccctgttggcattcaccaaagaatagccttaagttttctgaattgacctaattgcaggcccattagtgcccactcagaccaccttggcaggtatcaaggaaagtccagtcttaaataagtacagctataaattaaagaaactttctcaaaaagcaatgccctgcatgcatctggagacatgaaacaaaggttccataagaaactgggagtgtacatctggagacatgaaacaagggttcctataagaaaccgggagtgattcctcatataaggtagtcatccacaatcagtgaattaattaattcaatttttcttttgagacagattttcactctgtcacccaagctggagtgcaatggcatggtctcggctcactgaaacctctgcctcccgagttcaagagatgttcccgcctcagcctcccaagtagctggggctacaggtgtgtgccaccacacccagctaattgttgtatttttagtagagatggggtttcactatgttggccaggctggtcttgaactcctgacctcgtgatctgtccgccttggcctcccaaagtgctgggattataggcatgagccactgcgcctggccaattaattcaatttttagaggtctatgtgaagaaaccctcgactctcatcaaaacacaaaaaagcttgggacttaccaactaataataatatatcctctaaagttattacaatggttgtgagaatattaaacagaatgataacctctggccatctctaattttattggcaataaatccctttaaggaaaagtagtgtttatttccaagagcaagaggtaaccctggcctttgatgtagacacggtccctctgagtacacatgtgatgaatgctggcagactccatggaacacagacctattggtggggggtctactggctatgtcttaggaacttaccttcattcatttaggccttagcaaagatcacagtctatgaagttcatgggcagtgctggcacagaaccaagtgaaggtctccaggcataactagaaagtggtgaagagcaaagttgagaaaaacaagctatctctattgtcagatcaaataattcttctttttaaaaacccttccatggcttcacatttcaattaaaagaaaatgtcacttcctcctcatggcctatggcatgatccagccccaacatcacctcctactattctgcccccaactcattctgtgtgggccacactggtctttccctgttctttctgatctcagaacattttaccatggcattctcattgtctggaccactctttgcattgatcttcacatggctgggtccttctcaacattcaggtctcagctaaaacgtcacccttctcagagaggtctttgctgacaaccatatctgagaaggtatcctgagctctcaatctgtatcgtgcacactgatcatctggggatcatgttacaagacagactttgactcagtggttctggggagggacttgaaattctgcatttctaacaagctcccgaggaatacaaattttctgctccacagatcatctacccacaggggtgggtagacccccatgcctcaatctttgtcacactacctgtgtcatttaattggtggcttttatcaggatcttaaattatttatttatctgtttgtgttggattgtttgttgtccaatctattcatttactagaatgtaaattccctgagagcaaggagtctgtctagcacttttaaattctcagcacttcccacagtacctgacacatcataggtgctccataaatattgctgaatgagtgaaacatcactcattcaagattcattgactctgtgatcccttccagtgtctgcttctgactgcttcagtgagcactcaattatacaacagaaactacactgtaatgatagggcagtgctacccaagtgccagtccagaaactgctagttattggccaacactgaattaagaatcttgtactataatataaatctgctatgccactaagcacaattttatctgagatgagacatttttcatagtaagactttctggatgaggcaagcaatgctttgccttgccttgtggtgaaagctcctcatctcatattagaagggtaacagtgtgtgaactggtccccactggcaagacacattttgagttgtgctgatatagcggatataaagccaaataagatctattttttaacttcagaaaatccatacataggtaagagaattacacattcaaatacataactgcaaatcttttgtcaagtgctataatacggaattaagtggaagaactcaggaattgtagaaaaaaacaaataattggtcttttgtgctcccccttagtcacacctttcctgacacctgctctcattataaccacaaaccctcccaccataccccttcctcctgatcacataccactcatctgggcatgttcttccccttgggccctgaaacactgaagttacaggaccaggcttgggtcttctgagaaattgtgaaagggaactgagaattgtggtagagaacagaaaatgataggagagatagggaattgtgggagaagggagaattgcgggagagaataaagtatcatgagagaacagagaattgtgagagacaatgtggaattgggagacagactaggcagctgtgaaagagaacagaatattgtgtaataagggagaagtgcaagagtggagaattgtgagacagagcaaagaattgtaggagatacgaggaattatgggaaagacaaggaattatgggaaagaacagagacttgtaggtgagacagggaattgtgggagataataaagaaagggggaagacatcaggaattgtaggaaaaaacagagaattgtgggagtgacacaaaattgtggacacacggggaattgtgggagagaagggagaattatgaaagagaagagattattgtgggagagatgggaaattgtgtaagagaatagagtattgtgagagaacagaatgatgagggagactaaggagttaggggagagactacagaattgcaaatgaggatggagaattttaagagaatggaggactgtgagtgaaagtgaagaattatcagagagaagaaagaattaggagagagatgtggaattatgagaaagacaggaaattgtagcatatgacacagaattgtgggagagagcagaattgtgggagagacatagatttgtggagaggacagcacaaagaattgtgggagagacacaggattgtgggagagaacaaaaaattgtggaagagacacaaaattgtgggagaaaagggacacttgtgggatagaaaattgtgaacgagaatattgtgagaaaacagaattatgagagagaatgggagttaggggagagactggggaattgtgaacaatcatggagtattttgagggaatggagaattgtaagagtggagaattctgcgaaagaacaaagaattgtgggggagatggggaattataggaaagataggaaattgtagcatagaatacagaattatggttgagataaggaattgtgggagagaacagagaattgtgagaggaaaccaaaaattgtggggagaaacatggaattatgggagacacagggaattgtgggagaacagagaactcagggagagacaggaaattgggggagagaacagagagttctgggagatacagggaaccatgggagagaatacagtgttgtgggagagacggaataattatgagaatgaagggagaattgtgggagaaaggaaatcatgaaaaagaatattgtgaaagaacagaattatgagagataatggggaattatgggagagactggggaataagaacagagtattgtgaatgaacagaacattgtggaaatgaataattttgaggaattgtgacagacagagtcatagggaatgatggaaaagacagagaactgtgggaggaatggaactgtgggaaacagaattttgagagatacaagaatttgtaggaaagaataaaggcttgctgggaaacccagcaaattttgggaaaaacaacagaattacgggcaagacagggaattgtgggacagaaaagtgaattgtgggagacacaaggaatcatgggagaaacaagagaattgtgagcaagacaaggaattgtgggacagaaaaatgaattgtgggaaggaatagaattttgggagtgacatgggattgtgggagaaataaggaattgtgggagagacagaagattgtggaaagaactgagaattgtgggagacagaactgtgggtaacaaaacagaattgygggagtgaaaaggaattgtgggagggacaaaagaattgtgggtaaagagagaagttgagctgtgatagttgaaatggaatccttgggctatcctgtaggcagttctgatgctgggatggcccttctgagttgtcccctttggggctaggggcctggacttatgtgcccttgcagagaccctcataggatgcagatcgtccccaaggaggggaagtgattttgtgtgaggcaattctcttaggcagaggacaattcctggagactcagctgaaagctgtgagcccccaacactttctgcaccaggggacatctggacgtatttcacagagccactatagttatatagaaagatatatgtttctttattaacactttaagtaacaagatcaaattaccttaatttcaaagtagtggatggatgatattttgagacaggcacaacaaccatatgtgacataatttatctgtaatgtgtattagtgccacatacagctaatagtactaggatttattgcctacatccctgatggaagaaaatgctaaatttctgttggaggtaaatgaaaatacagacattcaaaatcacatacccagttaagaagaatttagcagccagaacactgtcttgttcacttttggatctccaccaccgaagttatgggcacctactaacgtttcttgaatcattgctacaattaaaaccgataagatttaaaaaaaaaacaaatttaaaaactcctccaaagcactccttctgccgcataaagcatacatagtagagctcttcactctagggaagcctctggagcagacaaccttccctgccaccgccacattttgaaaaaggctcctggcctggaggggcgggcccagaaagcggcccccgcagcagttacaggccggggcgaggaggggacggaacccgctctccgtgattgacggaaaatattactcttcagcccgcctcccgcgtgcccggaagtcccgccttctaaaaaggaagtaggggtgcgtgagaacgccggcggtgaccgcagccacagcggtgaccgagtgagaggaaggcggcggcggcggcggcggcggcgtgaagtcactgctgctctgggttcgggttggcgactgaaggcggtaccggcctcccggaacagcccgggggagggcttaggtgcagaagggcaggctggccgcggccggtttggtctggggaccacgggctggagcaggtgggcaagcgccgggacggtgtggggaagacacttggcagcttctcgacctctggtgtcccttcgtttcttcgaattcctattcatgcgccgcacccttctcggacccccagcccctcgctaaggctctggggatgggggtcaagtctaggctcaatggacctcccctcctccacccgggtcaccactcctcggaaatcctcgccccactcccgcctcaggcctgtacctcctggctgtgacgtggtttctcagcgactgcctcacctcagtcccaaaatcctcactgccttagatacatacgtgcccccagaggttggcctgggtttcacagtatttccctaagggggcaatatattaaagctgtccttcgaagttagtaccctgcctggtagatgcccatgggatgacaaagaggaggaacaagggttgaccagattaggactaacgagagaatagtctgagtccagagacattaatctgtctctttgttttggcaggtggaaatttaaaattgtttacagtcaacactgtttccagccatgggtttgtctccatctgctcctgctgttgcagttcaggcctcaaatgcttcagcgtccccaccttcaggatgcccgatgcatgaagggaaaatgaaaggtaatcggccctttgcctagaaaataaaaacaaaagataattcacggctgggtgcggtggttcacgcctgtgacagcactttgggaggccgaggtgggtggattgcttgagctcaggacttcgagaccagcctgggcaacatggcaaaaacctccctctacaaaaaaatacaaacattagccagacgtgctggtgggtgcccgtagtaccagcgactttggaggttgaggtgggtaggatcgcctgggaggccaaggttgcagtgagccaagattgtgccactgcactccagcctgggtgacagagtgagactgtgtcttaaaaaaagtctggaaagcctctaaaggaagaggcagtgtagtatgctgctgaggctggtaggcatgggagtcaggcaccctgggtctggtcgttattttgcgtcttattgaggtttgtgactctaaacaagttaactctgttagcctcagtctgtcatctgtaagatgaagatataataatgtttcacaggcctgtcatgatgattgaggtagtacatgagaacgtagtgagtactctaaaccagccccaacttcccaaagtttacttgtgcctacatcagtggttcttaactggaggggggcaatccccccttcccacaggggacatttgccaatatctggaggcatttttggttgtcacaactgagaggaaagtgaatagagggcaggagtgctcctaaacatcctacaatgtacagaacagccccccaacaaagaatcagctggccccaaatatcaagagggccaaggttgagaaaccttagtctagatctagctgtcttaataaataacttttgctcgtatagccatttcagtattttcgtatataaaagtaagccatcacttaacgggcttgctgtccattctttagataagaaaatgaaaatggaaaagctgtctttcatttttaattcattcatgtctactttagattttttatattaaagtgtggcttgaatcagtaagtcgtgaagggcagaagcaacatggtgtgcttactgagtactaatgtttgcgctgttattcatttcttcagtcagccagcctattctgagaggtcactgcccattctgtaccaagcattgctggattttgtttgtttctgcacgagagaataacatcatacaaaatggagctttgcctgatagagcttacattctcatcttcataagctatgtggtcttacgacttcataagctaagttttctccctattttatagtcaaggaaactaagacttggagtaactgatgctccaagtcacatagtaagtggcaaagccagcaaaagttctgtgaccttggacaaggacaggcagtgttcttctggggtttctttgtacaggaagaattgagacagatcagccaaagcaggtgtgctcctgttctgagtgtcctcagggagattctagaacccttactttggttttatttcatttgctgtatatcttggagagctgccagacttactacattaataaagaatgtgggtgtctataggagatcgaaggggctactggttatatgacgtgaaaagttgaaatgttattttctttgtaacacccagctgggatctatgacttggaaaggattggtgctttcagtggtagagaggaaaggcatagcaagtcttccttcacccctaaagtgggcagtggcacagggcaccaggaaatgagggcttgggaggagaagtgcagggaaggaagtgaaagcaaactcagctttttcatgtgtattgctgtagttgctgctgctgctgcctgaggccaagattccattacatgagcagctgtcttctgtgtctcagctctccaagtgcctgctcattctctgaaccagtttcccagtccctcactaattgggatcagcatcctgggtctttgggcatagcccttgctattgctcatctcattaggctcagaccttccctcgtaatgggcatcttgatcctgtatgggttgtggaatattttctttattgtctgtcttttcctgttaaactcttgccattgactgatgggaataggccataggccacgtggttttcctgtgccttgtttcagtcttgagacaaagcagagtggcattcagatttttttgcagtagcctctgtgatgtctcctctgttcattttctcctccccttccttgtacctgagataatgcatcagtaatgaaagcctggattgcaactgtgtcctgattggatctgggcttctctggaactagtgaatggaaagtcaaggagaccctgtgaaatgtggctggtcccctcttaggttcctctaacagctccccagctgctcatccagccaggttactcaaaccatggcacagataacacatgctcttgcaactgccaaggttttttggcttatttttgctgggggtgtgacacaattagagaatgtatactcatttttctttcaaaggaaatgtaaattttagaaccttctcatctttaggattttggaatgttagctagttcagttcttgatagatttaaacagaagaaacctggcttttcctatggtggtaatcattggtcagaaattcagctctttagtgctccaattgagagagttagatgtcctgccttcatggtgacaccatttttatacttgattatttcaggctgtccagtgaatacagagccatctggcccaacctgtgagaagaaaacatactctgtgcctgcccaccaggaacgcgcctatgagtacgtggagtgtcccattaggggcactgcggctgagaataaggagaacctagatccttcaaatctggtaatccacactcatcttttctttctggagctttttatgcagggttgcttatacagactcccaagacaagttgcaaatggctaggatgaattcttctgtcctttgaaaacagagaagttagatattctatctacagtgaaaatctagaatgtgttagtaagtgtagtttcagggagtgcctgggaaaaaaaccagagtgattatgaggagccagcatagttgtactgggaataagccataccaaatgaatattttcttctgggacagttactaggtggtagatgggaaattctgtaagaaccatagctagagttagttaaggtatctttggtctggggaaactttgtagacacattacatgattggggaacttcttcaggtacaatagggtgccagcctgcccgagtcactagggtggttcactgtcgtgtgactgccagcaaatttaatgccattgagaagtgagggcaaggttgatgtgacatcactacattttgtgatagacaacatcagaaattgtggtctaaagtttggaatcgtgttttaacgggaggctcaggcatatacttcagagggccacaggattatcaagaatagaaattttagtgaaccagacagcctgtaaagaaactagaaatatttagcctggaaaagaaagggcgtgggggatacaatagcagcgtccacctcaggaatcaacaaactatggcccactgcctgtttttgaaaatgaagttttggacaatgcaccaagattatcttgcacataggccttcaaatatttacaccagaggtcattggcaaactgcttctataaagggccaggtagtaaatatgtttggttctgtgggccgtagggtctctgtcacactacccagttctgctgctgctgctttctctgtagcatgaaagcagcgacaggcagcattatccgaagcccctggcagaccactggcctagatgatctctaataggtgagtggttcagaacatgggccttttggaaccttacagacctagacacttaccccatgggatcatgatatgtagtgagaatgtgaataacagctaacttttcttgtggtcactttttaaaaattttttattcaaggctagccaactgaagcagtgggagaggagaaggaacaaagaaatctgtaactggttgtgatcaattagtcgtaaacactactgtactcagaccagcctcttttggtcacttttctagcgtttaagctaagcaccctacattctcccctttaatcctcataacaactctgtgcagccagtattcttagtgtccccatttcagagctaaagatactgagagtgaaggagtcattcatcccacatcaccagctaggaaatggcagagccaaaactgaatccttatccacctcagacccatgttcttaaacacactgtggtgataatgcaggtagaatactctgcagtgcctactacacatagcccttcctgctgtcggtattctgagggccttgttgtgatggagacttttaattaatgtttactaggaaatcctttatacttctaacacagaaagttcaaggccagtcattcccaaccttgggtgattttgcccctcaggcaaatatcctgctgaacatcctgcagtgcttagaccaccataactaaaaattgtccagctccaaatgtcaatagtgccacggatgagagaccctggctaaggctaagtgctagcataacagtattggtgacccacatgtctgggagaagggattcttcccaccttctgacctcgcagcgttgagatgcaaagactcatctgtaatatattttgcctaagggatgaagcataagcagaaacctaaaaaatctgagaatatttttttaaaaaagcattgctgtacatgtgtgctatgagagttttccccagagaatgaatagtcatttttgaaaagcttgtcgtaaagtttttagaaatgcctgaagatcgtggcgttagtttctacttcttattccttggtgacattacttctaaatttgttcaaaggagaaagaggccaaaaatttaaccacagtgtttaccatatttgagaacttaatcagtgaagaaacacaacctcagtaatgtgactcttcaaaacagtcaaattatgtgagaagtctgaaat

SEQ ID NO: 97558 - DNA, 24534 bp, Homo sapiens
ttgcaccactgcactccagcctgggtgacagagaaagactctgcctcaaaaaaaaaaaaaaaaaaagacatggatgaaactgcatgtattgatatggaaagtttgccaagggatactgttgagtgaaaaagtaagtatactgtatatatcacgccacgttttggttgagagagagaatatgagaatctacacttatatttgctttgcataaagtctttggaagaatattaaaaatccatgaacagtggctacttatgggataggatggtgttatgagctgaattgtgtgtggcccgctgacctcaaactcatatattcaagtcctaaccagtacctcagaatgtgaccttattttgaaatagggttgctacagctgtagttaagatgaggtcactagggtgggccctaatccttgtactttattatactttctgagttttgaacccagattcacttttcaaaaagttaaaaaatttacctcatgcaggatctggattttatttaaaaaaataaaataaaattggccgggcgtggtggctcacacctgtaatcccagcactttgggaggccaagcggggtggatcacgaggtcaggacatcgagaccatcctggctaacacggtgaaaccctatctctactaaaaatacaaaaaaaaaattagctgggcatggtggcgggcgcctgtagtcccagctacttgggaggctgaggcacaagaatggcgtgaacctgggaggcggagcttgcagtaagccgagatcacaccactgcactccggcctgcgtggcagagtgagactgtctcaaaaaaaaataaaaataaataaataaataataaaattaggccaagtgcagtgactcatgcctgtaatcccagcactgtgggaggctgaggcaggcagatcgcttgagctcaggaggtcaagaccagcctgggcaatatgacaaagccccgcctctactaaaaatataaaaaattagccaggtgtggtggtggatgcctgtagtctcagctacctgggaggctgaggtgggaggatctcttgagcctgggtggcagaggttgcagtgagccaagatcacgccactccactctagcctgcacgacagagtgagaccctgtctcaaataaaattttaaaaatctaatataaaaaataaaaaatttaggccgggcacagtggctcacacctgtaatcccagcactttgggaggctgaggtgggtggatcacgaggacaggagatcaagaccatcctggctaacacggcgaaaccctatctctactaaaaatacaaaaaaaaaaaaactagcgcgtggtggcaagcgcctgtagtcccagctactcgggaggctgaggcaggagaatggttatgaacccaggaggcagagcttgcagtgagccaagattgtgccactgcactccagcctgggcgacagagcgagactccgtctcaaaataaataaataaataaataaataaataaataaataaataatttgccaaaatattatcaaatgaacagtagcagtacaatccaatagagagactcttaattttaagaagtcaaaggataaaatgtggaaaatcgacatatcccttcagtaacaaaatctaattcactggcttgtaaacagctgaagtttacacgaaatgacagctctttgtacaatgcagctatgagtgcaaagcagcggcccacatggaactcttttctagcttgtagttactagtgactcaccattggtatctgctttgactttctcttccttgatctgcaaattggtcatctgaatagaaataaaagaaaacagagttaagcaaaggacccaataaaaggaaggtccctaagaaaagaaaaactttctagtaaaagtctagtgtgaaactttcagcaccagtattcagggagtcggtttgttccctcaaagtagagttgctgaaagtctgtgtgaaaccatcatttcaaatatcttcaacagccttaaaacaaggggaggggtggactaaatataatggttggggggaaagtttcagaaaacctcaacctctgctcatctcccaactcaagttctttctatttatttattttctgagacaaggtctcactctgtcacctaggctggagtacagcagcacgatcatggctcactgcggcctcaacctcctgggttctagcgatcctcccacctcagcctccctagtagctgggaacacaggtgtggaccaccatgcctacttgaactcaaactcgaactcctgggctcaagcaatcctcccaccttggcctcccaaagcactgggattacaggtgtgagtcactgcacccagccttctgtcactttcattggttatctctacactagagagcagaaccacatgataacctaagaccatgaatcatttattaagtgaaggtacacaagtctacatggtgaaaaaaaaggtcttctccaactattaggaagcctttatttataccagccttctgataagctggatgcttagaaccagataccaagtatgtttaggcctatatttgtgatattcatgtcacagctaggttaggatcacagatttcacaaggtttgaaaccaattctcagtaactctttcagagaagatctgatgctaaacgctagattttaaactccagagtgcaaggaccatgcccttgataatgctttgtaatttctttgtggaaactgccagttttatacctctgacctgctccttctcctgaactccagtgctgtatttccaaatgtctgatggctaccgggcagaagagaacacagcaggcctgaccgctctccttaggaaagcctatttgcaaggctggcccttggctgtcacctgcgaacttggactttgggaaggttcccatcattcctagaactgataagagggggtcagtctgcctcaactctttttaaaaacagttgcatgtaatttatgctaaccacctgcattccttctggaagtctggaattctggtacatgctaggcacagggtgactatatgacagccccccaataaaagcctcaagtagagtctctaacaagcttccctgacaccacttcatatgtgctgttacaatttgctaccggaagaatgaagcacactctgtggactccattgggagataacttggaagtttgcctggtttcctctggacttagcccatgagcctttttcctccactaattttgctttgtatcttttcactataataaatcatagttgtgagtacaactacatactgagcctgtgagttctcctaacaaatcgtcaaacctggcatctcttggggactcccacaacaggtacttaccaagatgtttccttattttaaattcagaacagccaaacctgaactcaccattcccttttttctttttttgaaacagggtctcaccgtcacccatgctggagtgcagtggtgtgatcacagctcactgcagcctcaacctccctaggctcaggtgatcctcccacctcagcatcctgagtaactgggactacaggagtgtaccaccaccccgcccagctaattttttttgtatttttgtagaaatggggtttcgccatgttgcccacactggtcttgaactcctgggttcaactgatctgcctgtctcagtttcccaaagtgctaggattacaggtgtgagccactgtgcccagccttcaccattctttttttttttttttttttttttgagacagagtctcactcagtagcccaggctggagtgcagtggcgtaattttggctcactgcaacctccacctcccaggttcaagcaattctcatgcctcagcctcctgagtagctggtattaacaggggacgactaccacgcctggctaacttttgtatttttagtagagacagggtttcactatgttggccaggctggtatcaaactcttgacctcgagtgatctgcccgcctcggcctcccaaagtgctgggatcacaggtgggtgccatcatgcccggctgccttcaccattctatcaaatctgcccttcctcccactttcctattcctgttattgggacgttagtagtaccaataggatccaggttgaaaacagaaacctttggctttatctcccttctctcctttattatgttagcaagtcctacccattctaccttcatatcttatacccatcccttaattttcacttccactgcccaacataggccctctatctcggggctatcagaataacttctacactgatatttctattagccatcacttctaacatattctgttctctgtagttcaataaatccttgccagccttgtctaattctgtcaatagccctctcaaaaatccccataccggctgggcgcggtgactcacggctgtaatcccagcactttgggaggccgaggtgggcggatcacttgaggtcgggagttcgagaccagcctgaccaacatggagaaaccccgtctctacaaaaaatacaaaattagccgggcgtggtggcgcatgcctgtaatcccagctactcgggagactgaggcaggagaatcgcttgaacccgggaggcggaggttgcggtgagccgagatggcgccattgcactccagcctgggcaacaagagcaaaactctgcctcaaaagagaaacaactacaacaaaaaaaaagacagtccattatcactaaacaaacctaaagtttaggtcttagatataagaacagaaagccacagtgtatgctgtaattacattccagttgaatgaatattcattactgaaagaacaagtacatgaaaccgttactttacacatcaatgaaacaatttgtagtgcctccttccaacatctgcagtagattgaggtattaaatccaaaagtcaatctgttattctgcaaagagctacaaactaccaaccacgttaagcatggatctaagaaatgttaaatacagagtagtacagaaacatgcgaagaacagtcgcgtaatgaaaaagagaatcagaatctaaacttggctttccttataatcgtcaccgaggaggtcaatagaggaatgacagcatgcatagtggggcggatttaccaaaggatgaagtccttaaccagcccagatggagataaaaagctcgacattggtctctttagctctaagagcaaatcaagggcaagtgactgccctagcaaactgcaggagcgcgttgcccaggggcctccccaacccggggagctccctgtgcttttgggaggtttcgcttgggcccctgctacgtcctcctcgccaggagctgagctactgaccgacttgacagccgcttcctgctcgtccaccgccagggcccacgagtcggtggccatagtcccggacaagggagacccacttgtgaaaatatgcgctgcaccacgtcgcaacgcgggccctaacctcgccaccggcgcgagaatgcacctcacgcggaccggaagcggcggtgagcacaggtgacgtcagttcccacccagcgtgcgacatcatcattctgcgcggcgccaggtctctcctcgggcctcgcctttcccttcgtgcgcaaacctcgcgctttttgctcacccttccaggacgcggcctcctcgcttcttaaaatgtctgagctctacgaagtggaactgttagccctccgtttattgccttacttcacactgaaataagccaacgtttattttattttatttattttattatttattttattattttttttcgagacggagtctcgctctgtcccaggctggagtgccgtggcgggatctcgactcactgcaacctccgcctccgtgttcaagctattctacctcagcctcccgagtagctgggattacaggtgcccgccaccacgcccggctaatttttgtatttttagtagagatggggtttcaccatgttggccaggctgatctcgaactgctgaccttgtgatcctcccgcctcagcctcccaaagtgttgggattacaggcgtgagccaccgcgcccggcccccaacgtttctttttaagcctgtcatatctcacattaaatgtgtaagtctctgaactgtagggctttgaacaaaggaaagttccatgagaatactatatgatgccaatttctactgttaggaacgcgataacaggtaagaaaacaaaaaccaaaacgcaacagaagacccgtaaaccccataattccaccatccaataaacacaacacacaatgcgttttttcgtttcttttttgagtcagggtctcattgtgtcgcccaggctggaatgcagtggtgtgatctcggctcactgcacccttgacctcccacctcagcctcccaggtagctgggcccacaggcccgcaccaccactcctggctagtttttaaactttttgcagagacggaagtcttcattatattgctcaggctgcttttgatctcctgctaactccagagatcctcctgccttggcctctcaaagtgttgggattacaggcatgagccaccacacctggccattatgttgaaggaccaccaaatacataatgtataatctatttatatgagattcaagaataggacaaataaaatctatgctgataaaaactaacagagcttacctgtggagaaggatgtttggtccagacacaagagaacttcctgggtgatagaattattctgtatcttgattgggacctggttacatagatgtgtaaatttgttaagtcatgctactttgtatttctaaactcatggaaccattatttacagatatcacccaggctggagtgcagtggccgggtcttggctcactgcaacctctgcttcctggattcaagcggttctcctgcctcagcctcccaagtagctgggattacaggcacacgccaccacgcccagataatgtttgtatttttagtagagatggagtttcaccacgttggctaggctggccttgaactcctgagctcaaggatctgcctgcctgggccgcccaaagtgctgggattacaggtgtgagccacagtgctgacctgctttttcttttttataagcagttcccaaggaagaataactgtttttgtttgttttttgtgacagggtcttgctctgtcacctaggctggaatgcagtggcacgttcacagctcactgcagccttgatctcccagactcaagtgatcctcgcacctcagctccccagcagctgggaatatagcacttcgccaccacccctggctaatttttgtgtgagaacttgtgcatttaaaatatcatggtatataaattatacctttcaataatgttgattaaaaatcaaaaaaagggccgggggcggtggctcacgcctataaccctagcactttgggaggccaaggctggtggatcacctgaggtcaggagttcgagaccagcctggccaacatggcgaaacctcacctctactaaaaatacaaaaattagggccgggcgcrgtggctcatgcctataatcccagcmctttgggaggccaaggcaggtggatcacctgaggtcaggagatygagaccagcctggctaacacagtgaaaccctgtctctactaaaaatacaaaaacaaaattagctgggcgtggtggcgggtgcctatcgtcccagctactcgggaggctgaggcaggagaatggtgtgaacccaggaggcagagctwgcagtgagctgagatcgcgccactgcactcsagcctgggcracagagggagacccggtctcaaaaaaaaaaaaaaaaaaaattagccaggtgtggtggggtgcgcctgtaatcccagctactcgggagaggctgaggcaggagaatcgcttgaactcggtaggcggaggttgcgggagccaagattgccccactgcactccagcctgggtgacagagcaagactctgtctcaaaaaataataataaaaaggaatgaaatacatgcaataacatggatgagagatttgacatctcatcgcgtctcgctctcttggccaagatcaagtggagagatttgacatctcatagacattatattgcatgaaagaacccaggtgcaaaaagagtacatattgcatgattccattcatataagcccaaaacaggtatatctaatctatagagatagaaatcagaacagtggttgcctggggatgagatagagtgagtaggattgactgggaaggggtacaagggaacttcagggatgatgaaaatgctctgtatctttttttttttttttttttttgagacggagtcttgctctatttccaaggctggagtgcagtggcgcaatctcagctcattgcagcctccacctcccaagttcaagcgattctcctgtctcagcctcctgagtagctgggactataggcgcccgctaccaggcctggctaattttttgcatttttagtagacacagggtttcaccacattggccacattggtctcaaactcctgacctcaagtgatccgcctgcctcggcctcccaaagtgctgggattacaggcatgagccaccacaccagccaaaaatgctctatatcttgattgaagcagtgattatacgtgtatacaattatcaaaactcatgaaattttatacctactatctttgcgttgtactctatgtaaactataggtaatagacaaagccatgtaatgaaaaaaatccaacttaaaaaatacaagtagtaataaatttatttgtaccattaaaaaggagggtgtgaggattttgttgttgttgttgggggagacagggtcttgctctgtcactcaagctggagtgcagtggcacaaacagctcactgcagcctcaaattcccaggctcaagccattctcccaccttggcctcccaaagtgctgggattacaggtgtgagccactgagccaggcccacttctgttttttttttgttgttgttgttacagagacagggccttgccctgtcacccaggctggagtacaatgatgtgatcatagcttactgtaacttcaaactcctggcctcaagtgatcctcctgccttggcctcccaaaagcactgggattataggtgtgagccaccacacctggttcttaacacacgttaacagggcagctttctctgcagtacccccctgctgccagctaggaattcagtggtgattaagttagatatactcactacccttactggacttcaaatagaagtgaggacatatgtttaaccaagagtcccaaaagcagcatgaggcaaatacacccttgtggttaagagtgtgggccctggagccagactgggccaaattactagacctctctgtgcctgcttctttatctgtaaaataggaatcaacacctttgttgtaaggagtgaatgagagaatctatgtagaccttcagaggttgcctaagataatgctgattcaggaagtacagggcactatgggagattgtgatgaaggaacatgcctggcatggtagctcacacctgtaatcctagcaccttgagaggccaaggtgggggcggatcacctgaggtcaggagttcgagaccagcctggccaacatggtgaaacccccgtctctactaaaaatacataaattagccgggtatggtggcaggcgcctgtaatcccagctactcgggaggctgaggcaggagaatcgtttgaacccaggaggcggaggttgcagtgagtcgagatcatgctgctacactctagcctgggcgacagcgagactcagactcaaaaaaaaaaaaaaaaaaaaacccttcccgaagaagtgattgttaccttgggaacaggaaggattaggaaaaatgagatggaagggaaggactgagtgaagaggaaagagttccgttgagagcccgggactcgcagcccagtgatggaagagcagaggcggaacgaggactttactcacaaagggcgggggatgcttctgctcacaagttgtttgggggcaacttggtggagcaacaagactccccctccaggctcctcttcccacacagggtgtccaggtctccagagctctttgcgggagaaggacttaaggggacaagactggccacagatgatttgcctctgggtggaggaggggagtgtcctctgcagcatcagaggactctatttttagccgcctctctcttccctcatgcccatgttagcaggactcctagaggtgaacacttttcacctcacccttaagtcctggcagtttctttgaatttttgtttctgctttagagtgcagtgggggagaaaataccrtcctcaagatctgagaaactggagaggaaaagtcacaggacaaccaacttctctatgacatagcccagcatctgaggaaagtcctgcaatagtggaggtggagcagagggtatgagctgggaagcaaatggagcaggtgagttaagtaggtgcctgatctggagggcctcacatgccacttaggaaaaatgtaaatgagttgggagtcttcagcaggagtggggtaatcacactcaaaggtggcagagatcttactggctgctgtgagacaaaggaactgcaggaaaacctctgggggcatacgcacctgctaggaagctagtgtagtagaccagatgaccacggcagtgcagaccagggtgaattcaggaagtattagattgaggctacacagggtggctgacacgtgtaatcccggcactttgggaggccaaggcagaaagatcacttgaggccaggagtttgagaccaccctgggcaacatagtgagacccctgtctataaaaaactataaaattaaaaaacaaactccaaagtattaaatttttttttcagacagagtcttgctctgtcgcccaggctggagtgcagtggtgcgatcttggctcactgcaacctccacctcccgggttcaagcaattcttgtgcctcagccccccgagtagctgggattacaggcatgcgccatcatgcccagctaatttttgtatttttcatagagatggggtttcactatgttggccaggctggtcttgagccagacttcaggtgatccacccgccttggccttccaaagtgctgggattataggcatgagccactgcgcccagccaaaattattagattgagccatataaaagtgctgctgcttaggccaaaaattgccaaactgtggcaatttcatttggttttaccaaatagatggtagaattataggcatgaaggatgaaggctggccacagatacttcatagcttcccccaccaggagatgaggtttatttccccaccagtgggatctgggctggccctgtagttagccttcacccaaaaatgtgagaaaagtggcactgggagagttctgaccccaggcctcaacagaccttgcagcttctgctctttcctcttagaaagagcccagagaccagatcacaaggtcaggagttcaagaccaccctgaccaacatgatgaaaccccgtctctactaaaaatacaaaaaataaaataaaatagctgggcatggtggtgggcacctgtaatcccagctactagggaggctgaggcaggagaaacacttgaactggggaggcggaggttgcagtgagccgagatcgcgccactgcactccagcctgggcgacagagcgagactccgtctggaaaaaaaaagagagaaggagcccagagaccatccaccatcctgtgaagacgaaagtcacgtggagaggcctagcagccatagctgagtccagatactagctgggggaagacagctgcttcagccagcctgggagagamcagcagagctttccagacaactcagaattgtgagaaaggctgttgtcttaagccattgttttggggcaatttgcaacacagcagtggataactgatataaaaggacagcagggcagggcaggaagattcatgatgaaccccaggcttctggcttgagtaacaggctattgcagtaccatcttgtgaggggaagttagaggaaaagctgagagcagagcttgggttttttgagtgcttggtagtggcatatgttcaatgttggacatgaggacgggactcatagaagacaccccaagtgcaagtgccatgtgtgctttcgttttcatgacgctggagctcaaggatcaggtcttggtatagatttgggtgtcaccagcagacaaataaagccataggaatgaacagtgttgcctctggcagggaaagagaacccagaatagagccatgaggaacaggcccatttaggaggtgaataaaggagaggtctgccaagaagactgaagtggtagagagaagaccaggaagcaaagtgtgcgtcactttcctccccagaagagtggccagagaaagagactgttgatagagttaaatgctgctgagaaggcaaatataacagggattaaaatgtagcttttaagctgagtgtggttgcatgcatctgtagccacagctactagggaggctgaggcaggaggatcacttgagcttggagttcaaggctgcagtaagctgtgactatgccactgcactccagcctgggcaacaaagtgagaccccccccatctaaaaaaaaagtggttttcagatttcggacctgtaagtcatcagtgtctttcatgaaggctatttcaggggagtgatggagcaaaagtcaagactgcagagggatgaggaatgagactctgcatacaagcaaccttacaagactttctgccattaggagacaggctgaaagatgaggaatagagggttgaattgtaaagagcggtcaagtatgaacatgttaaaatatcaatgagaaagagctgatggggtgggagaggtagcaaatataaggggatagttgacagagcaagttcttaaaagccaggagagggaagttggtggattggcagaaaaatgtacatatttacatatatatatatatatatatatatatatatatattttttttttttttttaaggcagggtctcattttgttacccaagctggagtgcaatggtgcagtcatggcttactgcagcctcaaactcctgggatcaagtgatcctcctgcctcagcctccaaagtagctgggactacaggcatgagccaccatgcctggctaatttttaatttttttttgtaaagatgaggtctccctgtgtcgcccaggctggtgtcagactcctgggctcaagggatcctcctgccttggcctcccgaggttgctgagattaggtgtgagtaatttcactcagctgagaaatttagataacagggatacatgtctcattggaacaggagggagagggaaggaccggtgctcatggaggaagttctggtggcagaaggttgagggagtttctgtatgttagccattttcttagagtaaggagcttatttgctgacacctgagggggatgatagggttggaattatgaggtgagtgaaagtcttgaaatagtcagtgaagtgtgggggagttaagcagaacggtccatgagactagaggtactgcacctttttctgaagttgtcccttccattgatgttaaatataaagtcagagtttttcgaaggtagggaaagttaaaaaaaaatcaaatgaataaaatatttaatttgttcctctggcataatcctacttgctatagaaattaacaaacctggccaggcatggtggctcacacttgtaatcccagcactttgggaggccgaggtgagttgctcgcttgaggccaggagttcgagaccggtctggccaacatggtgaaaccccgtccctactaaaaatacaaaaattagccgtgtatggtggctcacgcctatacacggcaggcggatcacctgaggtcagaagttcaagaccttggccaacatggtgaaaccccatctctactaaaaatacaaaaattacccgggcatggtggcacctgtggtccagtaactcaggaggctgaggcacaagaattgcttgagcctgggaggcagaggttgcagagagctgagatggcgccactgcactacagcctgggcaacagagcaagactccatctcaacaacaagaaaaatataaagtgcttgacaccaaacttgagatatttcaagaaaacttcaaccagtatgaccatgagcacctccaccacgccggttcagaatgactgtagagctcagccatgggcaatcccaatgcacagaatgttaaactttacaacattagtcttgttaaaacaaaaatacccaaataccagcaatcaaaaacatgctgctgtttctcctaccttctttttcaggagatggggtcttgctctgttgcccaggttggagtgcagtggcatggatcatgtctcactgcagcctcaaccccccaggctcaggcgatcctcccacctcagtctcctgggtagctgggactataggcatgcgtcagcatacttggctaatttttttataattttttattttttatagatggggtctcactatgttgcccaggctgttctcaaacccttggcctcgagcagtccatctgccctagcctctcaaagtgctgggattacaggagtgagccactgtgcctggcttaattttcttttttaaactttttaagaaacaagatatcgctgtttgcccagaatgatctggaactcctggcttccagtgatcctcctgcctcagcctcccaagtagctgggattataggcgtgacactctgcacccagctctttccttcttatactcattaatgatttcttggtaatatgaaaacttcataattaaagttcaattaacctgaattattattaattaatcttcatgttaatcctcaattcaggttaatcttcaattaaaagaatatatcaacaattagttcttatgcatacagccaatgaatgacactcaagaaaaataataaaatgcattatttatagataatgaatatatccagaattttccattgggccaaacattccttttcccaagtttctctgttctagagcagtttatcatttcttttttctttttttttttttgagacggagtctcactctgtcgcccaggctggagtgcagtggcgagatctcggctcactgcaacctcttgcctcccaggttcaagcaactctcctgcctcagccttcctagtagctgggattacaggcatgcaccaccacacccagctaatttttgtatttttagtagagatagagtttcaccatgttggccaggctggtctcaaactcctgacctcaggtgattygcccgccttggcatcccaaagtgctgggattacaggcatgagccactgcacccagtgtttttttctcttttttttgagtcagagtctttcttgctctgtcacccaggctggagtgcaacggcacaatcgtaactcactgcagccttgaactcctgggctcaggcaatccgcctgcctcagcctccccagtagctgggactccaggcatgaactactatgcctggctaatttaaaaaaaaattattttgtggagacaaggtctcactttgttacctaggctggtcttgaactcttgggctcaagcagtcctcctgcctcagcctcccaaagtgctgggattacaggcatgagtcaacccacccagctatcatttcatatataggtacttactaaaatcagtaaaagaatccctagggaccaaagctcaccaagctcaatgcagatttatatcactgttggctctaggctacacaaggtcacagacgcagctatggccctgggagctaggcactggcaggaatgaatatggaaggaataaggaagaaatatgagctgtagtaacgctggggtaacattccagaaccatccacaacagtgggacttacctttttaaaagacatataatcttttgggagtctccccaggaaaatatattttgttgttgttgttgttgtttgagacggagtctcgctctgttgcccaggctggagtgcagtggcgcgatctcagctcactgcaagctccgcctcccgggttctggccattctcctgcctgagcctcccaagtagctgggaatacaggcgcctgccaccacgcccggctaattttttgtatttttagtagagacggggtttcactgtgttagccaggctggtcttgatctcctgacctcaggtgatctgcccgcctcagcctcccaaagtgctgggattacaggtgtgagtcattgagccgggcctttttgttttgttttgttttttgagacagttttgctctcgttgcccaggctggagtgcaacagcgcaatctcagctcaccgcaacctccacctcccaggttcggccttccaaagtaactgggattataggcatgcaccaccaagcccagctaattttgtatttttaatagagatasggtttcttcatgtgggtcaggctggtctcgaactcccgatctcaggtgatccgcccacctaggcctaccaaagtgctggtattacaggcatgagccactgcacccagccaggaaaatacatttaaactcaaactactgtatatatacttcgtagactccatgaaacccatccagtgaattcttagaggtccaagacccctgattaataactgttggctgggcgcggtggctcacgcctgtaatcctggcactttgggaggccaaggtgggtggatcacttgaggtcaggagttcaagaccagcctggccaacatggtgaaacccccatctctactaaaaatacaaaaattagctgggtgcggtggcgtgcacctgtagtcctaggaggccgaggcaggagaatcgcttgaacctgggaggcagaggttacagtgagccgaggtcgtgccacggcactccagcctgggcaacagagtgagactccgtttccaaaaaaaaaaaaaaagaactgttgacctatacttctaccagattcccattcctcctgctgtcaaagagtctgcagcaccccgcttcccactttccttctcacacttggggctacaccagtagagaggttgtatgtgcttgagaaggtgggagtctgctctgcctgtggcctactaaagagtctatacttctttaattattgcccttgtttttagtatttcagggttggtccacaggactcagggaaggagaaaaaagtataaaaatttcttttcttattacaagaattccaagatgtgtcagagttgaccagaagcatagagaaaactacatagtcgagtacccaccaggggaatgtggtagaattggcagtctgttggtctctttgtaatgtcagattaaagaaatcacctggaggctgacattggccccttcccttcccaggaggcagatctggcctaaatayggagatgcgtacaaagaagacctaggatcacaatcgttcttagccatcaaactcttcttccaggtcctagagaaagtggccactctataccaaagccaaagaactgcagagtactcctcttggttggggtttcatattgctcttgcaattcagtttcctctcatctttgctgtcatttcgtgggtaccaacagccttggccaggtgtgagaagtgtccattactattgtttgctctgactatcttgcgcaaagatgccaagtaaggctggagcaaaggccttggtgatactcttgccttggacagataaatggtggtagtgtagctagtccctcagttgcacctgtttgtattccaaaggcagtaaacacagatgttcagaagccctttataatcaagatgtcaaatatctgaaattattccccagctctgacaaaacttgccttctgggtgtggagacaaaacaagaatttgtgactactgctgatcacatctagaactgccttgaggctggccatgaagacttgaaaccacaattttcactgaggatctaaacctcagatcacatttgtttggggctactgtggggtaaggggatattaaggatgtaaaagggatgttgcaaatgctcatgagaccaggttttgtggcacgctagggccaccactaattctccatgatgacttctccacaggacttgcttaagcacaggcacaggacccaccaataatcagatgtgcactctacacagactgcacccaccgagaacaggtcacagtcctgtgacacaaacccatatacacaaccgagaggttggcattttggtccatgcttatttaacaaattcccttctgctgtgggcactaggacagggggctggcaatactcagatgagctgtcccacccccaagtccaaagcagcagctctcaggcctcctctgctgcctcatgccattccaaacatgatggctgggcttacacacctatcttactggaagcctccctctctgtgttccctttccaccactattccattacttccacaggagctggaggctgccccatccactccaagccagagaacaagcagaggctgccacaggagatcctgggcaagtaatcagccacagcatctagattagcatgaaggaaacactggccaaattaaaagatgaaacttccaaaaggtaaatctctgtgtattcatgcctaatcttccaaggttgtgtaaataatttttttctaccatcccccatcatttgcatacatttttgtcaagtccaaacataatttgaagtgaggtaggtagtttctctctacttgtgccgttgtccttggggtgatgtcggggcctgtgccctgaacgcacttgtctcctgtgcaggggcagtgccagggctggcatcagtggctggtggagcttctcagttggctattttctcaatctcgtccaaatcatctgtgtccaatctttctatcttcttatctgggggaaagatacacaggtctctaccctgcccaggaatgtgccccatcttgggccacagcaatcattcattcagccccaaaggctccgggtgcctaagcagggggcagcagggcccctagtcactgacagcaacagtcagagccccacgccccgaagcccagtcacaggggagctgttcttggagtccctgggtcctgaagtctccaggtgtgctccctgagaactgccatatggtcagaaaggaggggagtgtgctagggacagagcctctcttggggctacagaagatcctacccctttcaccaccccgccctacttagcaaagggcgccaggcacaggaccctccccgggactcactaaaatgctcctggattctgttcaggatgttcatgctgtgcttgctgtccaccatgttcactgccaggcccctcttgccaaagcggcccgtgcgcccgatccggtgcaggtaggtctcattgtcaggattcccgtccttgtccacgggaagatcaaagttgatgacgacagacacttgttcaacatcaatgcctgcaggaaggagagttggaggctgagaggactaaggacaggaggcaaatcagtcatgtggtccatccatacaatggagcatgactcagcattaagggaacacggcactaagagacgtgcatgacattgagtgcaggaagccagatctgaaaggccgtgcagtatgagattcagatgatgccccaaagcaaagctacaggcatagataccaaactagcacgggtcagggggtggggtgcagggagaggtgatgaatgagtccctgagagttggagacagagagaagtaaggacaggagacaaaaatcactgttgtccacaggtaagtcaatgcataccaacttcgggtaaagggaaagaatttggggggccgagtgcggtggctcataccggtaatcccagcactttgggaggccgaggcaggcagatcatctgaggtcaagagttcaagactagcctggccaacactgcaaaaccctatctgtactgaaaatacaaaaattagctgggcttggtggcaggcgcctgtaatcccagctactcgggaggctgaggcgggagaatcacttaaacctgagaggcggaggttacagtgagctgagattgtgccactgcactccagcctgggccattgagcaagactctgtctcaaaaaaataaataaatacatttgggacaggccaactctgggaattgggtacaagagagggcacatacaggcatacagcagaacctggaggaaaagaacaaaactttggcaggtgccaacaaaattatgaaatcagtcagtaagcctctgggagacacaatgttctggagatgggcatccctggaagagcaggctctgttctctaccagtcagatgcctgtacatttccttccaccaagtcaggactcctggcttctgtgggagttcttatcacctgagggaaatccaaacagtctctcctagaaaggaatagtgtcaccaaccccacccatctccctgagaccatccgacttccctgtgtacaaggatttctggctctaactgggcctgggaccccaagcctggcagaccaggtgggacacgtcctctgctcaccgcgggcacacacgttggtggtcaccaaaaccttctctttgccctctcggaagcgctcaatcactgcagccctctgttccaccatcatctccccactcagcagagccacctggtggccttcttttgagagctctgctgccagccaactagctgttttgcgagtctgtagtgaaaagaattgttttttatgaagagacctgttaaaaacaaaaggaagacaactgctaaaaagtggcttgccacgattaaaatacatgaaggccctgctaaatccagttaggaggttaggcttaaaatttctcaatgaagcatggtagtacacacctgtagtccaagctacacacttgagcccaagtgttcgaggctggcctgcacaacatggcaagaacccatctcaaaaaaaaatttttctttcaaatagaattttagtcatatgatttttttctttttagataagttatgtaactgctgttacttttgtatctaggaagagtgtggctttagccaaagatcttcattcctaaatagtctatgttcttgccagatatggtggctcgtgcctgtagtcttaggctttgggaggctgaggctggaagattgcttgaggccaggagtttgagaccagcctggacaacatagcaagaccccacctctacaaaaataaaaataaaaattaggctgacatgcatggggcacatacctgtagccctagtaacaagagccaaggctgcagtgagctatgaccatgccactgtattctggcctgaatgatagagcaagaccttatctcaaaaacaaacaaacaacatatatattttaaaattttattttaaatttaaattttttgagacaggatctcattctcttgcccactctggagtgcacagtcacagctcactgcagtctcaacctcctgggctcaatcaatcctcccatctgagcctcccaagcagctgggaccacaggcatgcaccaccacgcctggctaatttttaaaatttttgtagagatggggtcttgctatgttgtgcaagctggtcttgaactcctgggctcaagaagatccccccacctcagcctctcaaaaggctgggattacaggcgtgagccactgtgcccagccatatatatatttttaatgatgaggtctcactatgttgcccatgctggtctgaactcctgggctcaagcgatcctccaacctcagcctcttgagtagctgggactacaggtacttgcccagcttatactctttttttgttgttggttttttgtttgtttgtttgtttttgtattgagacagagtttcgctcttgttacccaggctggagtgcaatggagcaatcacagctcactgcaacctccacctcccgggttcaagcgattctcctgcttcagcctcctgagtagctgggattacaggtgcacaccaccacgcacggctaattttttgtatttttagtagagatggggtttcaccatgttggccaggctggtcttggtctcctgacctcaggtgatccacccgccttggcctcccaaagtgcagggattacaggcatgagccaccgtgccagccgcccagcttatattcttaaaaatctaaaaattatttcattggctgttacttggggttttctccaagtaatcactaagaagtggaatcaaagtctccctcttacgactcactaaaaccttaggagaacaaaccacttcgtttcttcccatggcacccaggggcatccagtcctcctgagccctgtggggagctggctgagagggaagggccaggcctgccactgccactgctactcacatggcagaagatcatggcttgagcaatggtgatggccccgtagaggttacacaaggcctggaacttctcgtctctgctgctgcacaggacatagtactgcttgatggtgtccagggtctcttcctcacgcttcagtttgataacgtttgggtctgggaccactttctgggcaaacttccacacagagtcttcaaaggtggcggagaaaagcagcatctggcagttcctgggcagcatcctgcaagggaaggccctggtaggtggccccaggtggccccgggaagcgacagaagcacagccttcccagctgggagggtctagatgcccaggaaggctgatgggagaggagcgtcttggggaggaggagcagcaggcctgggatggggacaggggttgggggagagtccctaggtctcctttctcaacccaggctgggagggactgtggccagcgctgacacggaagtggcccgtcaaacaaatgctgctgagagtacgagagccaagacccaggcagaagccagaggaggcatctgaagtgaagggagaagacactgcagatggggaatctgaggagtcccccaccctcgagatccctacctctggatgcggatgctctgatcttggtggccctgagtggctatcatgacatcagcctcatccagaacaaacaccttgattttcttgggatcaatgaacttgagcttggagcaccagtccagcacagtcccaggggtgccaatgacaatctgctcactgatcttctggcctctttccactgtggagaccccaagatgttttccatgtgtgggtatttctttctttctttttttttttttttttttttgagacagagtctcactctgttgcccaggctggagtgcaatggcatgatctcgactcactgcaacctctgccgcccaggttcaagcgattctcctgcctcagcctcccaagtatctaggattacaggcacctgccactgcacctggctaattttttttttttttgtatttttagtagaggtgggtttcactctcttggccaggctggtcttgaactcctgacctggtgatccacctgcctcggcctcccaaagtgctgggattacaggcatgagccaccgtgcccggcctccatgggtatttcaaaggcaaagccagctcttctctctgagaaattctaaacctattatatattttaatgcaaatgttttgctgtttgcattaatatattaaggaaaggttaggatatcactatagcatttaatggacataaaaacagacaaaaatgctgaaaaggtaatgggtacaaaaatacaattaaaataagtaagatctagcatttgatagcacaatgtggtgactacagtcaacaatatattgtacatttaaaaataactaaaagggccgggcacggtggctcatgcctgtaatcccagcattttggaaggctgaggcaggcggatcacctgaggtcaggagttcgagaccagcctggccaacatggcgaaaccccatctctactaaaaatacaaaaattagctgggtgtggtggtgggctcatgtaatctcagctatttgggaggctggggcaggagaatcgcttgaacccaggaggcggaggttgcagtgagccgagatcgcgccactgcactccagcccggagacagactgagactctgtctcaaaaaaaaaaaaaaaaaaaaaattcagaattctctacccttctaattcgaatacaaattgcaaaattttaaatgattatctcccaataagtttcactgtattatttacttttcagaactggcctcaagttggcattaggacactgtatgcagacttgattttcataaggtcacatttgtttcagagatccataaaactcaaccaaacctctaacacttttttttttttgagacagaatctcattctgtcgcccaggctggagtacagtggtgcaatctcggctcactgcaacctccccctcccgggttcaagcaattctcctgcctcagcctcctgagtagctgggattacaggtgtgcaccaccatgcccagctaatatttttgtatttttagtagagactgggtttcatcatgttggtcaggctggtctcgaactcctaaccttacaatgatccacccaccttaggctcccaaagtgctgagattacaggtatgagccatcatgtccggccaacaacacttttaaaattacttaaataatattaactgtaaaacaaactagtgtag

SEQ ID NO: 97559 - DNA, 74998 bp, Homo sapiens
ggccatcggcaccaggtctggggctgtcaagatgtatcctttgcaggacaggtgttcagggtctgttcaggaccacctgcctgtagttccctgtgctctggggtcccagtcttggcagtgtccagctcgagaggaggacagaggtgctctgatgggcagtagtgggggcttctgcagaggttggcgtggcttctgtacctgagacaactgtgcagagatgatggggtccttttgctgagagacgggtggtggggggtcagtttgcagtagcacagctgtcccttgctacgtgtcagccagccagttacctaggcgaccctgccatcgtcccagcaactctggggaggccaggcagaaggctgggctatgatacccatggagggtggcaggtggtctgggggccctggtgagctgatgcacacatgtgtgaatgtgaagacacatgtgttcagcaaaggggcctgggggtagtgccaggctcggcatggtgagcacagcacggcccccacctggatactggctgctgcacaatgggctgtgtgagccacacaaagcgggcattttccctgcaggcctggggtgggggtgggggcaggccggcagctcagtgtctccttgccagccctggagaatcccaccccaactgctcttggggaagccgaggtgccagggtctggctgatggcggcttggtgaggggtgctgacccctacccctcctgtgtggccttctgggtttcagtatcctggtttcagacatcagttcccagaaaatgtgtcagtgctgggaaaggggagggtgtgggatgggggtctcctcaccccaggactgggggcactgatcaggcagggatgggactctgagcctgtggtttgtgagctctttgcctactctggggagtgtggatgggctgagatgtccccttctctcccatggccccagcggcacctgttggtgagtgtggcagtgctctgggccccacatgctccgctgcctggcctgctgctcccactcctgtgggtgctgcgctgcgtgcgcacatgtgtccctgcagccttcaggtgtccctcctgtgttggggtctccagtgcacttgtcctcaggctcaaaaagaacctgaagtgcagatgaggagactgagcctcagaaaggaggctggagcccggggtcctcttccctttttcccctgactgccactgcctggagccccttgggttgggaaactgaggctggagagggccagccctggtcactagaagctgcccctccccctgccaggccagccccatctccttgacgaccctggttcccgcccagctgctcctgtcccctcttttgtcccttcttcggagtttctcgccaggctcctgtagggaatctgagctcaagctccaggcaacggctcctgtgttgtcaccggggcaacgttgctgactcctccctgcaccctctgtcgtggggccccctcaggccctgctgtccaccatcagccctggagttgccgggactcaggcactgacactgggcacttcaagcaggtcatccaccgcctccaagtctgtgtgctcatctgtgaaatgggcaggctggagtctctcctccctcatgatggcagttgttggctgcctgctttggagggaggtgggttttttttgttttgttttgtttttttgagatggagtcttgctctttgttgcccaggctggagtgcagtcgcacagttttggctcactgcaacctttgcctcccgggttcaagcagttctctgcctcagcctcccaaatagctgggattacaggtgcctgccagcatgcccggctaatttttgcgtttttagtagagacgaggtttcaccatcttggccaggctggtcctcaactcctgaccttgtgatctacctgcctcggcctcccaaagtgctgggattacaggagcgagccaccgtgcccagaggaggtgggttttcttacccatggctgaagtttggcctgaagctgtgggaaaaggcagcctggactcttctgccccctggctttcttgtccaggcctggccttgcacctctggcctgcctgatcccatccagcaaggcgcagctcccagaacccatagacacacggagctgaagtggagcggagccccatcctctcaccaggctgaggccaagcctgctgggtgtgtttattctcacttgatctgcaacagtcctgtaaagtgggagtcactggcccaatttacgggaagtgaaggtcctatagcagcacctgacttgcaggagtgagtggagcctgcacactgatcttggggatactgtaggggtgcagagtgggagctttagggagggggcctccgttcttcagggaggactcctggatggtcaggcccatgccggggcccactggaatagtccgggtcaaggaggagccttgggtgtctccctcactgtggtttgctggtctatgcctatttccaccttgacctgccaccctcagctatggtgcacctggcgtggagttcacaggcctgcaccgggatgcagccactgtcacacagatgcacttcttgaccggccaggtgagcctctgcttcccactagccagctccctgtggcccccatatctactcatccccctaggccagcctagttttcatctctgctcacacaccagggccgcctcctgtccctgcttgatgacagcagtctgcatctctgggagattgtccaccataatggctgtgcccacctggaagaagcactcagtttccagctgcccagccggcccggctttgatggtgccaggtactggagaacttggctggggccagccaccgggcagggaggatctgggggaggctgtgggaacctgctgtgcaaaggcagcatggagatgggcagcggttcagggcgggatgccttgagctgggcctgggtcccaggctgcagctgttggaccctgctttactgaggtatactctgaacttttcaggttaaatgggaggtttgggttgagtccgacgtgagcaggtaattaacattgtgagcagcaggaggtacatgcattatatgccaaacttctaggacctgaggcctggcactacacttactgcaatgatgggggtgtctaggggtttggggcagggcctaagccagttagtaacaggaagggtcccctggcctcttcagttgtgggtgggagacaggcctttctgtgcataggcagggttgagggcaaggagggtcccatgggctgtgcttggtaaggcgctggcagcatgccccagctgagtgagagtgtggggcatctctctccccagccctgcctgaaatagctggaaaaggggagtaccaacccagggatggattcctgatgcctcccagcttctgcagatgggggtatctggggccctcctgcgaagtcaggagatgtctgagtgctggcagcgggattcctaggaggggctcagcggggagctcctggtcctggcttgggcagtgccctggttcctgctgtcctctcctggtgggtgggaggagctgggagcccagtctgcaagacctagggaccctatttttatccatctccctgctgacatcctgatgaataattgagcgggctgatgatgatgcatgtcttcctggggtggctctgtaagtaggccctggtgagtgccgtggggccagtgatgagttatcagcagtggcccagcccctcacaccccacctgagcaggtggatgggcttgtaccctcactcccttccccttgttccctgcagtgctccgctcagccttacccgagtcacagtggtcctgctggtggctgccggcgacatagcagccctgggcactgagggcagcagtgtcttcttcctggatgttaccaccctgaccctgctcgaggggcagacgcttgccccaggcgaggttctgcgcaggtaagaggccggtgggcttcccagcacccactgtgtgcccgggaagttctgctggctcacctgccttcctccacagcgtgccagacgactaccgctgtgggaaggcactgggccccgtggagtcactccagggacacctgcgggaccccacaaagattctcattggctacagccggggcctgctggtcatctggaaccaggcctcgcagtgtgtggaccacatcttcctggggaaccaggtatgtaggtgaggcctgtgtcccctcagcctgggccccttgtgcatgcccaccatggctcatgcctgcctgcctgcctgcccctgcctgcccgcagcagctggagagcctatgctgggggcgtgatagcagcactgtggtcagctcacacagcgatggcagctatgctgtctggtctgtggatgccggcagcttcccaacgctgcagcccacggtagccaccacaccttacggtgagtgctggggacaccttagccagagggtggtgatgggagggggcaccactgagccaagccaaactggctgaggagggacttccccgagggggtggtctgggggcagtgtgtctcccgccgacttcccggggaggcaggaggcagctgtaaggtagagagcagtggagggcagagcaggaatggcagaattgctaagaaccaccagtgagtctggtctgacgctgtcccacccctcaggcccctttccctgcaaggccattaacaagattctgtggcggaactgtgaatctgggtaggtcgagggagtgggtgtccgatgtgagttgggtctggctagggggctggaagggtgggctctccctaggttgtgcagtatgtgctctggacccaagtggttcatggctcgcacacctccctctgcacataggggccactttatcatcttcagcggtggcatgccccgtgccagctatggtgaccgccactgtgtaagtgtgcttcgagccgagacattggtgacgctggacttcacttcccgcatcatcgacttcttcacagtgcacagcacacggcccgaggatggtgcgtgccctgccgtaccctaccctttcccagccccacctggtgccctctgccacctatggctgtgctcaccccatactccctccgtcccacagaatttgatgacccccaggccctggctgtgctgctggaagaggagctggtggtgctggacctgcagactcctggctggccagctgtgcctgccccatacctggccccgctgcactcctctgcaatcacttgctcggcccacgtggccagtgtccccgccaagctgtgggcccgcattgtgagcgctggcgagcagcagagcccccagcctgtctccagtgccttggtgtgtgcggcgatcaggggggtcttacagggtggagtcttgaggagggggagagtttcagttctaagcccggaggtcagaatgtgccatactcggggtgagagggagaagatgttcgtcctaaccttgtgcatacatctctgccaccccctcccagagctggcccatcactgggggccgaaacctggcccaggagccgtcacagcgagggctgctgctgacggggtaggtgtgcgtgcttatgtgggtgagtgggccccttgctgttgggggagagcccatcctgggcctggtgggtgcagaggtgccaggagactcaggcctggcccctggtgggaccaggtagttcctccttgcccaaggtggtttggaatgaaacctccctggaccttggttcaaggtgctgccctgatctgccttttggcctggaactgagctctaccaaaccccagggctccacccgcccagcctgcctgccctgggactggaaaatctgggctggcccacgctgagctgcccagggaaggtgccagagagcccagcgtgggcctggcgggcgctgacgtgcccagtgactcaggtctcaacttcctgccctgcccccactcccgcctgtgctgggaccctcaggcctctgactctggtgtgcccttccctgctgaagagcttgccgtggctttcagggctgctggaatgagtctcaaccacccccacagtcacacacctctcacgccctggctctgggctttcaccaccgcctggggccctgcttgractctgcagctgtgtcccaaggctgcgccctagatttgtctactccttcccctgccccctccctgctttctcccggcctctgtagtcttcctgctcctccacctacgtggctgccttgggccccatgcagctcctcccccgggatgccccatgctctgttctgtgactgccttactcttgatcacctctgatggctgctccagtgcaggcagaacccccaaagtcctctgttctctacatgtccccctttgccacctcctgttaatcagggtggtcatttccaccttgtttggtttaaaggctccaggtgcatatggtgcatgtggcctggcctataacaggtgcacagtgtacctgtgctgtctacagtaggtgcctattgttttttgtaamagtaggattccggtcagtgtttggcacgtgcagtaggtgcttagtgagtggttatcagatgagtgaatggaggggcgtgcaggcctcccaggaactcgggtakccctgacatctgccctccctgcagccatgaggacggcaccgtgaggttctgggatgcctcgggtgtggcgctgcggccgctctataagctgagcacagctggcctcttccagacagactgtgagcackctgacagcctggcccaggctgccgaggacgactggccacccttccgcaaggtgggcccctcccctggccctgatgagctggtcctgaccccgcctggactcattactccttcccatccctctaggtgggctgcttcgatccctacagtgacgatccccggcttggcgtgcagaaggttgctctctgcaagtatacagcccagatggtggtggctggcactgcaggccaggtagggctgggtgtcccctgggttggagatgtcagggagggctttctggaagagatgagctggagggtctggtggaaagggagatggactggcacaggcaaaagccaaggtgggaatagggctctgggtggggctggctggggtgaggacagatgggaagtgggcctgtcgctgggggaaccacagtgttgagrggagggaactcaygtcagtgctgtgctccggcactcacatgacatacaggaggtgctcaatgtgtccttattgctaaatgggagatagaggctcagggtaagggtggacactttgccctcagaggrcagggactagtgtgtcttggtcaccactgtgttccttgtgctcagccagggccttggtatacagtaggcattcagtgagtgcttgtttagctgatgaactgaagacagtcctagaaccaccttggtggtggctggggctgcttcagaggctccaggctgagtggggcccagggcggcccctcccctgcgctgatgctccccctgcctggctgtgggctcaggtgctggtactggagcttagtgatgtgccggtggagcasgcggtcagcgtggcyatcatagacctcctccaggaccgcgagggcttcacatggaagggccacgagcggctgagcccacgcacggggcygctgccctggcctgctggcttccagcccygtgtcctggtgcagtgcctgccgccagctgctgtaaccgctgtcacactccacaccgagtggagcctcgtggcttttggcaccagtcatggytttggcctcttcgactaccagcgcaagagccctgtgctggccaggtgtgtggggtggggccggctgggcagttggagcccccagcgagatggggtctgggcttccgtttccacctctagtgtttggtgtggcaaaggccactaacctccattgccctataagaaataacctggcagctccaagaaggacattctcagtaccacctgcagctgggtccataggactgcgccagaggggctgtgactccctgacctgggtgcctccacaggccagcaggagtgtggtggctgccccaggaggctgctctatagcacgactggaccctgtcttcccccaggtgcactcttcaccccaatgactccctggccatggagggtccgctctcccgggtgaagtctctcaagaagtcactgcgccagtctttccggcgcattcgcaagagtcgtgtctctggcaagaagcgggctgctaatgccagcagcaaggtgagctggggtgggctgcacaggagctgtgcctgtgtcctgtgccttggcctggctctggcctgggacccctggggcctgcttagctcagtgctcctccctcggcagcccytgggccctccagagggatgggtgaactaagctgggtggtagaggaatggtaacagaacgtagggygcaaagcaggatgcaagccactggggtgctagggagacagtgttcaggagcccccgcccggcagttgcaggaagccaatgcacagctggctgagcaggcctgcccccacgacgtggagatgacrcccgtgcagcgccgcattgagccccgctctgccgatgactccttgtcgggtgtcgtgcgttgcctatactttgccgacacattccttcgagatggtaaggcaggggcaggggcaggracagggcaagggttgggggggctggcctcaattggccacctgggagatgggtggtggcaagggaggtggtgggactgcaccttccaggaggtggctgggcacggtggctcaagcctgtgagtgatcccagcactttgggaggccgaggtgggcggatcacctgaggtcaggagtttgagacccgccaggccaacatggtgaaacctcgtctctactaaaaatacaaaaattagccaggtgtggtggcgggcgcctgtaatcccagctacttgggaggctgaggcaggagaattgcttgaacgtgggaggcggaggttgcagtgagccgagatcgtaccactgcactccagcctgtgcaacagagtgagaccttctcagaaaaaaagcttaccatccagctctcccagggggactgctgggtcacccccagtctctctgggggagctggatggtaaaggatttttgagtgagctgggtgggcctctcagatctgagccaggagaagggaggttgaggcctggtggatgacggtgaggggcaccagccagtgcccaggccccgagccgggcatgtgtgtgggcagctgcccagccacttggctggagtggagcaggtgagggtcgaggtgtgtggttcagggagatactgctgctggccagaggctgaggacctggctttgattctcagtggcctgggagccctgggaaggtcctggatttgttgattgagtcactgattgattttgaacttgtacaatgggagagtttcaaacatacacaaaaatagagaggtgsaaagttgtcccacatacctcacatgcctgccaccagccatgtgcccctgcggattctgcccccctcctccacattctttgctgttttttttgccggggtattttaaatgaaaacccagatacaagtacttcagcatgttcctgacagatgtcactgacagccactgctcacatcatgccctgtagaaccaatgtgaattcctgagtgtcatctgcttggtctacgagctcagctttctgatgccatttatttgtcgagggtctttgtgcagtggattttctcactgtctggatgtggcgggtgcagctgggggtggggggttctttgactttttgttttttttgactacaaagacctagaagaggagagcctggggtttttaacttgttccactggcccgagaaggccgatgggttcatgttcatggccggctggggttcctgttgggcatgttttgagttgtgcagacacttaatgcctcaggatccatcgggtcatcagggagcaggtgccgagtctgctcttgcttctgctgggctgggctctgattctccactaaagcttgtcacccagaggttcagttcacacaggcagagcagggtcgatggatggtcgtcctaggtgtycccaggcttggcggcttcctctggctgccacgtagggagcacactgaagacagtgggggtgaagcagggctaaracaaggcacacctgtcgacaggactagcaaggggacgcaggggtggagagaggagtcggggtcttgtggggcttggggcctgagtgatgctaggatggagctgcgtttactgagatgggggctgagggtgcagtgggatggggctggaggtctggtttgggtgcccatcagcattctgtgcagatgcgctacagctgttcgggcctctgcaggagggctgcatcctgggctccgactgcagtcagcagcatagagctggggtctcaggcctcgaggctggaggtcaccagggaggcatggggcaggagggaatcagccctgagtcccagggtgtcatagttaggaagcagggctacaagagaggcagggagggacctgcagtctgtgggaagaccccaggggagatgcctggcccacagggagcaccctcctacgcgcttgttttctgcaggggcccaccacgggcccaccatgtgggctggcaccaactcaggctctgtgttcgcctatgcactggaggtgccggcagcagcagtgggtggtgagaagcggcctgagcaagcggtggaggcygtgctgggcaaggaggtgcagctgatgcaccgggcgcctgtggtggccattgccgtgttggacgggcgtggccgcccactgcccgagccctacgaggcctcacgggacctggcgcaggcacctsacatgcagggtggtcacgctgtgctcatcgcatcygaggagcagttcaaggtgagccactgtgggctgtgggggactctgggggactcccctccaggccccaacctcatggacaccattggaccctcaagaaacccttcctgcctgtatcccccactgttgggaccctaattcccttgcaccccagaaaacactcccagccagcagagaactcctacccaagaaccctgatgccccctcagcctgctgagttcccctgggagggcaggaatctagtcctatctcactgtgccacacaaggctcctgtactgggcccagacccctgagcccagtccccaggggctctgcctcgaaagaactcgaggtttgatggggataccagctgcataaccttggcataactctgtgattgattttgtcacagatcgagagagggcctgggaggtttctggagtacagtgtgaagtctggagtttagtggggcagccaggtgtacaggcacgggaggccacgtagcatgcagctgggctttgtggtgggggctgytgggtcagcagccacgagggtgaggggccctggggaygaggacagggccaggctttgtgctcaccagccacctgctgtcaggtgttcacactgcccaaggtgagcgcgaagaccaagttcaagctgacggcccatgagggctgtcgtgtgcgcaaggtggcactggccacgtttgccagtgtggcctgcgaggactatgctgagacctgcctggcctgcctcaccaacctgggtgacgtccacgtcttctcggtgcctggcctgcggcccsaggtgcactattcctgcatccrgaaggaggacatcagcggcatcgcttcgtgcgtctttacgcgccatggccagggtgaggcggggcagaggccgaggaggccttcctcaggcgagcgaactgagtgggaccagtactgcttgggagcaggaagggcactccaggtgggcacaggcccaggccacggaggagctgtggttggtggtatcttctaactgcactcctcattcttctgcccacccaggcttttacctgatatccccatcagaatttgaacgcttctccctaagtgcccggaacatcacagagccgctctgctctctggacattaactggccccgcgatgccacccaggccaggtgtgtggaggggcagctcctagcctgggggacctgtgcccagggccaggtctcatcccacccccragatctgccttccctgggctcaggagtgggagggcaaggatctagcgtgccagcctcaagtcatccacctrtggtccccatcatggccccatctctgcagttacaggatccgagagtcacccaagctgagccaggctaacgggaccccaagcatcctgctggccccacagagccttgatggaagccctgatccagcccacagcatgggacctggtgaggggggcatgaaaggggtccagaccctggccccacggtgccctgggggagggagtcgggactcacatagctcagggatcgggcaggcttctgtaggagatgggtggttgtgtgctcactggtgccacccctcaccatgggctgccttatgggtctgtgtccctaggcccccaggtgcagagggtgctaagggtcctggtaggggctgatgacttgctccctgtagacaccccggagccacccgaggctgcactctcacccatgtccatygactcagccaccagtgctgacaccacgctggacacgacaggggacgtcacagtggaagatgtgaaggatttcctggggtgaggctggtgggcaggtccacagggggggctgccctgtcccctaggcctccgtccccagggctgccaggggctcccccgcccccacccctgagcaccatccccatctcgcagctcctctgaggagtcagagaagaacctgaggaacctggcagaagacgaggcccacgcctgtgccatcctgatcaaatgaggtgctgcaggggtggggccctggtcctcaccactggtgacgtccacccccttcagcccgtctgggtaccatttggccctggtcttctacctgagaccctggcaggcccatgtgatggcactctctgaaacctggctgccttccatggagtgcctcaattggggacttctggtgctcacacagacaccagtgtcatggttgggtattagaaaagcagggccagcccctcagcccttgcatgtgacaggtggtggttaggacaagaccagatttgttttgttttgttttgttttgttttgtttttgagacggagtcttgctctgtcgcccaggctggagtgcagtggcgtgatcttggctcactgcaacctctgcctcctgggttcatgccattctcctgcctcagcctcctgagcagctgggactacaggcgcccgccaccacacccagctaattttttgtgtttttagtagagacggggtttcactgtgttagccaggatggtctcgatctcctgacctcatgatccacccgcctcggcctccctaagtcctgggattacaggcgtgagccaccgcacccggccmacaagaccagattaamccacttagaggtggcagtagtttggggcttgggagctggtttggccagcctgtttcatagatgagatcactgaggtgcacgaggtcaggtctcatcggttgggcccagcaagtggctgacttacccctgcctgagtctgtggatcctcacctagatgtggggcccatagatctgcccagcgcatttgctgcctcatgttcccaggcacctgactgtaggccatagcctcaccctgcacaggacatggacacctcccagctctttgtctggtgcctctccctggcctcagtggggcatatgtggcctggcgcttggatacccatctggagactcagcaagcccatctcaggtggtcactgaagggccatgcctgccctgcagaggagacagtggcagcacctgtgtggtctggccgctgtggcaatccatctgcccttttgccctccctcaccttctgctgatacctcttctctccctcttccaggaaggccagaactatcccgacctccacctgccctgctcggagctggagtgctggatccctggcacctgcctggccccttaacatagaaccacgcctgctaacctgtaggctccactgggacctgctgtcctgtcccgcctgaccctgggccctggagcagcaccagccccagggtgtgggcctgggacctgggccagaactgagccctcctgcaggcatttggctgccctgggggcccactgcctagggaagaggacaggtggggcccagcacctgtgccacctccccccctccacacaccatccttccccctcactttgcagagtatttttccttttttttttttttcttaaagacggagtcttgctctgtcgcccaggctggagtgcagtggccccatctctgctcactgcaagccccgccttctgggttcccgccattcttctgcctcagcctcccaagtagctgggactacaggcgcccaccaccacgcccagctaattttttctgtatttttagtagagatggggtttcaccatgttagccaggatggtctcgatctcctgacctcgtgatccacccacctcagcctcccaaagtgctgggattacaggcgtgagccaccatgcccagccctgcaaagagtatttttctagcgcctgggctggacagttgtttctaaaactaaactattttggtacctgcttctgggccagtccccagcctgtcatgagtgtgtgtgtgcgggcatggatgtgactgggagctctgctgggcacccacatctggggcctagtcaggtgtgtgtgtccggcggggggggggggcggggggggggggtcaagatgagtttccctgtagattgtaccttggggtttttttctgtcgttttgttaaaattagcgccattttaatattaaaaatactgatttttaatattgaaaataaaagcatttaatatctcttaaagggcatccacatctgctttatccctagcggaagagtgagggggcttcacacgtgcactcacactgtggagagagttggatttccmagacccctgagggcacctgtcagggtcatccccattggtgctgcttgaggctactggggactgtggcactggacgtggctggagcaggtggtgtcacctgagtacattctttgctagcagacagtggatgaggccccttcctcttcctcaccaagcctggggctgtgccagcctgtcttaggccagggccttgcaraaggcgctccaggcrtggaagcagcgggtaaaggcgtgctgctcattgcccttgcggaccaggygcagccggcgcggccgctcatgttccttggaccgcatgtgctggatatatacctggcaaggggacagcgagccttgggtgatgaccctgccctgcccacaggcccacctcggccctccctccacccagattacctggcaggccttcaggctcagcttgatctccacctggctagtctgggtccccacccacatgtagacctgtgggggcagcaggggagatacggttgcatgggtgcctgggaacagccccttgctcctggcccgagaattcccatttgtaagtaagtctatgggcgcctccttggatgggcagggctagtggcaacatcacacctcttggccattgtctagcaacatgatgtcatcatctgccaggtcatcttggcaaaagtcggagcatttctcagtcactgcaaagtagcccttctcgttggagcacctgggaatcaagggtcaaggtgaggccagaggtcataagcagcagtgccaggactgaggggagggtcagggccctggcctcaccggaagagacgtgtgtgtttcatgtactcggcatcgtcatcatagggcttctgtgccccaatgcccacccagaagaagttctcaggctcctcaccttcgttgataacctgcgggaaaggccagtccagcccagggcccctgcctgccctggctcctctgtgtgtgcccgcctgcccgcccgcctcctgacctgcttgctgtaggaggtgtcaaacatggtgttcaggatgtcttctgccaacttggcttcgtcagggtctgatgcccggcccacccaggcatacacgatgccctggttgtcctcactctcaaagggaacctggggagtgtgcaggggtgggggtgttcgcagctgactcagcccccaaacaccccaccccttggtccacggagtcctggctcacacccacaaccccaccttgaggatgaagcagaactcggagttgaggaggctggagtcggtgttgatctggatgcacctgtggaagggatggggcatcagcaaggattcaggcctggctccctgacgcttgmtcgccactgcgtcctcccccagccaggcaccgggtgcagagggcgctgccgttggtgcggatctggtagaggctgggctgttgggcgccctggaccgccttcctcttgccccggtggatgatgaacttcctcttgaaatgggacaggaacttggggttctcctgctgctgcgtcatgcgtaccacctggggatgtggaagtgttaggggcagctccctggacccccacctgcccctcgggagcctaaccttcgctgggtctgrgccccaccacacccctccgcctggcctcgggctcgcggggctgccaggcacacctccagcttcccagggaagaggctctcgaacttcttttgcaggctgaaggtgaaggtgagccagcccatattggaggcttcacggccctgccagaagtacacgatgcactggaagtcctcctctggctgcttctcctctgcctcagcggttgcttcctcgccttctttgccctcggccttctcctccttgtcttccttcttttcctcctcctcgtactccacaggcacccagtacctgccgggttggaaggttgtgagcaggggctcgagcccccagcaccaggggagggacttggggaagggagtgctgaggtggyacctgcagaggaagacgtagcagtcctgcgtgtagaagtggccaaactcctcttccggcagccgcgcaaacttcttgccctccagcacgaaaccctccatgccgtctaggtcttcgttccactcctccatcagctgctccgcctgcaggtgagagggacccgccccgcggcaggtctgagcgcgctctgcgcataggccccgccctcggcctgccccccacccccccccccgcgccccggtcccggccctgcccccacctcggccagcgacatgggcggctgccgcggcaggaaaagcgcagtgaggtcagccttcatctggtctttcttctcggcgtcgcgtttcaccttcccggagagacccgggctctgcagcacggcctccgcattgcgtgtgtagtccaccgtcaacacatcgtcccmattcttgaacttggccttgaacacctgccagggaggccatcaactaaccatgaggggtgcggcatgattagagttsgaggaagtagcccgaggcttgaggcgggacccaagggagatctagggcggggcttgggaggcggggcctcggacacggaggtaggaatagraggggcagcttgcagagggggcggggcctgggcagagtcagcaaaraggaggtgggtttgggcccagctctgtagggaggtagtraagccacaggggtcagggcatgtcagggtgcgaaggatcctggggaggggcctccgaagctgcaagcgcacctgcgcctcggtgccctcgaggctgcggctgaccgtggcatggcgtggccggtgcagcatcccgcacagctcctgacccagcttgagggcggcagcgcgcaccaggcgcggggacttgcggccgagccagatgaacacgtcggaccaacagtccagaatgtacacgcagcgcgtgtccagcagactctgcagctgcggaccgggagtctggaggtcaaagcccagccaacggggagggatctggccccacgccctcctcctgcatctcttaccagccgcattcttggcatcagctccaccttgggacgctgcttatgttccacggagagcttgtagttgatctgtggcagctccaggtagcccaagcccaggcccacctggcaggaaggatgagcatggcagggaagggatctggagacaggaacctcacccacacagccctctgctctggaascagccctgccctgcagcgtggctcactgactgcttctgtttccccctccccttcaaggtctttttagggatatcctttcagaagggcttttaaatggagttttccctgcctgccctctccaggcccttcatgccatttctaattaacgtgtccctttcctgttcacaagaatctagataattgagcmaaggttcccagccctggcactaggtgcttctgtctcccctacggccccaccatcctggaaagactccgtgaggctacttctcaaaagcagcctccagacctttgytcatactgttccttgtccagaaggtggcaccctctccccaccaaagtcgagatggagcccaaagccaactacatcggtgtgtagtccattcccccagtcggtgggtgaacttgggaggccaaggtgggcctcagcagcagggctcaccttgtacagcttgggctgcggcggccagaagtcttcaggcamrtgcttcttgatctcagagggctccccacccagtgcctcccagaactctgggagctcctggccctgcaccagcagtgtgatctcagccttccctttccgctcattcttgttaattttctctgcaaagagcctgagagcaggatgcaaagtcatcagcgaggctcacacccctttccttcacacaaaagacsccacggtgtccttgtacctggccttggtggtgctgctcagtgtggcctgggccccccgccatacgtagatgtctagccctcggtccagcaggaaaacaaacctggacaagaaggggcaggaaggagctgtgatggtgcatggggcaatggtcaccccatgctcctgaccccaccaaaaaaaatccctcactatggggtttctgggtaagccccagggaccccccgccaagctcgtgggcaggaattgctagagggcctcctcttctaagaggcccacacctgcccccactggtggggaggaggctgaggatgaagcacccccacctcacattgttggggctcaccttgggtccagagaggtccccttgaggggcacaggctccaacttgatgttctttttcccatacacacgatacatcctgggcgcagggcaagagtggctcagtgtaggcaccaagggcctaacttagccccaacaccctcccctccaccccttgccagcagactccaggtccataccccccactgcccacacaccctcacctggtgacatagtgtgtgtcttccacagtgtagaagccactggctgttccaccctcaatgtaggagatgtcgttgtcaaacacctgtgtgtgtgagggtgtggttcttcatcactgagctgcccccwcccccaccaaccactgcccctcaggtgggggtacagagttgcatacaggtgaattgagtgctacaaatctatgatgcctgtaatcccagcacttcaggagtctgaggtgggtggatcacctgaggtcaggagttggagaccagcctgaccaacatggagaaaccctgtctctactaaaaatacataaattagccaggcgtggtggtgcatgcctgtaatcccagctactcgggaggctgaggcaggagaattgtttgaacctgggaggcggaggttgcagtgagctgagattgtgccattgtactccagcctgggcaacaacagcaaaactctgtcttaaaacaaacaaacaaacaaacaaacaacaacaaaaaaaacagatctggctgggcacggtggctcatgcctgtaatcttagtactttgggaggccaaggcgggtggatcacctaaggtcaggagttcgagaccagcctggccaacatggcaaaaccccatcactactaaaaaaatacaaaaattagctaggcgtggtrgcacatgcctgtaatcccagctacttgggaggctgaggcaggagaatcgcttgaaccctgggggcggaggttgcagtgagccaagattgtgccactgcactccagcctgggcaacaaagcgagagtctgtctaaaataaaacatacacatctgtgtctataaacatacacacgtcggggtgttgggatgtatgaaaaatatggacacgttcacccacgtttgtaaagatgccagcagcatgtttagatgcacgcatatcagggtacacaagcaagtgggttcatggaagagtggaaacctgggtgaatgtgggtaaaaaaaactcggggcgggtggggtgtgtgcataaactccacgtgtgtgtacatgcgaacatatgtctaggtgtaaccagctggcggctaacactgctcagtaatttattcaagactggactctggtcccgcccttggccccacctccttggcatccaggtgtgtccttgcctcctaataacaggttttggccctgccttctcactgctcttggcaacaccccttccaccctactctcagctcccctgtgtcagcccactggtctagctcccatgcycagcctgtacccttatccttgcccggctgaattctgccccgcgttccagaactctcctttgctgacccaggctttggccaccttagacctcaccctgcggtctgccttaggtcccgcacagtatcgttgatccaccccctttaaccccagctccctgcctgcccacctgttctgcctacctgccttgggcccactgcccctgcaccagagttccctgggaaccccactctgcccacccccaattttaacgggctggcacctgcaggaactcctcgctctcatcgcccatctcctcccggacagtgcggcactcagcacccaggtagttgcgcaagttgacagcrtggatggcagagcaagctttcttgtcgagtgtggcctccccgccaatccagtagtagatctcccagttgagggagccgctgtcatccagaaaggtctggaagccaaggcaccrgccacatcagctttcatcctggtcttccggccaccccggagacrccactctgaacagcacaggcttcccagccccaggggctttgtactgcccctgtgcctggaccacctcctgcagcctgcccacctcccacctggcctccctgaacaaaactctggagytggggactgagccatcttagaggaaggtactgggccacatggcccctaacagcatgcccagccctcaccttgagcacaatgtagcagtcagcctcgtagaacttgccgtggaaggcttcctccaccagcacaggcacgaagttctctatctgccagatggtcagtccgggcagctggcccacgtcctccgtgaagaactcggagtagtcaaggcggggcttctccaggccctggtcccaacgccgcaccttcccgctgggggcccgggcatctgcgctctcctgggggcagagtcacagagcacggcttgactctgtgaagccactcaggccagtctttacttgctacccacacctcagggcctttgcacagctgttctttctgcccagcacyccccgtccctcttggccagggtcaaggccagggtcggccttcagcagaagctaaggctccctgccttgtcccaaccctggcctggctcacctcctgctttttgttcttctcctgggcaacatctgacatgcccttcagcacctgcttggcctggtcatcctgggctgaatccttgcgcctccgcagtcgcatcttgcgagccatagggtccttgggcccactccctgcttaggggaggggcaaacagctgagccctcactgggcctgctgcccccttgggcatgcgaccaaccaggggccaactccacccaccagggtccagaaagctgtatgccacccaatttacagatgtgtcatttgaggcctggagaggagcccccgttcccaggccagacctttccccactcaccagctgcagctgcagccacggtagcaggagaggcacccgctagccgcagctggttctgcagcgagaagtcgatgttgtaccactcagcggcacggtctgcgggcttgggcggcatgaccaggttggggttctcccgcacatccaggacctgccccatagggtgagcagagccggcactgagcctgggtcctacctcccagacacaccaatccagtttcttgctcttgtctgcagccgccagggctgagaggtcagggaactgggttctcctcccacccacctctggggctggctgggggcttaaatgagactgtggaatgtactctggatgcagggaggtggggcccaccttctccccacgggcaccctggcactggccacctccctcaggaggcctctgctgggtcccccttgctccagggcacaccccttgcttgtctctcttgagccctctcaaacccagcatgcctgacctcgatcwccgtcaggaaatggatggcttctgggagggtcaccaggtggttcttgttcaggacaagtttcctcagctttgggcacctgtgaagacagggccagccagggcctcaggcaggtgacagacaaggggaagtgggcaagaaaacccctagtcctggggaggggaggcaggtagggtcagaggaactggcgggggtctccattctctgcctgaaggacttctcagagccaagagaccatgttacgggcactgtgatctccagaaggggagagaagcaacactgcgttcccaygtcatgtggccttgtccctaacagtgccccccgaagggtgctctcaggggctcaagttgggaatggctggcatgggactgtggtcttcatccacaaaggtgagttaactgggccgggcgtggtggctcacacctgtaatcccagcactttgggaggctgatcatttgaggacaggcattcaagaccagcctggccaacatggtgagaccccatctctactaaaaatacaaaaagagccgggcgtggtagcgcacgcctataatcccagctactcaggaggctgaggcaggagrttcgcttgaacctgggagacagaggctgcagtcagccgagattgcaccactacattccagcccaggcgacagagcgagactctgtctcaaaaacaaaaaagaaaagaaaagaaaagaaaaggtgaattaacccatcttcattttgtctgacttgcacagaccacarggtgggctctgactacgatcccrgggttctctgtgctgcaagtgcctctgctagccccagccctgcccagcacctgcagagactttcagggaccagctccaggttgttgttggcagccatgaactcttccaggttggtgagcttgccaatgcctgagggcagcccgtcaaagtccagcttgttggaattcaggtacagcttcttcagcttgctcagcttgcaaatggctgactggagggggaacgggcaggggtgggaggtcagggccaggctcacggccttcctcccatccccctactgagggcctcagacgcacgggcagtgaggtgagctgatttcgggacaggttcagagtttccacgtgcacccactggtctatgcacagggacagctccgtgatctggttgctgctgaggttgaggcggcgcaggctggggagggtgtacagacactcgggcacccgtgtcaggtcattgcaggacagatccacgtctggggtgcagggtggggtgcatcagctggggcccatacaccaggtgccagggcagccagccctagtgtgaaccccagctctgccacctctgagctgtgtggcttaggcaagtgacaactgctgtgygcccaagtttctccatttggacaaactccctcacatgggggttgcgggggagttttctaggcataaagtcagtgttaaggcatcatcataatcgcaaaagtcactgtaacataactccagccttttccctctgggtattggtccgaagagcagggttcaaccccttccacccaaggaagcaagagggcccagagggggcccgagctcagaggggctcctggggctgcctgacctgcgaggttgctcagaccctccaggctggtgggcaggttgctctgggtgcgctgggtgctccgcaggtgcagggtctgcagggccgtcatcrctgggagctgcctgccagggtgacgtgagtggtcagggccagggcccacctagggagtgttaagggtggggcttggcagggcaggaccaaaagcacagggcccagagggtaggtgtgaggtcacatctggttgaagggayaagcccaagggtggttgcggggtgtgtaagcgggaagacaggactgagaggtggacatgatacttaggaggttgtacactgaggggtgctgcctgcacggagggatggctgggcctaagggagaagggttagggccctgggaagtgaaggggcccggccagactcctcagggtggcttctgcaggagtgcggtccgagggggcgcccaccggagctgtgcatgcagcagggggtttccattgagcacgagcgtctgcaggtgcaccaggcggcgcatctgcgggggcaggctctccaggcggttctcgctgaggtccaggtatagtaggtcagtgaggttgatgaagagctggttggggatggtgtcgatgctacgggtggggagcaggagccacctgagtcagcaccagccaccccacagggcccacctgccccctgccccccactggcctggcacctgttgtggctgaggttcagcaccagcatgttcttggcgttctccagctcccgcgggcactctgtcagctggttgtggctcaagtcctgggtagaaggggcaagacccaggtcaggggagtctcctccccaccaggcgtctgccaagcttggggatcaggcagggcactgagttgggtgtgggggtagatgagggggcttcagggccaaagggagacagccagggacttgggaggaagagtgcctgtgttagggatctgactccaaaagtgacctcaggcaaggtattatccactccaagactcagttttcccatctgcaaaatgggataacaatggccccagggacttttatagtgagtggggattgaatggtccggctagcacaggggccaggtgagtgggtagccactgaccaggactgagagatcatctagcttgaagatgtcatcggggactccggaattcttcagactgttggctcgggccacgatggcctggraataaaccataagagtctataattcctggcttccactctcaggaaggaacagagtctagagagggacacctcctcaggcagctcaccagaggccaggcctgaggactctctcacctctggcctttgatcaaatagctccctctcctggagcgctcttcctagcctcccagtgagctcctattcatgcctcaaagcccagctcaaatgtgccccggagccccagcacagggccctcagggaaccttttctgttcaaaccatttctcttcttcttaattccagaaggtgagataggggtaaggtctgagtcagggttttcagaacagagggagagaagtggaccacagagaaatcagaatctggatggagaggaagtctgctttctctccctaacttaagactgacacctcctcataccttacagacatgcagaaagcttgagcatgagggaacagggccagagaatggtgtcgtgactccaagtgacaacgggagtcaccggagctgccccgccacttctccagtctgaatgcctgtgcggcaccctgctgctgcttcacggggtcactgctgcccctcccaaccactgcacttgcagaggaggcccagaaggtagaagcgatttgtacaaagtcacatcaccaggaagtggcaaagcccagctttgaactcagagagtccaagtcagaagctgtgccctaaacatctccagggctctgacttcagatgggatggccctcgttgaggcctacagggtctggccaagggcctgatgttctgggacgttcaagtcttgggtagaaggtacacggtgctcccggccaaaccccactcaacaccagctctaccactgcctggctctgtgacctggggcaagtaatctgccttggtggccaagtttctcttctgcaacattagtggagggctagagcatatgaaaaaatcctaacagaatagtgggaacattgctcagccagtcttggctattattactgtagttattgtccataacggctggtaagattttggatttytttacctttttcctgatggaattctctgatccacatgggttactttacacagggcactgctgtaacctctaatgagagggcccctctgtgacacctgagcctctgagcctgacacggaggtgggcagaaatgctggcccagcttggtgtctagcccaggcttcacgtccctgacyggaccttggccccaaccccaagctcggtggcctcccggccagcactcacgcgcagcgatggcaggctggacagctccccatgaagcgtggtcaggttgttrtggctcacagacaagtgttcctgggccggaatggggagcacaggctcagcagggtgggtggggtgtccagagtccctgcctgcctccacaactctgcaccatccaggaaggcctcagccacactggcccaactacccctgcagcttccctccctcactcacccggcctcttcttgcacacctccctggacagggtgcccactccctttcttccagctctgctcatagctgtcggtgttcctctctctggagaagttgtctgccttctccacaggctctgcccacctggctcatccacagggaccctcccctgcccgcccaaacccccttaccagcttctgcagggcggccagctcctcgggcaggtagcagaggccagtgcggttcagcttcagccaccgcaggctggtcatggccttgacattctcagggaagtagccgccctgggggaaggatgtcaaggtgaagcacagagcccctgctcaccaccttctatggctcctccagcccatgggagcctttggggagccacagaaccaactctcaccatctgtgagaacacagacaagtcatttcatcattgtgcctcaatttcttcacccatagaatgggaattttaagcccccccgtgacaaaagtgttggcctaagatttgtctctcctactggattctgggccccaggagggccaggacaaaactggcttgtttcaggtgaaagcccagcatccggctctgtggttagctcggctcaaattccttcacctagcattccacactctgactggctgcctggggtgggggatcccccttccaagcctttgcaaaggcgccacctgtgccctcatcctgccatcagcacactggcaactcacggccagggtcaaacccttgcttgcggagaccgtggctccccaccctgcagggcaggccagcatcactgcactcccctggtgtgtgaacgcccacctcggcacctccagcccttgtggcaccaagtctggggcagtaggtgccttcagtgcctgcggctgatattcctttccccctagcgccacattcccagctggtgactcggactctcccagttcagcaaagaggaacggggaccccaggttagggtggtggggatggggtcagggaaaagtggtgtagccacttgtacttggggtcaaaggtgtgtacacaggcaggtaaacgcaggaaaaacctssctcctcggccccagccccagaccaacaacccaggccgaccctgccagtcacccaccctgaaggtgaggctgaccctccagccagctctccctccctctctttctctgcttcccctttggtcaggcaatgcctgtctcattcttgagtcctggaaccaccccgccgccccacccactggctgcggagggctgggctccggtcccttttctctcagtccagcagctgctcagacaactgccacccagcacctggcacaccggcctgacacactctccacaccaacaaatctcactatactccttgcgtccaaggaggagacttttaagccccttcaccggctgagaaagcctaggctctgagaggggaagtgatctgagaggcccaggatcacacagtatggcgggtggcggtggcggggagagggcagtgatgagtcggctccacacccgcccctgggcagccgggcagccatccctgagtcagggcctggcttgggcgtgtgacctcagaggggcggggaggctcgcccgatccccaggccaccatccagcctagaccgagaacacggacgcggggtgggggctcccggccgggcccccggcgggactccgagcccaagcgtccgtccccggcctgcccagcctcggtctccccgtacaggcactgggcggaggcctcggaggtccattcctggccaggggagagccccaccccgccccggccgcagtccctgggacacgcagggcctggagccgagcgggacaggaagcggaggccaagcgggccgggcggaagagaaggcctgcagggaggcccggcacgcgcccggcccggctcaccttgaagtcgttgccgctgaggtccacgccacgcacgaacggcagcaccccggtggcctccatggcgccgctctcgctgccgggccgcgccgggctagggagcgccggggcgagggcgctggggggagccgcgggctgggccagcgccggccccgcccctttaacccgcccgcgcccgccgcattccgcggggaagtgtaggctttaggcctcttagggcctcagtttccccgtctgttcgaagactgcggaggcaccaaggagtgcgggccccccctgtgctggagttggaggcttccacgatctccaggcttaagtcccagcgccccagggcaggggccgtaacggccgctggtcgaggcaccgtcacctgcgctgctgcagcacatgaagctggccctgacctcagagagattctaaacctcggccccggggcgcagaggcccaggaagtgcctgtacttggctgaccggtggtagtgagacacctggatcctcgggtcctagctctcctgcttctggacttagtttcctcatgtgttgtttttgttttgttgagacagggtcttcttgctctgctgcccaggctggagtgcagtggtgtgatcatagctcactgcagcctcgaactcctgggctcagcctcccgactacctgggattataggcgcaggccaccacacctggctaaatttatttattttatttattttttattttttttgagacagagtctcgctctgtcgcccaggctggagtgcagtggcgcagtctcggctcactgcaacctccgcctcccgggttcacgccattctcctgcctcagcctcccgggtagctgggactacaggcacccgccactacgcccggctaattttttttttttttttttttttttgkatttttagtagagacggggtttcaccgtgttagccaggatggtctcgatcttctgacctcgtgatccaaccgcctcggcctcccaaagtgctgggattacaggcgtgagccaccgcgcccggccttatttatactttttgtagacacggggtgcttgctatgttgcccaggctggtcttgatctcctggcctcaagtgatcctctggtatcagcttctcagagtgttgggatgacaggcgtgagccaccgcgccctacccagtttcctcatttgtaaaatactttctaaggttgtcaccatgagcaaattaacaaagaatgcacgtgtagctcgcagcatacagcaggcgctcagtgagtggcaggttattattccgttttgttgttttgtgcgccaggttattattcccacttagtgtcagcacccctgtgctcgtacccccctacaaagggaggctccagaagagaagcatccgtcttggtccttgctgttcaagggggctcgccctggctgacacatagcaggaccccaataaatgagccacagctgttatatgcccaaccatccttcgcaggggaggagggggtctagtgtccccattttacaggagaaaaactgatgcccaggtggagaatggcccacacaagctcgcacagagcaggtggcaggggtaggcgctgtgcccctcaggcccacaggtaagaatgaggccaccaagacactctctcgcagaggtgacctaagaggttggatgtgccgggcctctagccatgtgcagcctctctacctggtccccagaaggaacggggcccagacagcttcctccacaccggaggctcacattacaacgcacagacgtcctggagggtcgcctgtcacgtcacctgttcgcggtctcggaatgcagccctgcacctttaaatccagactgcgtcagggagtcccgccccagagggagtgcggctgtcggctggggggcgggacctgcccttcattggctgaaccgcgcagtattttggcacctgtgcgctggactcgagcgctccgattggagttagggcctgcttgtctgcgtgctgcgaagtccgcggctgcccccggggccctagtcgttgggttccagggtccttcacgttccattcccaggctggtctgagctccggggccgtggtcccgctgcctcctccggtcgtcgtgcggaagctgcgacgcaggtacagctggagcgcggcggggcggcccccagggtcaccgggctcggggcttggcgcgcgacggaacgcagatcgggggcgtggcccgcgatcacckctggggaaggcggggaggggacctttgggggaccaagggcagcgttcgaatcctagcccagcccccttcccctctcggtctcttggtttaycctgcgaacggggcgtcacccgcccacctagggctgctgcgcggcctgctccgcccgggcccagggcaggcaggtttggcggaggagggaaggccaaacggcctccagggccccgctgcgcaaacttgggttattttcagccacccgtgccctttcctgcttctyggagctggaaggctgtggactgaggcctgcgcgaccccgccagagatggggctgagtcccaatttagacaggttgggagtatttaaagcgctttacagtttgcaaagtagattcctggtctctctgggggcgggtggcagtattgatccccgagtcaccgatgaggagattgaaaccggccctggggccgtgrcgggtcacccggttggcctgggatcgccccagagaccgtcttatttwtagtctggrgcgaatgggcgggtgtacggggctgagtcacacagcgcttcaggcttcagctactccaggcatctggtcacctggcaactgggcccctggcacccacactctggcagggcaggtagaagtccttggtgcccgggcaggctgtgacctcatggtcatctgctcaggcctccccgggagagttctgcttggtgtctaactgatgtcctaaggtcccagcccttctcagctcccagggcctgagggcagtgtccccctcgcagaacgtgaggaatgtggactgggccctaggagatctttgcctccacttcccaagtgctggcccccacccagccacacacttcaaggctgcccacatctgcccctcactgctgcctatgccatcttacaggtgagcaaacaggctggggcccaggccttcaccttactttctgtgttgcttggccttccggcagttgagaagcatcacccaccactacctacacattgtcccaagactgagaggcccagagagccccctgtacagaggcactgggcagccctttctgccctgccaaaggggcttcaaccctgacaagcacatctgcattggcctgcctgggcagcttgggccgtcttactctgcccgtgctctgacttggtagctctgcctcttgggctaccctgtcaagatttgggggtaactggtcccagtggtcccccagactggctggggccccaaattgttggtcttctctggactttgggctcttctgaagaggttatcatagagggctgctgtgccctctgggtaggaaccttcagatgaggctgctgctgaggacctgggcacctggcacagggagaatccgtcagactctgtgggcggatgagagtctggaggccttgcagtcatgggttggagaccttaccactcacttgtgagctggcagcctgtagctctgtaacataggggtagtgatgatgacaccctggtgatgtcagaggtcctggagggtgggctccagggagagaggccccttcctatacctgcacaagcctcagggcctttgtgagcttctttccaggcagctttgggagaaggggcttggcagctccctcatctcctcatgagagatgggggcttgggaccccaaaacccaagctcatatcccatccctgccctttctcaggtactttacgtgatttcccagggcctcggtgtcctcccctgtggatgggtggcccctttctctgagaaattctcagaaagcccccctcatgggctcagctctgttacccagcataaggacagctagagcacctgtccacagcagcccctctcccagcctggccacctgcacctgagctgccccttcacccctggctctcttacaggcagaccatggcagagttctcccagaaacgggggaagcggcgtagcgacgaagggctgggcagcatggtggacttcctcctggccaatgcccgcctggtgctgggcgtgggcggggctgctgtgctgggcattgccaccctggccgtgaagcgggtaaggccaagtgggcgggtcatgcctgaagctcctagaggaggacaacagggttgggcttttcagaggggccctggggaggggtggggactgcccaaggccttcatgggagcccagggcacctgcttctccacccagcacgctggtctgctttgccctgggctttgctatgactgcccagatttcatatacactgatctgtgtgactgtgcttgcagttcattgacagggccactagcccgcgggatgaggatgacaccaaggcagacagctggaaggaactgagcctgctcaaggccacaccacacctgcagccccggcctccacctgctgcccttagccagccagygttgcccttggccccctcgtcgtctgccccaggtgagtggcactccttcccctcttttggtgtcacattcaagagacgcagcccaggctttgccctgactgactgtgtgaccctgcgcgagtccctgcttctctctcggttgtgggctcctcagatatttaatgggggtggtgtttctttgccctgttcctggagcaaggtggtagcgttgtgatggtgrggagctttagatggggaaactgaggtccagaggggcgtgacatacctacctactctgcatgaagctgttgtcgccagggtgttggactctggggcaatgagaactcgtcaccaagagctcactatatgtgaggatctgaactgagtgccttctcaggtgccactgcaggtgagaaaagtgaggccctgggacatcacacagctagttctcggtggcgttttcttaactaatcacaggctgttccgacatgttccccgccccttcactctgcagaagggcctgcagaaactgatcctgaggtgacaccacagctcagctccccagcaccgctgtgtctgacactgcaggagaggctgctggccttcgagcgggaccgtgtgaccatcccagcagcccaggtggctttggccaaacagctggctggcgacatcgccctggagctgcaggcctactttcggagcaagttcccggaactgccctttggggcattcgtgcctggggggccgctctacgacgggctgcaggcgggggctgcggaccatgtgcgtctcctggtgccactggtgctggagccgggcctgtggagcctggtgccgggcgtggacactgtggcgagggaccctcgctgctgggccgtgcgcaggackcagcttgagttctgcccccgtgggagcagcccctgggaccgcttcctggtcgggggctacctctcctcccgcgtcctgctggagctactccgcaaggcgctggctgcytctgtcaactggccggccattggcagccttctcgggtgcctgatccggcccagcatggcctcggaggagctgctgctcgaggtgcagcacgaacgcctggagctcactgtggctgtgcttgtggcagtccctggggtcgatgctgacgaccgcctcctcttggcctggcccctggaggrgctggcggggaacctctggctgcaggacctgtatccagtggaggctgctaggctgcgagccctggacgaccatgacgctgggactcgccggcggctgctgctgctgctgtgtgctgtctgccgtggttgctcggctctggggcagctaggccggggtcacctgacccaggtggtcctgcgtctgggggaggacaacgtggattggacggaggaggccttgggtgagcgcttcctgcaagccctggagctgctcatcggcagcctggagcaggccagcctgccctgccacttcaaccccagcgtgaacctcttcagcagcttgcgtgaggaggagattgacgacattggctatgcgctatacagtggcctacaggagcccgaggggctgctctaggtgggtggaaacgggtggttgccatgttttctaatgctggggagctgcacccacctcccttccagggatttgaatagtggtttttctctagctttttgccagaacaaaggagggtacattacttaaacccagggcatcaggatgtgcttgggctatggtggccataaaccctgagcccagagagcttgggtcactgtcacctgagtgcagctgggctgcctcaggcagcttggagtgccagccattcctgcaagcaccgtttcagctcttggggccaaccccaggacctttggctctgtccatcaccagcaaccaatccaccaacagaatgtggtttctgccatcctgggcagaagctgaaggccagcttcacatttctgctgagagaaggtgacttaacgccttttccggccctagctccaggcgttttgaggcgtctggtgcctgatggtaggtatggtgtgtttgttctgtcccccaggggctggagtcacctggtgcccctgaaggacagatttttggctgttaaaggatggcattttcctgctgtcttctgtgcgtttagttttcttgctgagcgggagctcagtatgacttgccacccacctgatacctcagggcaaggccctttttccctccagccaggtgagtgttttcttcaggcagctgagggtcctgggggagctgaggctctgtgctgcacccccagcccacagctggggcatctcactggagctgttccaggccccactggagagcagaggacctgatcccccactagagaggtccggtgtgcacagccggcctcccagtgtgccaaaatgaactgctctcagctgatggctgtattctgactttgaagcctgttaagaggtagcaagggggctagaggagggagattccacctcccctcccaagtgaccctcctcctgcctctggtatccttccttttgaaacgaagctcagcttcgaagatgtgaacaagaataaaaggaaaaaattctaatgtatatataactcaggctggataagggagtcttggtgctttcatacgcagctgttgagggttttctgtaagtcctgtggcttgtcctggcactttggcaagagtgcttgaggtcaattggaggtggtagagtttactttaaaaagtagcatcttggccgggtgtggtggctcgcatctgtaatcccagcacatcgggaggccgaggcgggcggatcacgaggtcaagagatcgagaccatcctgaccaacatgatgaaaccccaactctactaaaaagacaaaaattagctgggcgtggtggcacgcacctatagtcccagctactcgggaggccgaggcaggagaattgcttgaacccgggaggtagaggttgcaatgagctgaaattgcaccactgcactccagactggcgacagagcaagactctgtctcaaaaaaataaataaataagcatcttggccccgcgctgtggctcacgcctataatcccagcactttgggaagccgaggccggtagatcacctgaggttgggaattcaagaccaggctgaccaacgtggagaaactccatctctggtaaaaattcaaaaaaattagctgggcatggtggcacatgcctgtaatcccagctacttgggaggctgaggcaggagaattgcttgaacccgggaggcggaggttgtggtgagctgagatcgtgccagtgcactccagcctaggcaacaagagtgaaactctgtctcaaaataaaataaaataaaataataatagtaataataaattagcatctcagtctgtttgggctgtgataacaaaatgccatagactaggtggcttataaacatcagaaatttatgtcttaccattttggaggctagaaatccaagagtgagtcacagattccatgtttggttgagagcccacatcctggttcataggtgtccccatctagctgtcctcatgtggaggaaggggggaaatgctctcctagggtctcttataaggaaactaagcccacccatggggtgggggcccacattcatgatcgaatcacttcccaaagaccccatctcctgttagcagtgccttgggggttaggatttcagcatacaagttgaaggggacacagactttctgtccgtgacaagtaaggtaagtggaaggaaaagatgaaaagcttggtgttgctttagtaatgggaaccagccagtttgggatgtttcttcccgcaaggctgaactgctgagccctgcaccatactttctgtaattagtgggctgttgacagcccttcagccatgctcatcattttttagaaacctgtgttttttttcttttgagagtgagtatcactctgtcgcccaggctggagtgcagtggtgcgatctcggctcactgcaacctctgcctcccgggttaaagcaattcttctgcctcagcctcccgagtagctgggactacaagtgcgcgctaccacgctcggctaatttttgtatttttagtagagatggattttcaccatgttggccaggatggtcttgatctcttgaccttgtgatctgcctgccttggcctcccaaagtgctgggattacaggcatgggccaccgcacccggccagaaatgtgtgttctctacctcccttgcacctctttgtggctgcacaagtggggaggaaacttgccccgccttgtgcaggtgagaggccagggcatcttaaccctctcacccgcaagagccaaagccagggctcacttcctatcaccagatgacacatgtgggctggggagggctctggtctgcgtgcagggctgcttccagcctagctgtgccactcgcaccctgctggtccttccccgacttaygtcctgaggggactcccctaccccttccagctgtgactgcaggacccaagggaagcaggactgtgccaagcaaatggaatagtggtgtaggcctctaggtgttgggtgtagggcaagaggcgggcacgagggctccttgtagaggatattataagggtccaaggtgggagacacttggctgaggtccattccaatcacttgatgccttgatgctggagagctttgagcagtttccttggcggtgttggggcagcaagggaacagtctggggcagagcctgtgcctcagtcttctcatctcttaactggggagggtcatgtaatacccaaccccaggtgcttgtgacgattaactggggtgggcagtgcttaacataatgcctgggaacgaggactggtgggcctagctgtgccccaccctccagccacatccaagccccagcacagcaaggtgctcccagatgccactccagcccctggtcagagcgcagctgtccaggaagcaagctcagtctagagtgccactccttcgacgaccagaccccaacacaagcctgatgtagaagccacttgcttcaggtagctctaaatgtactgtctcataccatggcttaaaaaaaaaaaatccaggatgagttaaaagtgttcgtggtttcatcacctagccaaggttaatgtctgggtcttccgtttctagccagagaactggaaacaaatcactgttttgctaggagctttgcatgacctcacgccctaggctgccgggtcctgggctgtcctgatgggctgtgaaatcccacccactcccagggctgccgggtcctgggctgtcctgatgggctgtgaaatcccacccactcccctccccgcgaggcaaggacagcctctgccctgcctgcctgggagcacggtatgggcttgcctaggcctcagtgtcttaacactgtggtgactsaaattccttgttttaccttcaccaagtaacccagagccaggatccttgatgactctggtaaggcagtgactacccctgctcagaatgcaagggtcgctagggaagattttagaaaaaaaaaaaggactccaaaaatggagaatctaaatgtagtcctttgaaaatgtcacccatagatcctctaccactaactgtaataaatttgaccaaatagcatttcctttttgtaaatccacttgtacgcacttctcttcaggaatacttagctgtgggattgtcctcaaagggggaccatttattcccgtagagctgacctgttcagctcgtttccgtatctgctaatatttaaaaaagcaaacaaaaaaacaggccaggtacagtggcttatgcttgtaatcccagcgttttggaggttgaagcgggaggactgcctgaggccaggggttcgagaccagcaggggcaacatagacctcatctctacaaaaaataattagccaggtgtggtatatacctatgggcccagctattcaggaggctgaggtgggaggatggcttgagtctagcagggcgaggctgcagtgagccatgattacccctgggattacaagctggtctcaaactcctggcttcaagcagtcctcccagctcggccaccctaagtactgggattataggcgtgagccactgtgtgtagccaacatttgctttttttttttttttgaaacggagtcttgctctgtcactcagactggagtacagtggcccaatctctgttcactataatctccacctccctggttcaagcaattctcctgcctctcagcctcttgggtagccgggtttgcaggcatgcaccaccacactcggctgatttttgcatttttagtagagacggtttcgccatgttgcctgggctggtctcgaactcctgacctcaaatgatctgcctgcctcagcctcccgaagtgttrggattacaggtgtcagccacttgtgcccggccaacatttgcgtttttaatgacacttttcttttgtaatcaggatatatatataatcttaattccttgagaaagctaaggttgtagtggagaaaacccaggtgtgttccaaagacaaacaccggtgactctggtgacctgcactgggtcatctctgcattgcttgccgaattcctgagacgataagaccaatcagttcagtgggctgcrgcctctggcaggcagggaggccactggggctcgcttgcgtgggtttcagaaggaacctttcaggttcagactgcaggccagaccctgactctatattagtgttttccagagggacagaaccaataggctgtatgtaatatatagaaagcgagttaattagggagaagtggctcacaggattacaaggtgaagtcccagaataggccatctacaagctgtggaaagaagccggtagcatagctgagtccaagtccaaaagcctcaaaaccagaaagcccacagtgcagccttcagtctgtggcagaaggctccaggaagctgctggtgcaagtcccagagtccaaatgccgaagaacctggagtctgatgtccaacagcagagaagaggaagcaagcatctggcacggaagagggagagggctggagaagactcagcaaggtgctcatcccccttcttccacctgttgttctggccgtgctggcagctgattggatggtacccacccacattgagggtrggtcttcctttctcagtccaccgagtcatgtcactctcctctggcaacacccttacagacacccagaaaaaataccagccatctcggcatcccttaatctagtgaagttgacacctaacattaaccactgcaccaacaccacctgtgtgtgagctggtggtctaaggtggggatggggtgcacagatctgtccctggtagggacggtcaacaggtgagtggcaacaccctggtgagcatattgagctggggccacctgtgttccagtccaagaaacctrgagatccagctgaatgtgaacatcccaggtcttcggccggattctrtaagaggcaggtggtgaattcatcccaaagggcagtggggtctctgcccagtgtctcaaaagccagtgcctccaggtgcgggccccagcgctgttgggcacattgagcctggctctggggagtgggggagccggatgttggtgacaaggcttatttttaattctggatgctctaagtatccggggtgggatcaggcagagactcctcaactgctacaagttgtgtggggtggtctcgtttcctctgctgttaagtgcaagcaatcacctggggaagcatgtgcaggacgtcagccaggcttctttgccaagatggcagggaagcctccagttaccccatgggctctcakcattggtgtggagagcagggaggggctttttacaaaactctgatggggcttggggggacatggcatcagagattaggtttcaaggccaggttagctgcttggtagaggaaaacacttaacccaacagagctatggttcctgcacaaaaaggacaggagatgctgtcttgctggcagcaggaggttgaaaccactgtaggtgacagcctggccagtgcctagtctcagctagatccatcaaggggggggcggggggggtccattttcttttccttggttttgcattgcacaagctgcagatgtggctcaacacagggactaaaaacccttccagtcaacgttgacggggtagaatgagctgcatgctgctaacctgagtgggccatcgagagagacttagaaattccaacaggtttgatttgtgaagctttaatttgcagtcgtgcctgaccgtaagccttcactagagagcctcaatatgaacaaggacaccccattacggatgaggcaactggggctccaaggatgaggctgcacacccagggtggcagaagaggccaggaagtgggagctgagcctgggtctgtctgatctcagatgcctggcccagtccatggtgcagcccaatcctgcagtttgcttttgagacacacagttgcctgcagagatgtgaaaaccacaaaggcatctgatatccagaaactattaagaactcctacaactcaacaacaaagacagacaacacaatttaaaaatgggggaagagaccaggtgtgatggctcctgcctgttaatcctagcactttgggaggccgaggctggtagatcacctgaggtcacgagtttgagaccagcctggccaacatwgtgaaaccccgtctttactaaaaatactaaacaaattagctgggtgtggaggcagatgcctgtaattccagctacttgggaggctgaggcaggagaactgcttgaacccaggaggcagaggttgcagtgagccaagatcgcaccactgcactccagcctgggcacaagagcgaaactccatctcaaaaaaaaataaaaaataaaaaataaaaaatgggtgaagaacttaaatcgacattctccaaagaatgtataccaatggccagtaagcctgtggaaagatggtcaatgtcattaatgactaggaaaatgcaaaacaaaaccacaatgacacgccacttcatacccactaggatgacaaaacactaggatggctataatacaagaaaaggaaaggaacaagtgttcacaaggatatggagaagcagtaaccctggtgtgctgctggtgggtgtaaagtggtgcatccactgtggaaaatttgtaggttcctcaaaaagtcaaaacatggagttatggtataaaactacaattccattcctcggcatatgcccaaaataactgaaaacaagtcatcagacactcatacaccaatgttcacaacagtgctattcacaatagccaaaaagtggaaacaacccaatgtccatcaactgacaaatggataatcgtgtggtatattcatacagtgggctatcagcttatcataaacatcgaggactgacatgctacaatgtggatgagcctgacaaacatcagccaagtcaaagaaaccagacacaggatgtcatgtatggtaggatttcattttttttttttttcttgagacagagtttcactctttttgcccaggctggagtgcaatggcccgatctcagctcactgcaacctctgcttcctgagtagctgggattacaggtgcctgacaccacgcccggctaatttttgtatttttttagagacggggtttcatcatattggtcaggctggtctcgaactcctgacctcaggtgatctgcccaccttggcctcccaaagtgctaggattacaggcgtgagccactgtgcccagcctggtatgattccatttaaacaaaatatccagagtaggtaaacccacagagacaaaaagtggttggtggtaccccggagctgggataggcaaaatcacacacgcagggccacaacccacacccactcggagatgttccaggaacaatctcaggaatctgcatttgtaaaaatcctccccaataccccatcagaacacagagccactggtctatgggccaggagcccaagacctgagaacaatcctagtttcttcaacaactagcaacatgactgggcaactcacacccacctctgctcatcttctaaactgtaaatcagagtccatatggcttgtattattcacaaggtttttgtgaaggcaaacgggggaacatggccaccactggaaaaagtggaagatggaaagttagtgatctgaatctgaacctttcattagacatctctgctctgagggaccatctgtggggtgagaagaaattgggctcagtgcttaccatgtggaaagggaggaagggctctccacatgggacacaagggacagccatgaaggacagaggctgacgagacctcccagggtgagctccttccagcactggctggtacctgttgcttctgcaaatgttccccagaccctctgcactctcgcaggtcagagtaaaaaaaggttggattctttcattttaaaaaaagtttgagacagggtcttactctgtcacccaggctggagtgcagtggtgtgatcatggcttgctgcagcctcaaactcttgggttcaaaggatcctcccacttcagcctcctgagcagctgaactaaagacgtgtacaactgtgcttgttatatttttaaaaatagagacaaggtctaactatgttgcccaggctggtcttgaactcctgatctcaagcaatcctccagccttggcctccctaagtgctggattacaggtgtgagcctccacgccctgccggggttggattctttttatttttttaaatttttaaattttttttgagactgagtctcgctctgtcgtccagtggcgcaatctcagctaactgcaacctccgcctcccgggttcaagcaattctcctgcctcagcctcctgagtagccgggtctacaggcgcacaccgccacacctggctaattttttgtattttagtagagacagggtttcaccatgttgccctggctggtctcgaactcctgagctcaggcaatccgccccccacagcctcccaaagtgctgggattacaggcatgagccactgcacccggcctgggttctttattaaagcaatgaattckggatgtcctggcttaactagattaagagggaatgaagcttcttctgaaggatcagtgttaccacagccatttccttgcattacaccgtccttctcaggacgtctatgagaagccctgggcagcctggacagggactrccccatgagtgctggtgsctcacttggggctttctgcaggtgaaggaagcagccctgggagcttcttcctttggcacacagtgggcttcagctgggactgcaccaatcctctgctaacagcaaccatccttggggggtccgagggagcagctgcgtgacttttcagcagtggctatggtcactcctgaggcctgggaagagggtcactgtccagcagagctggcctgctscagagtgatctggaccttgtgccccttaacacaagaaggcccgactccaaaggccaacactgtcctctaagtttccaggacactaaatggccacttggtcctggttaactcatttctaaacacaaaggggacaggtctgagaaagtggcgttctctaccctaccctgagctcatctgttctgaggacaaaagggacgggtgtgtccaggctggtggcaaaggctgcatttccggggtttctttgctgtggaccccatgtctgaggaactggcccggggccttttgcttctggcttccgactccagggttcttcctctgtctcctgtccaggacggggctccagaagtccctgtcgggagagtcaggggaggggtgaggttagaactgacatgcagaagtggcaagtcctgaacacggtggctcatgcctgtaatcccagcactttaggaagctgagggaggaggattgcttgagcccaggagttcaagatcagcctgggcaacatggtgaaaccttgtctttaaaaaatgcaaaaattagccaggtgtggtgtatgcctgtggtcacagctactcgggaggatgcctgagcctgggaggctacagtgagctgtgatcacaccactgcactccagcctgggcaacagagcaagaccctgtctcaaaaaaaaaaaaaaaaaaaaaaagagcagcagacgataaggctgaaccaacttttttttttttttttttttgagatggagtcttcgctctgtcacccaggctggagtgtggagtgcagtggcgtgatctccactcactgcaagctccacctcccgggttcacgccattctcctgcctcagcctcccgagtagctgggactacaggcacccgccaccacgcccggctactttattttttgtatttttagtagagacgggtttcatcatgttagccaggatggtctcgatctcctaaccttgtgatccgcccgccttggcctcccgaagtgctgggattacaggcgtgagccaccgtgcccggccttttttttttgaggtggagtctggctctgtcgcctaggctggaatgcagtggtgcaatcttggctcactgcaagctccgcctcccgggttcacgccattgtcctgtctcagcctcccgagagtagctgggactacagggaccgaccaccatgcccggctaattgtttgtatttttagtagagacggggtttcactgtgttagccaggatggtctcgatctcctgacctcgtgatccacccgcctcggcctcccaaagtgctgggattacaggcatgagccaccgcgcccgaccggctgaatcagtttttatacagccatgtacaccccaccagccagcctcccttcacactgtgtccaactctgtaaggttgaggtgcgatgtgcctgctgccttatgttacctgacacctctccctcaagaatcctaagctttggagacattgtcccacactcacttggtaagtggactttcatgccggccctttttacagaggcagaaacccaagcaagctggcctgtgtggtagggtgggaaagacaagcagcctatgaccggcaacctgcggcccacctccatgcaggaaagtccagctctggatcccttcctgtcccctcaacaggcctttccagaccagctgctcatttacccaggacagtcagtcagccagcctggaggtcagataccatgtccttccaagtggggagacaagaggccagactgcatctcacttcaaatgtgggtctctcactgcaatggccatctctgggccccattagcactggtagccagttccaagtcccacagtttttaccaaacctctggtttctttctgtgcatgccgggctagtgacacatgtgtaagaatcatagtctgagactaaactcctttctaaaacaggaaccctatgaatgtaggcagggaccatcttgttgagcaaacttgaggcagagaggctaagtcatttgttcaaggttatactgctgagctttggaaccagatttgctcaactccaaagctcccactaggcctttgggtcattctcagctacttaagctctgttgtgcactggagcaggaggaaccattcaaagtgcctccacgtacaccattcaacttgatgcaatgtccaggtgccacttctcatgacacccagttcccggacattggcccaagctgtgtcaccctgggcaggttcctaaatatcatcggggttggcatcttcatctgaagaaatgaggctgggccaggcacggtggctcacgcctgtaatcccagcactttgagaggccaaggcaggtggatcacctgaggtggrgttcgagaccagcctaaccaacagggtgaaacccccgtctctactaaaaatacaaaattagctgtgcgtggtggtgcatgcctgtaatcccagctacctgggaggctgaggcaggagaatcatttgaacctgggaggtggaagttgcagtgaaccaagattgcaccattgcactccagtctgggcaacaagagcaaaactcagtctccaaaaaaaaaaaaaaaaaaaaagaaatgaggctgatgcttatggtctgccaagggtcacgacagctgcaagggcacatggccatgggactgggaaggcctatgtaytcatcctggtgtctgttgctatgggaccctgagcaatacccacttcatgtgtctgggtctcacctttctcacttataagtaaaattgtgatcataatgcttacccaatgaggatggaagatgcacaggaagtatacttagcatagtgccaggcatagggcaagtgacaccattactggtagctaccctttaatttggaatgaggactgtacaattatcaccttgctgaaagtgatcaagtgaggaaaagtgaggtgcaaggcagcccaggtgcccctcccaatcccaccatgaccctgccttgccttctttctgctgtccccagtctctgaggtaaacacctgaaaactgaaggcagggattcccatgcccctccctgcctcacctggagcggtgttctcatcgacccactggaaaaagccacactgctgctctctcggcttggcacatgtgtggaactggcgccccttgttgggtccatccttctgcacagtccgtgtgacggagggctggctgcaaaggcaggatgtgccactaccactgccatcaccagggttgccaaacccacctagrtggatccctgggcctggtgggcatcccagggaggcgcccaggggtctatatgccaaggcaggaggccctcctgctcccggattggggctgtctgcccacaggaagaagttgcagctacctccgttgcacttaaagaactgccggccccggttggggccctccttacggacagtgagcagcacagcctcctggccacagttgcaggtcacagaattgctttcaccagcagccgtgggtggtgggagggtctgggccagagcctttgaggacccagtctgtctgctgtcagcaggctgggggtgctggctgttgtccatcctgtycagggactggttagcctgcaggcggccagagggctggctagccctgggggggccccctgaaaatctcaggtccaggatctccctcagggtgtygtcgcatccgccgatgcagcaaacaaactccagaggcatggtcgggggaaggctaccgcgcttaaactttaactttaacctagtgaggccagaagatgagaaaaaacattaacaaccagatgccagcttctccttagtccagtgagggctgctttagccctaggcctctctccaccattccttatgcatcaggaagcccacrcaagtcccctgtgaggccctctatcagcccaccacaagcccccaccagtcatcacaggagtggacagtgggaaacagtgcagatgaaatctaagatcccagtaattcactaaaataaaaacacctctgagaagtcccatgtctctgtatcagcagttctccaagtgtggttccagggtgcctgagccctttcaaggagagtgcaaaactcttttataggccaggtgtggtggctcaaacctgtaatcccagcactttgggaggctgaggcgggcggatcacaaaatcaagagattgagaccatcctgaccaacatggtgaaaccccatctctaccaaaaatacaaaaattagctgggcatggtgrcacgcgcctgtagtcccagctactcgggaggctgaggcaggagaacctcttgaacctgggagtcagaggttgcagtgagccaagattgtgccactgcactccagcctggtgacagagcaagactctgtctcaaaaaaaattctaagaggttatgtctattttgctcttattcttccatgtgtatacaacggagtttcctggaggttccagcacatgcaatgactcagcaggctgactgcagaagcagatacgggaatccagctctcttctattaagccagacatacaaattgcaaaatgtaaaacaatgtcattaatgtcattattattttgcttttgaaaataggtattttattaccctaaaaaacaagttatttacagtagtatgcaatgcatttactagaaataaattattaaaatttttttttttgagacagagtatcattctgtcgcccaggctggtgtgcagtggtgcaatctcggctcactgaaagttctgcctcctgggttcacgccattctcctgcctcagcctgccgagtagctgggactacaggcgcccaccagtacgcctggctgattttttgtatttttagtagagacggggtttcaccatgttagccaggatggtctcgatctcctgacctcgtgatccacccacctcggcctcccaaagtgttgggattacaggcgtgagccaccacgcctggccattttttgtatttttagtagagacagtgtctcaccatgttagccaggatggtctcgatctcctgtcctcgtgatccgcctgtctcggcctcccaaaatgctgggattacaggcctgagccaccaggctcggcctattcatttatttctagagacagggtctggctctgtcattccaggctggagagcagtggtgaaatcatggctcactacagcctagacctctaggatcaagcgatcctcctgcctcagcctcctgaccagcttggcctataggcatatgtcaccacatctggctaatttaaaattttttttggccaggtgcagtggctcacatctataatcccagcactttgggaggccaaggtgggtggatcacttggggccaggagttcgagaccagcctggccaacatggtgaaaccctgtctctactaaaaatacaaaaagtggtcaggcatagtggtgcatgcctgtaatcccagctactcaggacgctgaggcagaagaatcacttcaacccagaaggcggaggttgcagtgagtcaagactgcgccactgcacttcagcctgggcaacccagcgagactgtcttaaaaaaaatttttttttaaataaaawtttttttttttttaaagagatggggtcttgctacgtagcccaagcttggatgttgtatttaatatgtgaataatttcctaagcctggtgtagcaatcatctatctggagagggcagggaaagagcccttcatggttctttgcccatggcccactccaaacagggtcatacctgccaaagcagtgacagcatggaacacaacagaactggaccagccctgctgaactggctgctgcagaacacagctacgcccctgcagggcctgagtggaatccccgacactcctctctgggttctggcaggagcaagggaaagatggtgtacacactccagaggaggcacctgactcaggtgcccagctcacctgtacacagggtgtggctgacaaactggacacacactgctgtccctgctggcctccagcaccgagtcaggaagccacacagctgagcgacactctgggaaacccatgcagctgaggtagaacctggggacaaagtgccatgtcagatgataggagtgcagkagatgctctccgctgttggccatcagctaaggcagcctttcctcagctgcccgaggacaacaytcccttttctggatgacacttaactggatacacaagcactcatattgaattgattgggaaaaatgagccttctcacatcccaaaagcacaaagcagctattgctggccctgctttctatttagaaaaccaacaaccaaccaagctgacgccaggggctctgtgctgtgcactcacacattcttgcctttctgcctcgtgccaagtctgggcagtgtcaggggccccctcagtttgcatgtgagtaaacagtggcttggtgtggcctggaaacctgcccagagacatgcatgcatgtgtggatgggagccaggaatggaaacccatctgtttgtgacaaagcctcacctgcaacatctacaccccacccactgcccatccatcccatcccggtctctcctggccaatgtttttcaacaccttgcagtcatgaaacgttagggtttgactagctaatatgcatgtgatttacaaattcctcatgagtgtgcctgggtacactatgaaggaaaaaaaagccccgaactccaatcatttaaataagaaatttacaatctcagaaatggaaattaacagataaatcatggagtggcaaatcccacaagataatctcctgaccttctggagtaactcagagaagcattacaaaagaataacagaagaacaaacgaataactaaagaataataataattctccaattcagagaattggagaattcagagctaaaacaaaagtagttattctctctccttatattccaatgagtactaatccaataacctaccgatagcaaggaaaacccatcgacagcatttattaagtgctgaaatatacgcccagtcattgggctaagcctagagtggcactggcttctgtctgtgagtgacgcgagccctgacacctgcttccaggtctggcccatagacctcttgtttctgagagcctgggtggccttctcttcacttgggccagccaggttaatgatggctggaggtgaggagttgagaaacctcctttcttattcagcagcaaggagcacagcagtcccaggtgggccaggcaggatggaaaaaggcagtgaaaacccggtttcaaactctgctgcccaccacggctgcttgactccaagcaagcacctcagccctctaagctgcataaaaatccctgccttgcagggtagttaggagaatgggatgaggtaatgcttacagagcaccaccctgcattacaccagtgagggacggcacctgatgaatgatggctgccacccctccacctcgtctttccccgtgaacttcctccagtggccagccactggctccaacaacctgatgtgaagctaaattgcccactcagatctactatatttaaagcgaaaagggagttgagattttcaggccccattcagaactaaaactaggagagaacaaaagtartatctgctgagtatctacaacacatcaggcaatgtgctatatagtcctgaccattttcaccaaatcctcacccttaacacagccttgtaagtactgacattttataaaagaagaaattggggttcagagcaggtaagtaacttgcttcaggccacaccacttatatgcggcataagtggcatttgaacccagacccacctagatctgaagctcatgctcctccatgtgttacacattgggtatatgatgtcctatccacaggggacaaaaaaaccccactatcattcagtttctcacctgctctgaattcccatagtgctttacacctcaaaggcctgatcccaccctgctatgcttttaggccaacaccttgcctgcaggttggcaacaacaggcctgtcttgaaagattccatggagtgaaatggcagggtctttcgagctacggctgacaccgcaggtgctggggagcagaggtgggggcagaaggcagcgcactcacccgccattcttcttggtcttaaggaccatgtccttgttgcactgtgggcacttcctgatgggctctggcatggctgggtagatatcttcttgctgggccaactctgtcccattcccaaagtactgggccaaggcctcgtccaatctgaagaaaaggcaaagacagacacccatcagccagcaatcgctgcaaaggcacctacaacactcttacatgcacacaacaggcgtgaccttgagaaccagctggtcagtragccgcaggcctcctgcagagaacagacggcagacagaagactgagctcaccatgggccctggtgccgaaccaactcttgggaggagagtccagatacaggcagatgcttctgcttgtcaccagcccacattaaaaagtaaaactgggccaaatgtggtggctcacgcctgtaatcccaggccgaggcgggcggatcacctgaggttgkaatttcgagaccagcctgaccaacatggtgaaaccccgtctctactaaaaatacaaaattagccaggcatggtggcgcatgcctgtaatccaagctactcaggaggctgaggcaggagaatcgcttgaacccaggaggcagaggttgtggtgagccaagatcacgccattgcaccctagcctgggcaacaagagcgaaactccatctcaaaaaaaaaaagtaaaactgcacagggtccatgtacaaactccaggagtgtctgtctgtattaagtctaaactagctcatgcctgccttttcacaactggcatggggtactctaaagaacagaaaataacaaactgttatcttctattacagtctcacaacacacatcagacaccagatgtatgggagttttccccatacaccaagcaactctcccgccacacaccagttggacatcctctaattcaattcaattctgacactatgcacctggagatccatctaacggttaagggctcagtcccagaagactgctgccccaaattccctcagatgtcagtcacaaatcccaggctgtgacctgtgcttctgactgactggctataaactggggttcctcagaccccctccttggtttgattctcaatagagtggctcacagagctcagggaaacactttacttatgcttacccgttaattacaaaggatccaggtgaatacccagatggaagcaatgcacagggcaagggatgtggggaaggggtagcttccatgccctctcccaaacacccaccctccaggagtctttacctgtttagctatttggatgtgccccaaacccaattgtttgatttgtttttgttgttgttgaagaagtctcactctgttgcccaagctggactgcagtggggcaatctcggctcattgcaacctccaccttccgggttcaagcagttctcctgcctcagcctcccaggtagctgggactacaggtacgcaccaccatgcctggctaatttttgtattttttttttttttttttagcagagaaaggggtttcactgtgttggccaggctggtcttgaactcctgaccttgtgatctacccgcctcggcctcccaaagtgctgggattacaggcgtgagccaccgtgcccgacccttgtttggggattttatggaggatttattacttaggcatgattgacaaatcactggccacgtgtgatcaactcaacctccagcccctctgctcttcctgaggtaggggtgggactcaaagtcccaaccttctaatcacagggttggttccctgacaaccagaccgatcccaaggctacccaggagcccttggccactagtcatctcatttgtatacaacagacacagcacttaaaaaattccaagggtatcagaaaatgaagtccaaatatatatatcttattataaatcataatatcacaggtagaaaacacatcatttctaacaaaatacacacatgctgcttgctaaatatccacctctaaatgctccagaaaacaaatggatcacactccagcacttgggtttactgatttaaaagactttgttgcctaactcaagataattaatgtgtcatgtaattaaagcagaaaaaaaaaagataattaaaatcaagagaatggtatttctaaagccaatagttcagaataactgaaggagactgttccgattactgtttctatactgacaaagctctatggagagttgtaaaagaacccagagaagaaagtccaaagaaaaggggtatgtggaaaacctccaggccaggaggccactggtgaggatgaatctggcagggttataaactctgactggcccagatgcggtggctcacrcctgtaatccccacactttgggaggctgaggtgggaagatctcttgaggccaggagttcaagaccagcctgggcaacatagtgagacccctctgtatttcttttaaggacttacttctttgctttagccaccgcttcaatgaaaacctgcttgtatttctgcacttgctgccttagaaccacaaatttgtcctttttgccatcacagatcagcttcagatcagcttccagttcagcccggmggtcaggcttagacatttcatagcccatggaatcataacctgcagggagagagtcgagctcagtgagggcccacctgagaccctcagggacttgggcgacaccacccactacccactgcaagctctgtcctcycttaccttccacaagtcccatgcccaggtgcccagggaggaaccgcttgtctggggtgaggcccacgtacatccgggctttgatggtctcgatgtgctccgcatgagtggcatccgtacctggaagccacttgctggttactctgaggtaatacagacaacagctccayccgggtggcgcatgggcaccttgctcaccccggaatccctcctttgcctggacagcctatgcaggtaagatgccttcatttcattcccatatagctcattcaagaaatcacaatggcaacctcaactctcttgttccctcacatcccattactcaggaaagctgtcaattccagcttcaaagctctttttaaaaattctcttccccatgtgtccaagccatacttgcagcttgtgtccctatttctagtctcttcctctaccctaaccattctttaagctgtggccaaagggacctttcaaaatgtagctctgccatgaaggaaatgcaaattaaaactgcagtgaaggctgggagcagtggctyatgcctgtaatcccagcattttgggaggccaaggtgggcagatcatctgaggtcaggagttcgagaccagcctggccaacatgctgaaaccctgtctctatcaaaaatacaaaaattagcagggtgtggcggcacgcacctgtagtcccagctgctcaggaggctgaggcaggagaatcacttgaacccaggagacagaggctgcaacgagctgagatggcaccgttgcactccagcctgggtgatggagtgagactctctttaaaaaaaaaaagaaaaaaaaaagggctgggcgtggtggctcacgcctgtaatcccagcaatttgggaagccgaagcgggcagatcacgaggtcaggagatcaagaccatccttgctaacacggtgaaaccccgtctctactaaaaatacaaaaaaaaaaaaaaaaaattagccgggtgtggtggcgggcacctgtagtcccagctactcaggaggctgacacagaagaatggcatgaacctgggaggcggagcctgcagtgagcggagatcgagccactgcattccagcctgggcaacagagcgagactccacctcaacaataacaacaaaaaaacaaccaaaaaaaccagtgaaatagcagttcagacctactggcaaaatcaaaaagagagataatactaagtgttagtaaggatgtggataaactggaatcctagtgcctygctggtggaaatgaaaaacggtacagccacttcagaaaagtttggtggttcctaaaaatgttaaatgtagagttaccaagtaaaccagcaatcccactcctaagtctacccaagagaaatgaaaacacatatccacacaaaaccttgtacaaaactgttcacagcaggattatttataatagccaaagagtagaaacaactcaagtgtccatcaactgcaacctctgccttccgggttcaagtgattctcttgcctcagcctcccgagtagctgggattacaggcgcctgccaccaagcccagctaattttttcatttttagtagagaaagtgtttcaccatgttggtgaagctggtctcgaactcctgacctcaagtgattggcccaccttggcctcccaaagtgctgggattacaggtgtgagccactgtgcctggctctttataggaaataactaaagtaggcaaatctggccaggtgcagtggctcactcctgtaatcccaacactttgggaggttgaggtaggaggacagtttgagggtgcaagttcaagaccagactaggcaacatagcaagaccctgtccctacataaaacaaaaaagtctggctgggcatggtggctcaggcctataatcccagcactttgggagaccgaggcgggtggatcatttgaggtcaggaattcgagaccagcttagctaacagtgaaaccccatctctactaaaaatacaaaaattagccagtgatgcgcacctgtagtcccagctactcaggaggctgaggcaggagaatctcttgaacctgggaggcggaggttgcagtgagctgaaatcgtgccactacactccagcctgggtgacagagtaagactctgtctcaaacaaaacaaaacaaacaaacaaaaaacccaacaaaaaaattagctgggtatggcaacacatgcctgtagtcccagctacttgggaagctgaggtggaaggatcccttgaaacccagggttcatggctgtgacctagcctgggtgacagagtaagatgctatctctccaaaacaaatttttttaggggccgggcatggtggctaacacctgtaatcctaacactttgggaggcctaggtgggcggatcatgaggtcaggagtttgagaccagccaacctggccaacatggtgaaaccctgtctctactaaaaataacaaaaattagctgggtgtggtggtgcatgcctgtaagcctagctactcgggaggctgagacaggagaatcgcttgaacctgggtggcggaagttgcagtgagcagagattgtgccactccactccagcctgcagcaacaagagcaaaactccatctcaaacaaacaacaaaaaaaacaaaaaaactgactgtggtgatagctgcacaactttgtgaatatgctaaaaaatgtacattatacatttgaaggagataaactgtatggtatataaataaagctgttaataattatatatatatataaattttttttttttttttttttagatggagtctctctctgtcaccaaggctgaagtgcagtggcacaatcttggctcactgcaacctccacctcccgggttcaagcaattctcctgcctcagcctcctaagtagctgggattacaggcgtcagccataacacctagcaattttttgtatttttagtagagatggagtttcaccatgttgtccaggctggtcttgaactcctgaccccctaccttggtctcccaaagtgctgggattataggtgtgagacacaatgcccagcctgttaataatcttttaaaaatattattattatttttttgtaagtgtacctctatgtggttcctttacttagaaatcctggaagactccctgctgaccatgtaccaccatctaagcccttcaactgggcaagccaaggccctgcaaagtcaggcttggatcatctttccaggctcaccttctatggccacccccctccaatccagctacagcaggcttctgctttcctgctcctgtgcccttcctcaggcctaccctgcactgggctgcccttcgctgatccagaagtcttactatgaggttttggtccagctcaaatgccagtccacccatcacattttcttccctgcctactccctgcagaactattacattgtattcaatgtgttggtttggttcttctgttagattgagaacttaaaaaatgaggtcttattcctctttgtgtccctggtgcttagtccaagctctcactcttgtgggcctcacactttgtacctcagtctctgccttccgggctcaagtgatcctcccacctcagcctccctacctataggcatgcacctaattttttgtagaaatgttttttttgagatggagtctcactctgtcacccaggctggagtgcagtgctgcgatgctggctcactgcatcctccacctcccgggttcatgcaattctcctgcctcagcctcccaagtagctgggattacaggcatgtgccaccacgcctagctaatttttgtatttttttagtagtgatggggttttgccatgttggccaggctggtctcgaactcctgaccttaggtgatccacccgccttggcctcccaaagtactaagattacaggcatgagccaccgtgcccagccagatctgttttgttgttgttgttgttgtttgtttgtttgttttaagacagagttttgctgttgttgcccaggctggagtacaatggcacaatctcagctacaggtgcccaccgccatgcctggctaatttttgtatttttagtagagacagagtttcaccatgttggtcaggttggtggtcttaaactccctacctcaggtgatccacccagctcagcctcctgaagtgttgggattacaggmgtgagccactgcgcccagcaagatggggttttaccgtgttgcccaagctggtcttgaattcctgggctcaagtgattcacccgtcttggcctcccaaaatgctgggattacaggtgtgagccaccacacccagccttcatacatttttatcaaataaatcatgacgggtgaacctctactaattttacctaaacctgcagggtttctggatgtcctagtgatggtcaaggacttcacgttgaagcactgcttcccaagtcataggcctaagaaactccctttgtggatgacgcagctgcttatgtaacacatgcccagggagctctgcttcccctccactgtgctgcaggtattcctggactaggtttgccagagaaagcccttgagagccttgacaaaaacgaatggaggggacagcagattagttacaaggccctacctgcaaagcttgagccatgggacttatcagcagggtcctggcacatacatgaggccagcgtgagcagcctgagtgagcagtgtgggttcagacctgcagagacagctgccaccctcacccaatgctccacatgggaaggaggctcagggctctatctgacacttcaaaatgaagatagattttatgataactgtcccaagttttaattgttggttccttacatgctgttcttattcgaaagaacaacaaatcctcatgtggccaatgggtgctcccagttgggccctcaaagccatgggaaaagtctctgttactatgtggacagcacagtgcatggtttaagagcactgactgtggagttattcagaccaggttttaataatacacactttgtgaacttaggtaagttcttaacctctctgagccttatttcaactataaaatgggataaagatatagcagctgcattagagaatggtttgaagactagaggaaacctgtacctggtacactgtaagccttagctcaagagatgcgagttacccagaggagccactgaccaatgccatgcttctccatgagggcaatgaggtcggcctcggtgagcagcttgggtgggctggtctccccrtccaccatctccacggtgctgggctgaaagtgggatccttgctcatagacagggaggatctacagggagmggcaggtgcaacagtcagrtgattccatcagcacactcaggcaaaaaataacctcatttcaaggaacatgatcctgctccactagagaactcagggctcacaacacaactgtcctccctctcactggggaccactctttattaccttgtcactccagtgatcatatggatacacatccagatagtttcgggccagaatcatgaggccatgggccacaaagcgttcctgagcgatgtygatctccactgtggtctcctgcccctgagcatcctgggagcagcaagccaggaaatggcgaacaataaactcgtacagtcgctgttcatctccctaggaagaaaagaggagtaygaaactccccctagaatatcacctctcaaggacaggagcatcactggtagccttagcctaatgtcctgcacagaagaggccacactgctcctcaggccctgcactaacatggagtgccaggcaaacaagtcctggggagaggatgggtttaggttgacacatctcacaactcaaatctggcaaagataagcaaaggagtcatcttcccttccagactgggaagtggttctttgatgtaaacgcaatctaagcagaaaacaagatgaaagcgtaagaagttagcaagacactcctcaaatacaagagacagcaacattgcacctggtggccttagcccaacttcatgcacacatttaagcagtaattttcagggtaattttcaattaggtaatcaatgatttagtgagcctcagtctatcaaaagcccatgagacatttatacacatatccaataattccccttctaaggatttcttcaaaggaaataactggagaaccacaaaaatatttatgtctacaaatgttaactatagtatcaaaaacacacaaaaaacagatttggcaaaataaattatggcacatctttgtaattgttaaatatcatgcttaataggcaattttacccccttataaacttttgtatttcttaatttgtctaaaatgaacatgtaatttttttttttccgagacagagtctcactctgtcgccaggctggagtgcagtggtgcaatctcggcttattgcaacctccgcctcctgggttcaagcgattctcctgcctcagcctcctgagagttgggactacaggcacatgccaccccgtccaactaatttttctatttctagtagagatggggtttcaccatgttggccaagatggtctcaatttcctgacctcgtgatcyacccgccttgtcctcccamagtgttgggattacaagcataagccaccgcgtccggccatatttttaaaatcagaaagaatgtattttattaaaagaaggaggagaagaacaaaagactaagatttccccagctttgtgagaagcctacagatgtaaacaagcatttccccaactytgtgagaagcctacagatgtaaacaagcctaatggctcctgtgcctgcagagcctgcccctggctgaggaaatgactgagacagacaagcagagctgtgtgggaaactgcagtgacagggggtggcacgactggggtggcagcaaagtttcaggaggcaaccaaaactgagccagccttgggaggatggatagaattctctagttccagggactgggaaggccacaaggctcacagtggaggtgggggtctgcacaggggttgcctatgaaggactagcagggaagcagcaggagctgatggagagtgggatgtggagctggattaagacgggggcccaccacggggagggatgaggcggtctttatcaaagccaggcagaggattgtgaaatgagagagatctcaaaatcacttgtttttacaatcacagcccacagagtaaattcaaaccttactactgacccccagcacttccctatgggttccagcaggcagtacattcagggaaaccaacctgtaagttgttggtgtatttggtggggtgaatgggagggtgagcttggtcagacttgttcccattgcgtggggtgggaccaccccgctctagaatgctctgggcaaaggccccccagcgtggatcgggggtctgctgttccaccaacaccgtcaggtttaagtctctgggaaaaatgtttgtttctgttcggggatagctgatgtacctaaaaccaaggcaaacaaacagaaaaagaaattgctaggctctctgattggtctataaacaactgaaagcacacactaacacctgcaaacactcatctgatgtagccaactcaactgaaggcagcctacattacctgcttcagaaaagttctgagatgagatgcaccccctcatgggatgaaaagcagctggctctcctgctagcacactcaaagaagccaaaaggggcagcacagcacaggaaaaaggccagcagcctcatagcctggggcttgtcactggccactctgagggtcagtctgacagaccagccctgatgcagcacatgagactcactgaccctgacaagttccaccagcgtgtgcttcaagacttttcttagagtacacaaagaacaatgctgtccgataaactgtaatgtggactctatttgttttttctttttcatttttgagatagtcttgctgtggcacccaggctggagtgtagcagcgcaagcttggctcactgtggcctccgtctcccaagctaaagtgatcctcctgcctcagcctcctgaatagctgggactacaagtgtgtggcaccatgcctggctaatttttttttttttttgtagagacagggttttgtcatgttgctcaggtcggtcttgaactcctgagctcaagtgatcctcctgcctaggcctcccaaagtgctcagatttcaggtgtgacccaacatacccagtctctatttgtaatttttgtttccccccaagagacggagtcttgctgtgtcacccaggctggagtgcagtggcgtgatctcagctcagtacaacctctgcctcccgggttcaagcaattctcttgcctcagcctcctaagtagctgggattacaggtgcctgccaccacacctggctaatttttgtatttttagtagagatggggtttcaccatgttggccaggctggtctcgaactcctgacctcatgatccacccacctcggcctcccaaagtgctaggattacaggcgtgagccaccacgcccagcataatttaaaattttcaattagtcacttaagttactgagattacattctatttcatagaagtcttcaaaacccaatgtatattttacatctatagcgcatcccaatttggacaacttgaatttcaactgctcaatagctgcaggctggacagcacagttagaggacctcagtgctggggtgtatatgactggggcggggaggagtttcacaggcaaacaacttttaaaggtgccacccactgtctgccacttgccagggccacagggagatggctgaggagtcaaaagtaagatctgaatctactctatgggtttttacatagaaacaccttttctgtatcagaaaagagaagtcaaagtcaaaatcctacctcagagcttgggtgctatctagacaatcagtttttccccataaactcttatttctttatttctttctttttccttttttttttgagatggagtctcrctcactcaccaggctggagtgcagcggtgtgatctcacctcactgcaacctccgcctcctgggttcaaacggttctcctgcctcagcctccccagtagctgggactacaggcgcacgccaccacgtccagctaatttttgtatttttaatacagatgggatttcaccatgttggccaggatggtcttgatctcttgacctcgtgatctgccygcctcagccacccaaagtgatgggattacaggtgtgagccaccgtgcccaacccataaactctrtttctcaaatatttcatcctgataaagacggttcaaattctactcccaaacccaaaatacttacccttgagtgtagagcttctcagcaatcctcatggtttctttagcatttattctcaactttcgagaagccagcttctcaagctcctgtgaaatgggtcaacaggcatgttaggtgtactgcatgggtcaggcagcacaactcaaatacacaactcatcttcagtcaaatctggcccgtgtcactccaggtgcttctgtcaaacagagctgaaaaggctgcccaacaacgatttctgggcctgccaagcagagtcagatcctagcctagtggttctcagactttaatgtgtgcaggactcaactgggaagccagcagatttggggccctgaccactggggaaggtgctatgttgcgcaggctgatcttgaactcctggcctcaagcaatcctcccgccttggcctcccaaaatgctaggatcacaagcgtgagctaccatatccagcccaaactccacatttttttttttgagacggagtctcgccctgtcgcctaggctggagtgcagtagcatgatctcggcccactgcaacctccacttcctgggttcaagtgattctcctgcttcagcctcccaagtagctgagattacatcaccaccatgcttggcaaatttttgtatttttagtagagatggggttttgccatgctggcctggctggtctcgaacacctgacctcaggtgatctgcccgcctcggcctcccaaagtgctgggattacagaagtgagccaccacgtctggccaaaactctgcattttaaaaatttttttattttcgagacagtctcgctcttgttgcccagactgcagggcagtggcacgatctcggctcactgcaacctctgcctcctgggttcatgcgattctcctgcctcagcctcctgagtagctgggactacaggtgctcaccatggctggctaattcttgtgttttcagtagagacggggttttgccatgttggccaggctggtctcaaattcctgacctcaggtgatctgcctgccttggcctcccaaagtgctgtgattacaggcgtgagccacygcgtstggcccagaaatctacattttttttttttttcacatggagtcttgctctgtcatccaggctggagtgcagtggcgtgatctcggctcactgtaagctctgcctcctgggttcacgccaattctcctgcctcagcctcccgagtagctgggactacaggcacctgccaccacgcctggctgattttttctatttttagtagagacagggtttcaccatgttagccaggatggtctcgatctcctacctcgtgatctgcccgcctcagcctcccaaagtgctgagattacaggcgtgagccactgcgcccggcccgaaatctacattttttaacaagcagtctaatacactgctttaacacagacagtctgagaaccacactttgggaataccacccaagccccagtaaattctcctggagggtgaaaataatgagctgttcttttccctaggtgacaagctaacaatgctgatgactatacgtcacactacagcacacttaaccagggaggactaaaacacatatgcctactatataaaatcaatgcagctgggcacggtgggtcatgcctctaatcccagcactttgggaggccgaggcgggcggatcacaagttcaatagattgagactaccctggccaacatggtgaaaccccatctctactaaaaatacaaaaattagctgggtgtggtggcgckcacctatagtcccagctactcaggaggctgaggcaggagactcgcttgagcccgggagacggaggttgcagtgaaccaagatcacgccactgcactccagcctggcgacagagcaagactctgtctcaaaaaacaaacaaacaaacaaacaaaatgcataacttcccccatgcaatccctccacacatatacacatttattgtggcttgaccaagacaaaagaacgcactgaccaccagtccctgtgtgcttcttagcctccatgcttgttagcctgagtgttctgtatgtccaacctccagagtgaattctaatagtaattctatcccaaattttcctgctaagtggtgactgagaaggcatactcctaatgtgatttactcagacttatgttctgtcagggtggctctttctggggtcaaataatttgagaagccctgttctaaagtaggttcatatagcagattatttaaagcaatatttatacagattatacagcaacatgaaaaaaatgcttgggtggaaaagctactctaattataatgctgtaaaaatatgcatattaaaaaacaggaagagatactagtaattatgtaaggatggtgaagccataggttgtcttcctctttttgtttcccaaacctcatacaatgcagttatattgcatttgttaacaaaaacaacaaaaaaaaggccaggcgcggtggctcacgcctctaatcccagcactttgggaggctgaggtgggcagatcacctgaggtcagaagttcgagaccagcctgaccaacatggagaaaccctgtctctactacaaacacaaaattagccaggcatggtggtgcatgcctataatcccagctacttgggaggctgaggcaggagaatcacttgaacccgggaggcagaagttgtggtgagctgagaccgcaccattgcactccagcctaggcaacaagagcgaaactgcgccctgtccctgtccctgtccckstccctctccccacggtctccctctccctctctccacggtctccctctgatgccgagctgaagctggacggtactgctgcctgattctcctgcctcagcctgcggactgcctgcgattgcaggcgcgcgccgccacacctgactggttttcgtatttttttggtggagacggggtttcgctgtgttggctgggctggtctccagctcctaaccgcgagtgatccgccagcctcggcatcctgaggtgccgggattgcagacggagtctcgttcactccgtgctcaatggtgcccaggctggagtgcagtggcgtgatctcggctcgctacaaccttcacctcccagcagcctgccttggcctcccaaagtgccgagattgcagcctctgcccggccgccaccccatctgggaagtgaggagcgtctctgcccagccgcccatcgtctgggatgtgaggagcccctctgcctggctgcccagtctggaaagtgaggagcgtctctgcccggccgccatcccatctaggaagtgaggagcgcctcttcccggccgccatcccatctgggaagtgaggagcgtctctgcccggccgcccatcgtctgagatgtggggagcacctctgccctgccgccccgtctgggatgtgaggagcgtctctgcccggccgccccgtctgagaggtgaggagaccctctgcctggcaaccaccccgtctgagaagtgaggagcccctccgcccggcaaccgccccgtctgagaagtgaggagcccctccgcccagcagccgcgccgtctgagaagtgagaagcccctccgcccagcagccaccccgtctgggaagtgaggagcgtctctgcccagcagccacctcgtccggcagggaggtgggagggtcagccccccgcccggccagccgccccatccgggagggaggtgggggggtcagccccccacccggccagcctccccgtccgggagggaggtgggggggtcagccccccgcccggccagccgccccgtccgggaggtgaggggcgcctctgcccggctgcccctactgggaagtgaggakcccctctgcccggccaccaccctgtctgggaggtgtacccaacagctcattgagaacgggccatgatgacaatggaggttttgtggaatagaaaggggggaagggtggggaaaagattgagaaatcggatggttgccgtgtctgtgtagaaagaggtagacgtgggagacttttcattttgttctgtactaagaaaaattmttctgccttgggatcctgttgatctgtgaccttacccccaaccctgtgctatctgaaacatgtgctgtatccactcagggttgaatgaattaagggcagtgcaagatgtgctttgttaaacagatgcttgaaggcagcatgctccttaagagtcatcaccactccctaatctcaagtacccagggacacaaacactgcggaaggccgcagggtcctctgcctaggaaaaccagagacctttgttcacttgtttatctgctgaccttccctccactattgtcctgtgaccctgccaaatccccctctgtgagraacacccaagaatgatcaattaaaaaaaataaaaataaaattaaaattaaaaaaaaaaaagagcaaaactccatctcaaaaaataaaaaataaaaaataacaggccaagcagtggttgggtgtggtggcttatgcctgtaatcccagtactttgggaggctggggctggagaatcacttgaggccagaagcttgagactagcctagtcaacatagtgagattccatctctaccaaaaaattttaaaaataattagctggtcatagtggtacatgactatagtcccagctacttgggaggctgaggtgggaagatctcttgagcccagaagtttgagtctacaaaaacaaaataaacaaaaaaacaaacagtgaggctaagcaggaccgtgtctttctccagtgttttcttgtgtggcctggtgatgggtgatattttcttccaccaagccacagtctaggcggtagaaccacagcctcaaaacagtaagtgttccccgagtgcctgaaacagcctgtctggaacataccacagtgtccaaggcttgaggccgccacttgctcttgggcttagatctgacctctaccacagttgccatgggatcctagaaagccaggaaagaaaagaccatgttaacctgttagtgcatcatctccatccttcctatggatagcccatgccaatccttctagatcacactgaccaccgccagctaagcccgcagtgacagcctagaagagtgccccacttaatgtcgcttgtagctgacagtatggtagacaccatcactactttcccactcaaaccaagattgtgaagggcaatttcacaagccttaaggtgcttccaccagagcctatgaaatccaacagcctatgcatcacctgagtacagttttctatgtacacgtgcacagtgctctttctgttgttgttttctttaaaatacagagatggggtcttgctatgttgcccaggctggcccagaagtcctgggctcaagcaatactcccataagccaccatgcttggcccagtgctcctttaaaaaaaaaattcaggataatacagttagaaataggagaaattgctgggcacagtggctcacgcctgtaatcccaccactttgggaggccgaggcgggcggattacaaggtcgagagctagaccatcctggccaacatggtgaaaatccatctctactaaaaatacaaaaattagctgggcgtggtggtgcacgcctgtagttccagctactggggaggctgaggcaggagaatcgcttgaacccgggaggtagaggttgcagtgagctgagatcgtgccattgcactccagcctggcaaatgagctagactttgtctcgggggagaaaaaaaaaagaaataggagaaattgtacaagttggagacctttaatcttaaaaccagcttcatagtttacatcacccaccacgtagtcccgcaccacatccgagtgaaggagaaacagggcaggtctttttattacttacttttatattttattattatttgattttttttttgaggcagtatctcgttctgtcactcaggctgaagtgcagtggcataatcatggctcactgcagcctcaatctgctgggctcaagcgattctcccacctcagcctcccaagtagatggaactatatgcaggtaccaccacgcccagctaatttttcttttttagaaagatggggtttcactatgaaacccaggctggtggtctttttatttaacaaataattgtacagtgtcacagagactcccagtggtccagggtcaaagggtggagtgagagagagatggagaaggcagcatggtctgcagaaggggcagggacacactaggactctgccatgtacagctctcacgtgtctgtgggttaagtctcttcactttctttagcttcctcatctggaaaatgtggatgctatcactgccttcagaggcattattaggattaaacaaaacaacacataacgaagtgtacctggtccatagcgggtgctgcacagttatcacatccctttgcctaattagtaacaaatctgccagtgggctacagccaagaagcacaccatgaattaagcctagagagctcggaattttacttaagcatgactctgtgcagcccctgggttaaaccaggctgttatgtgctaataggaagtggcatcagaaagtaaacaatcagcccaagggccaggaaacattagggtgggtcccaactctgccaccaactggcctatgacccgggccagtcttgctcccttctatgacacatgcgtgtcccacccaccccgccagccctttccctaatctctccagcctctgctcaagtgttacccctcccctcactgtccctccggcctttctctatccctttaccttgctttattttcttcctagcttttatcactatataaaattagcccactaatttgtgactttcacttctctagatgtcctcatgtgaccaataaagagggggctgagccaaatgctgttcattctctcctagctctataagtcaatgacctggactggtctagataatccttgctaatttctggtgatagtatatgccccaagaggggatttcaactatacgtttcccaaaatttctgattttatctaaaaataatgtagatacttcccttttccttttagtgctgttctcatggggttcgtcttattggttcccaaaaagtgatcccctgagatgcaaacttaaagctaaagtccaatgggagaatgagacagatcacctctgccgacagtgggagtggtttgggaggtgtgcagaatgtttcctagatcattaggggttcttacctccacacacaactgatagagaactaggcaagccgtgtggttaaagagtcgatgccttttccagttgaattctacgataccatctttgtggtcatgagttactatattaaggagagacaaacagaaaggctgtgtctcagagacatgtcatgatatgacagatagaaaaaggtttattgtggtgaaagtcaaacgaatatcaaatagggaggagtttctggataacaaagggaactttaagtggattgtaatgggccagggaggatgacagcaagactaaaataaatcacatctttattagtgctattaatgctcacagtccccctccttaaccttgagcccataggtcccaggccataacacccactccaggccctacctttaattctgtggaagatttctggtacaaaagcctgaatggctttgaaccgctccaccacaaagcccagtgtggggaactggcagctgccgtaactgatgagctgctctgccagcacctcaggaaaaatcctctgaagccgcagggtctggaacctagtaaaggcagctcctggagagtgaaggaaggtgaaaatgatggataatgagagtccagggctggctgcacatatcgacacagagcccatttttggtcccataacacaacattaatgtggccatgggagaggtctgcctagctcctcaccaatcctcaggtccagctcctgcctcacatccacagcatcgctcaccctctgatcaggctcggtcaggttttcacaagctgtcctgacggcatggggtgtgatctcagagaatcgggctcgcaacacctgcagattgggctttactgcagaacacaaggtgttaccaaggtcaaagtcaaatcacactgccctccatcataaaggactcacttttcttaaagccccttgaaataaaggcaaaccagttcaagaagctgtgagatgaccaatttacctattaggttaaatcaatggtgtacagtgtctaaagaggaaacatcaccataacctttaaactgagtgtactgtcagaaatagtgatggagttaattttagctagtaactgtggggaaaagagagatcagatcgttactgtgtctagtagaaaaaggaagacataaagaaactccattttgatctgtactaagaaaaattgttctgctttgagatgctgttaataatctgtgacttgtcccaaccctgtgctcacaaaaacatgtgctgtattgactcaaggtttaaaggatttaggcctgtgcaggatgtgctttgttaaaaatgtgtttgcaggcagtacgctttgtgaaagtcatcgccattctccactctctattaaccagagacacaatgcactgtggaaggccgcagggacccctgcccaagaaagcctgggtattgtcaaggtttcccccgactgagacagcctgagatatggcctcgtgggaagggaaagacttacagccccccagcccgacactcgtaaagggtcagtgctgaggaggattagtgaaagagtaaggcctctatgcggttgagataagaaggcatctgtctcctgcacgtctctgggaatggaatgactcggtgtacaaccgaccatatattctattctgagataggagaaaaccaccttatggctggaggcgagacatcacggcggcaatactgctctgttactctttactgcactgagatgtttatgtaaaggtaaacataaatctagcctacgtgcacatccaggcacagcaccttcccttaaacttatttatgacacagtcttttgtttgttttcctgctgaccctctccccaccaacaccctatagtcacactgcattcccctccctgagatagtaaagatagtgattgataaatactgaggaactgagaccagcactggtgtaggtcttcacttgctgagcgccggtcccctgggcccacttttcttcccctttactttgtgtgtgtcttctttcttttctcagtctctcgtctccaccttgtgagaaatacccacaggtgtggaggggcaggccccctccaataactaaaatactaaaatgctcttggtgaacattttttttttggagacagtctcactctgtcacccaggctggagtgcagtggtgcaatctcggctcactgcaacctctgcttcctgggttcaagcaattctcctgccttggtctcctgagtagctgggactacaggcgcccgccaccacacctggctaatttttgtatttttagtagagacagggtttcaccatgttgaccaggctggtcttgaacacctgacctcaggagatccacctgcctcagcctcccaaagtgctgggattacaggcatgagccaccgtgcctggctgccttttgcaactttaatcttacttgctctctcaggccttttgagaaaagaaaaatattgtcaattaaagggttctgtaggggaatttcatgtcccttcagcaaagaatataggacatatacacactgtccttgaaagttaatgcacttaaatttccaggagtcattacagctttgaacacaaaaccactaaaggaaagtagcaaccccaccctctgagccagagaatggcctgttcatcactccctctaagttacccaaaaccattaacactgttagagcctttaaatccactgcaacaattatttattaatagtcgagcattgtataatatgagagattaaaaaagaaaacagaacattttataattattttttgtactttacttgtggtatattcattcttttatacatattcaatatgtaattttatttttctatttttgcttccattaaccaaatactaaaagaattcaatatataacaacaacaacaacaacaaaaagaatataaagtccctgttctcaaggagccgggtatctgcttgtatgcttgtacctaacaagaaatgagtcctgggctaaatggtttacaccactcattaactcatctaatctctgtggcagtcccaggaaacatgtcagattggcctgatgttagagacaaggaagttgaggctcccaatggctcagtgatttgctccaggacacatggctggtgggactcacagactgggagggagagtacctgcagaggaactcatccgtggcccatgtgca

SEQ ID NO: 97560 - DNA, 14712 bp, Homo sapiens
gtagccccagctactcggaaggctgaggtgggaggatcacctgagccaggggaagtttgtctcacgtgtccgtgtgaagagaccaccaaacaggctttgtgtgagcaacaaggctgtttatttcacctgggtgcaagtgggctgagtccgaaaagagagtcagcaaagaaagggtggtggattaatcattagttcttacaggttttgggataggcggtggagttaggagcaacgtttggcaggcagggagtggatctcacaaagtaccttctcaagggtggggagaattacaaagaacattcttaagggtggggcagattacaaagtacattgatcagttagggtggggcagaaacaaatcacaatggtggaatgtcatcagttaaggctattttcacttcttctgtggatcttcagttgcttcaggtgatctggatgtatacgtgcaggtcacaagggatatgatggcttagcttgggcttagaggccggacattgttgaggctacagtgagccatgatcctgccactgcactccagtctgggcaacagagtgagactctgtctcaaaacaaaaagcccatagcaagaagcaaaagttggagggttctcggctccatcccagggataaccagggcacaggcccaatgcttgcaagaggtgacttcagcttgtgaggaaagacaaggatctctttctcttttcccactctttcctccctaacattttaaatgcatgtgcaagtgcctacttcataccaggcactgggctgatccctggggactcagaggagagtcagaggaggtccctggtgccgccaagagggcagacagactgacagacattggcaagctatctgaggagatgtgatggaggtcccagtgccatgggaactggagacaggagctggtactgcctggaaagccaggaagtcttcccagggcaggggatgcttcagcagagtcatgctgagtcgcaggaacaagacaggtggaggtggatggtgcagtggtaggtgttccagcggagggaacagcaaggccaaaggcctggcatgttctaggaacatgtgacagccatgcccaccctgctgggaacagatggaggaggctggagaggccaccctggggagagggagtctgagctttcctccttagggtgagggggagccatggttcggagcaaaggagtgacatggtcacgatgactgtggtgtagtgggtggaactgactagacggacagccgtcatttggggcagtggaagataaaggtggtgtagtccattattggaactgggacaggggaggacagatgggaatggccccccgggctgctggaagagtggttgtggggactggctgtagggaatggggtagggaggatgggggtcagaggcatggggtggtccacagaggagaacagccatgcgggggaagatggtcaaggtggcagccactcccccaccatctggagctcactgcctggctctggcttctcctgggaccccagcagttccttccctacaagacagggctgggtgaccacaggaccggcccttcctccacccacacttgttcccagccccaaagacatcccaagtcccaggaggctttccaaaggtgctccaagctgcagtcgccaggagacccagcttgggctggggacaggcctcaggccgcatctcatgaacattttcctccaacggcactcagctgatgccagtgtggtcagatggcgacatctagaggcaacttctgcttcatgctgcctcactcacagaaccccacagccaaaggctccccactggtgttctcatcatgccaccctcaggatttagtaaccaagacaccagtcagagcttggaagagcttctccaccccttcatgccaaagcccagtacagggctggcaaggtccctgggaccccaagtgaaccgtggacactctccccttccacaggcccaggagcatgctggctggttgacaaccttccccacaccatcccttcactgcttcgtttcagaggaagggattctagcagctcagccaactctccgctcatacagcaatgtcctcacctccgcctcaccatccgggatcatcctgtgtccagggccctgagtgagaacacagaatggccctcacctttctgtagtgttcccctttttctgtttttgtttgtttgttttgtcttgttttgttttggagacaggaactcattctgtcacccaagctgcagtgcagtggtgcgatcatctctctttgcagccttgacctcccgggctcaagcgatcctcacacttcagcctcccaagtagctgggaccacaggcatgcactactacacctggctatgtagtgttctttttttggcgaattgttcatttccatccacccacacccaaagcccctctggtactggacactcctcaccaactttccttgcttttcacagccatgcagccactcactgtttgcctccttctctctcacctgctcctccctgaattgtctatccaccacaccatcagtcctcccatccttcctcactcattccacaggcagcctgtgcacccccagggcaggacaggggaccaggactgtagccacaggggtggggatgaggaggaggcaaacgaggaaacaagaatacccaaaagccctggtatcaacatgcagggaaagtgggggactgaggcaggactttctgctttgccccctccctacctctatgctgatgaagagccagccatgcctccagcccttcctgaggccaccacatgatcttgcttattttcccattccaggaggtcacctgcagggctcctcccacctagccacaatggctagtcccgctgcctccacagtggccctgcagccccatcccagacccactgcacggggtcacaagcttgtgcagggtggacagagcagtagctcatggcagacattccttctgttcatctgttgcagggaaaatggggtgaggcatgggaggggttcccagaatcccagaaaggcagaaggagttgagatctgagacagagtaggctttggagactccctccacagaccactctcccaggggctaggttaatgggcctgctttgggaagctggggcaggtgaatcacctgaggtcaggagttcgagaccagcctggccaacatggtgaaacctcatctctactaaaatacaaaaattagccaggtgtggctgcacatgcctgtagtcccagccactcgggaggctgaggcacaagaatcacttgaacccaggaggtggaagttgcagtgagccaagatcacgtcactacactccagcctgggtgacagagtgagactctgtctcaaaaaaagaaaaaatgaaaaaaaaaaaaaaaaaaagaaaaagaactggggctggacacggtggctcacatctgtaatcccagcactttgagagcctgaggcaggaggatcacttgaggccaggagttcaaggctgtagtgagccatgactgcaccactgcactccagcctgggcaatagagcaagaccctgctaaaaaaaaaaaaaatatatatatatacacatatatatcagaactggagcccaggcctccacagccccgctcccccactccaccctccctcccacttcctgccttgctcctcccagctagatgatttcccagatcaaggctgcttgctggtagagaaagtcaggggccaatggagcaaagatatttggacccacagacatcagtaaaggttcatccatcccagagagctgattggagcactggccaccaacaattcagaggatcactaagctggggaccatttaagggcatttagtagcatcaagtaaaatggaaacagaaactctagagatgggccaggcatggaggctcacacatggaatcctagcactttgggaggccgaggcaagagggtcgcttgaggccaagagtttgagaccagcctggatgacatggcaaaaccccatctctacaaaatacaaaaaaaattagctgggcatggtggcacatacttgtagtttcagctattctggaggctgaggtgggaggatggtttgagcccaggaggcagaggttgcagtaagaagatatcatgccattgcactccagcctgggtgacagagccagatcctatctcaaaaaaaacgaataaacaaacaaacctatagagatgaaaggcaaaaaataagtctataagtttaattcctccccgctctatttaaagagctcaaacagctcaatttaaaaattttaattctggccagatgcggtggctcaagcctgtaatcccagcactttgggaggctgaggtggcagatcacctgaggtcaggagtttgagaccagcctgaccaacatggagaaaccccatctctactaaaaattagccaggcatggtggcgcatacctgtaatccgagctactcaggaggctgaggcaggagaatcgcttgaacccgggagacggaggttgtggtgagctgagatcgtgccattgcactccaccctgagcaagaagagcaaaattccatctcaaaaaaaaaaaaaaaatttaattctccctgtgttccctttatcatgttctaaaatgatgggacattggcatgtgtataagttaaatatatgtagctttactcataagagcgaaagcattatcagagtccacagagctattttattattactactattattattattattattatttattatttttgagactgagtctcgctctgtcgcccaggctggagtgcagtggcatcatctcagctcactacaacctctgcctcgtgggttcaagcaattcttctgccttagcctcccaagtagctggaattacagttgtgtgccaccacacccatttaatttttgtatttttagcagagacagggtttcaccatgttatcctggctgctctcgaacttctgacctcaggtgatctgctcaccttggcctctcaaagtgctgggattacaggcatgagccacagcacccagtcttattttattattattatttttgagacaaggtctcgcttggccgcacaggctgaagtggagtggtacaatcatggctcactgaagactccacctcctgggctcaagcaaccttcccatctcagtcccccaagtagctgggactacaggaacacaccaccttgcctggctaatttttatttttatttttgtagagatggggggggcggttctcactatgttgcccgggctggtctcgaactcctgggcttaggcaatcctcccaccttggccccccaaagtgctgggattacaggtgtgagccaccacactctgcccataaaactatgctattatcagcaataaccccccaaaagccttctagcttcctttcagtaccaccaacctctcctcccagccccactcattccaggccaaaattgtgcaaaaaactgtacataattctcccttcctgaaagcccagtattgggactttggacttggttcaaatcctggccctaccgctgtgtcgtgggtgtttttcaacctctgggcatcaatttgatcttgctgaaaaggagggttggctgggcatgatggcatgagccactgcacccttccacttctgcccacttctctcttccggggcgagggggtaatgtgccaagttggttttaatgtctcaagttaaatagtatgaaattctggcaggctttggccctgagtgtgtggagaccctcacaacaaaagccttcacttctttcaggtctccacacacacggtcaacactaaatgaggatttcctgggcaacagccaccaaacctttgcagagcagcatacttctcttttgggtggactcttgaacagcctaaaatcttccacggtcagataaaggtggtgaaacaaaggttggcctaatctagtaccttaaggactgaaaaaaaaaattaggattcaaaccaaaagaaactaaatttcattttgtttctttcatttccaagttttaattaaatatctctaatggttagaaaatcaatgtcaaatacgaacattggtatacagcttaaaatacawatgtcagcaattattaaagaacatgattaatcattgttccaagtaaatgctagatcattatttcccaggaggcaagttaagcatcaggtgcctgaggggtaagggacagggcttcagtcggctctgatagctgcatggctgtcccaatgagctttccactcaratagtgccaggggcagctctcatcacaggctggctcactggcctttatccccagctccaaggaaacaccagggctttttctgccatgagaatcgtgtttcagagtcaaatgatccactttaagatgaaatttggacagctcagttccagaatattctagtttaacctgggaagttaagacttcccaaaggctgaagataggctactaggggctgatggacaagagtcaggccagagtcactctaaacacatctttgttttgttctgtataattaattatactgtatcttctttaagtaactcaagttcaagctctctatatttcacttatgtttaaaagatgccaatttgattgtgtctaaactgaactttacccagtgtgctgaatactaaagaccttttaggccaaaggaaaaagatgtttatatattaacatacctcaaagtttacattttcattataataaattagccttaatgttaacaaataacatctcagaaagctgaatctaagtagcctgatctatcatgctaatttgagtttgttttttgtttttgtttttttgagatggagtttcgctcatgttgcccaggctggagtgcaatggcacaatctcagctcactgcaacctctgccttctgggttcaagggattctcctgcctcagcctcacaagtagctgggattacaggcatgcgccactattccaggctaatttttgtatttttagtagagatggagttttaccatgttggtcaggctggtctcaaactcctgacctcaggtaatccacccactttggcctccgaaagtgctgggatcacaggcatgagccaccgtgcacagccgacttttttttttttttttttaattcaaactttttttttagacacagtctcactctgtcactcagtctggagtgcaatggcacgatcacagctcactctggcctagacctcctgggctcaagagatcctctcatttcagccytccaagcagctgagactacaggcatgtgccacacctggctatttttttttttttttgtagaggcaagatctatgttgcccaggctggtctcatactgtactcaagtgagtcttctgtcttggaatcccaaagtgctgggattacaggtgtgggccactgtgcctagccacgaatttgaatttagaatactatcttatctatccatttttaccaagccccagaatcaagagagatgcagttatatattttttaaaaatctggtgaggtgtggtggctcatgcctgtaatgctagcactttgggaagctgaggtgggaggatcacttgagctcaggagttcgcagcctggccaacatggtgaaactctgtctctactaaaaatacaaaaaattagcggtgtgtggtggtgcatgcctgtaatcccagctactctgtggcagaggcacgagagtcacttcaatctgggaggcagacgttgcagtgagctgagactgtgtcactgcacttcagcctgggcgactgagtgagactgtctcaaaaaaaagaaagaaaataaatctaaattatgccaatattatcaaagtttcttacctaaaatcatatacaattttaagcaccaaagcatactttcttcaaaagttacatccaaaatattaaatgttcaatctcatttttcagttcattttaagtctcaatactgaaatctccgtataaaaggaataataaatgctttgaaagacctgacaattaccactaaactcctctcaaatcccagtgtcctggggcagtagcccatgtgcttcaagaagtccaatgacagcaggatagtggtcagggagacaggagtttaatcaggaggtgctccccagaatgttcatggaaagaacagatgattcacagtggaaaaaaagcaaatgataaataagcctttcttctttctcaatattactaactagaaagcaggaaaatctattaggcagagaaaaaccagatatgcctggagatacaggtaaggagtctgtgttctctcagctgtctcacaggttaatgaatcagatatatttatgacccatgctaggctccaaagtaagattcaggtactctgtatgccagtaaaggcttcaaggatactccagggtttagctagtataaagaataaaggacaaagaaaatgccagacaaccagcctgagcaacatagcaagatcatgttttcaccaaaaaaagtttttttaattatctgggcctgatggttcatgcctgtagacccagctacttgggaggctaaaaggggagggaacattggagtccaggagtttgacagtgagttataatgatgccactgcactccagcatgggcgacaaagcaagaccttgtctcaaaaaacaacaaaaagtaaacgtcagatagaatcctcaattttagcaacaaaccctcatgctagcagaatggaagtgatttacattttatttttgattcaagatctaggagataggctgggtgcggtggctcatgcctatcatcccagcaccttgggaggccgaggtgggcagattgcttgagtctaggagtttgagaccagcctgggcaacatggcaaaaccctgtctctacaaaaaattaaaaaaattagccaggcatggtggtgcatagtcccagctactcgggaggctgaggcaggaggatcgtttgagcctgggctgcagaggttgcagtgagccaagatcatgccattgcactccagcctggctacagggagaccctgtcaagaaggaaagaaagaaagaaagagagagagaggaaggaaggaaggaaggaaggaaggaaggaaggaaggaaggaaggaaggaaggaaggacggacggactaagagataagatggattttttttttttttttttgagacagagtttcactcttgttgcccaggctggagtgcaatggtgcgatcttggctcaccgcaacctccgcctcccgggttcaagtgattttcctgcctcagcctcccgagtagctgggattacaggcatgcaccaccacacctggctaattttgtatttttagtagagatggagtttctccatgttggtcaggctggtctcgaattcccgacctcaggtgatccatccgcctcggcctcccacagtgctgggattacaggcgtaaactactgcacccagccaagaaggaatattaatggtttcagaataaaaggatcaaggcttaaatattcaaaagataatttcttagatgaaaacacatgactaaacagttgcactgaaaaatgtacaaagaaacaccaccaaattagaagtatcccaacatttgactgaatgtcagctgggacatagacaaaaaacaggaaaccaaacctagctatttgtttttcttttcagtaggtggcataaaggggtaagatgagaaaagggatcaacaaatgtagttcaacttaattgaagaattctgcctgacgtagtagaggcaaataaaattgttggttttgtgggattatatttgtttccatttagggacacatttcctgttgtttaaatgccacagcaactcatgagatgaaattcatctccaaaatggatccacataactgaatttccaagtaaatacaaagagtctacagcccacagaaaccattacaaattacacttttatttttgccccaactcctatactaaatatggtctaattcctgaggactagcaatggtggtttatcccacagtcttggggcaagcgtcccatctgataagtctcactcctccctcctgcccaccacctctcaggaaaggattcagagaaacttggttagaaactgttgtccttaagcctttgtgttttcacctctccagatagaggttgaatcttaagtccacaatccgctaaattaacctgtcctgtctaaacgtctatcaccacaactaccacatgcaatcacattttctcctttcctgcagccataggaagcaggaacatgtgaaagattctttcagacaatattttgcagttggcaggtgcagggtgaatgaggggttcagcatagcagaggtagaaggattgtgtggaattgacagaagaatgtttgagaggtataatcagaaagcttaaatgctgtgaatcaacccccaaaggctcagcccaggaggaaattttactaatgcaggaaaggtcaggagttaaggcatagactagttacctcctagcatggctcaaagtttctggaatgggactcagtagagggcacaaaaagctgcaccagtaagttcagctggtccagaggcatagatcctatcagctgaaaaccaaaacaagtcattccaagcatgcttacagtaggcgtgtttgcaagtttaaggattcagttttaaaataaacgaaaacagaactagaatgtagtattacaaaatttctcacaagcataatcacaaaaaaaaaagttaggatattgcatagaaaagggtcctgtagtatgctttgtaaacctagaccttagtaatttaaataaaagacaaacaaataaaatatctcttcatagtctacaagtccatgattgtgaattcaggagaattatcaaatttgcagatttttgtggcaagacctaagaagctcctgaagttctttattctcagaatcatgattaaatttaccctttgaaggctcaggctgacacagtttaacaacatctttatcaaatgactggggctacacaagcccaagccaattctatagactttatgctctgtcctctctgcatataagacttaatcagaacatacagggacatgaaatcactgctatttcactgttttttaaagctaggctgtttgtttttttcctcctgttagtctatttagcaaattaaatctgcctgcgcttttaatagtaaggtttggatagctagtttaggagtaagtgaaacattttagaagagcatttatgttaaccttgacaataggatgggagattcttaaccccccttgtaatatgcaccgattgattctgagttaaaatacaccacagtgacagtgatatcatccctgtacatcctcgccaagtcctctggcaatgtcagcatcgccgccagccgctctgcctccatctccccatactcattgttcccgatggcatgtctgatcagccgcgtggctgcattttggtcagcctcgtggagcccgctggctttcctctgcagcagcaggctctgcatgagccccaagttggcgggtctctgggccaggtctgtcttgtgccaatctgcctcagccaggtgccccaccaccagccttaccacgtcctcattgctcagcatgtcccacaggccatctgaggccagcacaaggaacttatcctggggcctcagcctgtggtatgtgacctcaggctcagcagtcaggtagggtggagtgtagtagtgtgggggtgtgaactggtaaatgttgagggcctcggtattgaagcccctctccagaatgctgcgctgcaactctttactccacttcagctgaacatccccaaaggccctgcaggggatgaggacgcccagtagcctgtcctccatgatgatcgtcctgtcctctgactcagggtgctccctctttagccgggacagctcggcctggttccaggcattgtggtcacgtgtaaggggcagacaagaccacatgccattgtcctcttggacaccaaggatggctcggcagtcaccagcatttgccacgtgcaagtgaattccatcaacatgggccatgcaagctgttgccccagagaaagcaacctggagtgacaggttccttgtcacctcatcttccaggggggcctggatttccagcgagatgtcagaatccagtctctggaaggagtacattaatgcttcttcaatgcttagtcccatttccatgtgcaaatcaagcagttcctgccaatagacacggaggtggtcaagatgcacagatgtgacatccttgtagatactgtcccctgggtgcttgagccaatgcaggatgggcagcaagggtttcatgctttccatagctccctccatgtgctccagggtctggtgggacatcagggacactgccacatagtagaagagcctctcgctcactgcttgggcacatgcatgaccaccatgtccatcgaagatgccaaacatcagtccattggtttgcaggcaggaggctacacctcgccggtcctccactggggaattggcagccagctggttgctctcaaaccgcaacactgaatttgggactctgctttcaaggtcaagaatcttgtgggttgtctcgccagctcgaagcacttcatttatctgctcagggctgagttgcaagtgaaaatcatcttcctctgttgatgtgtgtctgtaggctttgcacagagtaaagccaccacatggggaactgtttagggtgggtggcacccgggaaaagagcctccattttaatttattcctatttgagacatacctggagtataagcgtctacccccttgcaatgtggcaatgctgttccttgtagaatttaagatccagtaggacacagtacttgacattctgaaactataccagcaaatgtgttccttcagcaaaaaaggatatttttaaacctaaaaattaaaaagttgaagtttcaaatttaatttcttttttttttttttttttttgagacgtagtctcgctctgccgcccaggctggagtgcagtggtgtgatctctgctcactgcaagctccgcctcccaggttcatgccattctcctacctcagactctggagtagctgggactacaggcgcccgccaccacacctggccaattttttgtatgtttagtagagacagggtttcaccatgttagccaggatggtctcgatctcctgaccttgtgatccacctgcctcggcctcccaaagtgctgggattacaggcgtgagccaaagcacccagccacaaatttaatttcttaaaaatactgacttctgaaaacatttgctaatatcctgaacaaaaatgacttagaataaactatttaaaatacactaaactcactctcaccagcagactataagtgttcatttaaatatctgcttcgggggccaggcctggtggctcatgcctgtaatcctagcactttgggaggccaaggtgggtggatagcttgagcccaggagttcgagactagcctgggcaacatggtgaaaccctgtctctccaaaaaaataaaaaaaataaaaaaattgccaggcatggtggtgtgtatctatagtcacagctacttgggaggctgaggtaggagaatcatctgagcctggtaagttgaggctgcagaaagcagtgattgtgccactgcagtctagcctgggcctcactagagagggagtgagaccctgtctcaaagaaaacaaaaacaggcctgacgcggtggctcacgcctgtaatcccagcactttgggaggccgaggtgggctgatcacgagttcaggagatcgagaccatcctggctaacacagtgaaaccccgtctctactaaaaatacaaaaatttagctgggtgcagtgatgggcgcctgtagtcccagctactcaggaggctgaggcaggagaatggcgtgaacccaggaggcagagtttgcagtgagccaagattgcaccactgcactccagcctgggcgagagcgaaactccgtctcaaaaataaataaataaataaataatctgcttcgggcatagtggctcatacctgtaaccactccaaaggctgaggcgggaggatcacttgagcctaggagttccaagaccagcctgggcaacataaggagacctggtttctacaaaaaatttttttacaaattagttgggcatggtggcgcacacctatagccccattcacttgtaaggctgaggtgagaggattgcttaagccctggaggtcaagactgcaatgagctgtgctcctgccactgcactccagcctgggcaacagagcaagaccctgtctcaaaaactaaattttatatacatgtatatttccccactagtctataaactccatgactcaagcaactatggctgccttactcaccaacagctttccagtgcctggccctgtacccggcacacactaagtcctcaaatactggctaaatatgacattttcagaggcccaatagcacactagctgtgatactatcttgtgtagcatcagacacactgctgatgaggtaacactccagttatctattggtggaatgggaatattagtcttagaaggttttgtgagaatttaataaaatatgacgcttctgctaaaaaaaaaaaagtagctattattttcatcattaggtatatacccctctaagtcattctgggtattttttgtttggtttttttttgttttgttttgtttttgagatggagcctggctctgtccccaggctagagtgcaatggtaagatcgtggctcactgcagccttgcccttctg

SEQ ID NO: 97561 - DNA, 13437 bp, Homo sapiens
aacacactcctagaaccaccctcgtcatgtcccttttcctctccaagacttagctgaccgatcactgaaaggaggcaacagaaatactgtctttcgagttagtcgatgtttctttgaatgatatttcttggtgtagttgatggtgtgtggcgagatgggcatgtgttagttcaacctttctcaaaagtaaagtaaaaatacacatgcgaaatcttaaaacatgcctataccctatgagtaggaatctaagctaagggaaaaatgaaattgtggacaaaaatttatgcataaagatgcttactttagtattttttgttttgtttttgagacggagtctcactctgtctcccaagctggagtgcagtggggcgatcttggctcactgcaacctctgcctcctgggctcaagtgatcctcccacctcagcctcccccactccagtccccaggtagctgggactacaggcgtcagccaccacacccagtattttttttttttgagatggagtctcactctgtcccccaggctgtggtgtgcagtggcgtgatctcagcccactgcaacccctccacccctcccagttcaagcaattctcctgcctcagcctcctgagttgctgggattacaggcacctgccaccatgcccagctaatttttgtattttcagtagagacggggtttcaccatgttggccaggctgatctgaaactcctgacctcaagtgatctgcccaccttggcctcccaaaatgctgggattacaggtgtaagccatgacgcctgtcccaagatgtttactttggtatatttttatatccttgaaaaactgaaaacatacatgcctgacatttaggtaatattagttaaggtgtgtcagctcaaaagactattatgcagtcattaacagtgtttttaaagaatatttcgttatattgaaaatgcatataatcggaggtaaatacatcacgtataatgtatggtcgtagtgataataaaaatatgcgagcacagaaaaggttgatattgaaatagaatagcagttatctttgatgaacggatagaaggattaatattttctcctttatagttttctgtattttccaaatatcctagaaacaggcatgcattatttgtataattttttaaaagcttaacgttaaaatgttaaataaaatgagagggtagggccgggcgtggtggctcatgcctgtaatcccagcactttaggaggccgaggcaggtggatcacgaggtcaggagtttgagatcagcctggccaacatggtgaaatcccatctccactaaaacatacaaaaattagccgggcatggtggtgcacgcctgtagtcccagctactcgggcagctgaggcagaagaatcgctggaacccggaaggtggaggttgcagtgagccgagatcacgccactgcactccagcctgggcgacacagagagactccgtctcaaaaaaaaaaaaaaaaaaaaaaagagagagagaacttgatgtcagagttcccttctggctggtatcaatctacgattctaataggctggcaccacccacagggcctgagagatgactgcagagagccctcaagacctgcctcaaagacaagcagccacagggcaggtccagagcccggagtcagcaactcactgatcatgaggattcgccaagtacatccacacagccttcccttgaagccagctgcctctctagagtctttctgaaactttcccaagtgttgaagactcttccacgccattgaaagtgggcagggtgacagccccactctgaccctgctaaaccatggggcctcggtggccccccgtccacctggtgccaagtggggtttggcctgagaggtgagctctttctgccacttcaggtaaggggctcgttggagaaggtaggcaggcggcgccattgtcacctctgtggacctgtctactgtccacacatctggactttggggacaccactttctggctctttcagaccacacacccccaacggccaggacacacaacactgtctggtgagttgtcctgagggtggggcttctggaatacttcctaagagggagtcactgagggacagcctgctcactcccagctacttctgggatctcagaatcactggatccaatcgagcaggtcagcccagctgaggctacctggagaaatgaaaggggcctttggtgaggccctggtggaaggaagggcagggcaccatgtgagttcacaaagggagctccccggggagggagcccttggaggcaggagcctggagccctgtgcccagaaccctgcgccccgcctctagactgcagcttgtcagggcttggctaggacctccatgaaccagctccacacctggccagttagaaaccagagaaactcagaggaatcagaggctaagacactgagacagacaggcttagagggacagtaagaacagcagtcggcgggaggcaggcagaggtgtggggagacacaggctgagaaacagacagtgcctgagacagggcggagaggcccccactaggcagactgtgcacatcagcacctccaaacaggctcaccctcacgatcaccagggaacgcaaattaaagtccccctgatgtgccattcatttcacacctatgaaattagcaaacattaacaaaattataatgtctcatgctgttgaagctgtgctgaaaccagcttacacacactgccagtggcagtgtaaattaacaccacctttttaggggagaaattgggcaatacgcttccagagctatgaaaatgttcataccttttaatgtggtaattctgctcctgggaatgtgttgtaaggaagtcattcaacagaaccatgaaagacgtgtatctaaagaccatgagggcagtgctctccgctatatcccgggggctctagtatggccgccatgaatattttttaaaatagggaatattaagactataggctgggcgcggtggcttgagcctgtaatcctggcactttgggaggccgaggtgggtggatcacctgaagtcaagggttcgagaccaacctggccaacatggcaaaaccccgtctctactaaaaatacaaaaattagccagatgtggtggcaggcacctgtaatcccagctactcaggaggctgaggcaggagaattgcttgaacccgggaggtggaggttgcagtgagctgagattgcgtcactgcactccagcctgggtgacaaagactctgtctcaaaaaaaaaaaaaaaaaaaaaagactatatagtataacatttaagggttcttagaatatgtgaaaatgagcagaaaataaaaccatctgtacattaaaattaataattccataaaacagctgcctgaaagctcagggcagccccacccttgctggtggagggtgaatggttcttgattcccggctggccatacagacactcctgtcttcccactgaggggcctgccctgccgctccctgtctggaagcctaatctgcagacctcagaccggtggggagacaggctcagcaaagcctgcccacctggccagctcatgggagtggccctggggagtctgaatggtgctcactgagtcacatccgctgaggtgtgtctctgatgtcacacctacagaggccaaaccagaaaggaaaagaaagagatggtggggttgggtcttggtttaagaaagggatgcagtgattctgcaagttctgaagtgtcttgcttgttgcaagcacagcggtctgtttaagccagctgacgtctggatgcccagctggtgcatcaccagctgaagacaatttagaatagatggaaggcaaaggaagaagggatcctggggtcacccctcctggactgctccgacagtaggcacgatctcattctaaacttgatcatccagttctgcatgtttcccaccactattacccatcacagaagctggcactgaacgggaactcagtgaattgtgggtggatgaaaaggtgagaatttgacatattctaagaccacgtagtataatgaccatgtagtatgaatgagcacatgtcaccagacaattccagctctatccaaagcctctctagcttttcaaaggtgcccttcatcatgttctggggatgctatgccccttgtgcctgccctgctaactgccaaggggatgcccttccttacagaggccaagaacattcagtgaccgtgcccaggtccagacaagcccaaccttgttcattcgctccacgcatagctacagaacacaaagaggctttgtgacaggcctgcccttgatgtgctttcaatctcacgggagagacaggaggaaacaacaaagaatcattcacggagtgaccacatggatgctgtaaaaacaggcagcagcggtggggagcgagaacacccaggaagtgggctcagagtcaaggactaggcaagtctccttggggaggtggaaatggagcaggaatttgaggacaaacaggagtttatctgacagaaggagcaaccgaggtcaggggcacgtgtgagtttgcttcagccttccccagcttctcatcagtgaaccacaggcaagaaattcatcccgaccattccttcattccttcatttattccttccaccaacacttactgcatgctggctctgtgccagacgctgttctaggtttggggatataggagtaaacaagtcaaagtccttgccctcccgtggggaacatagatcataaacaattaagcaatgaataaataatatcaagtcccattttagtaggcgctatagagaaatagaaaaggttgaccaggcgtggtggctcatacctgtaatcccagcactttgggaggccaaggtgggcggatcacgaggtcagaagttcgagaccagtctggccaatatggtgaaaccctgtctctactaaaaatacaaaaaattagcctgatatggtggtgtgcacctgtaatcccagctactcaggaggctgaggcaggagaatcgcatgaatccgggaggcggaggttgcagcgagcgagatcacgccattgcacgccagcccaagcaactgtgcgagactccatctcaaaacaacaacaacaacaaaaatgaaactaattaatccagaacaagattcccagcctgtgagaggttggtgctcaggacggaggcctgggcgagagagacatccgcagtcaggcagcggttgccatgtgagcgccggggcagtgtgcaaagtgagaagctaaggcggaggaaagaattctggggaccactgacatttgccgggtgtggggggagggggagagagagttcaggcttacggagaacaacagaggaaaaagttttgatgaggagggaattgtccccagagccaaatgctacggaaaggtcagagaaattgggggtcgagaagaagccattggattgggaaggggaaacagcacgaagttacattgggaaggacagatttggtgaggttgcagtgcaagggcagggaaaaacgatcaggacggggacgtgtgagcagcgagggtagagagctctttgaagagcctgggaaataaaatgaataatggcttagggtgtgcaggggtgggcaagaggcagagaaatgggagtccagttagggcagggggagatgagacatttttgttgacctaggcaagggaccaggaggagagggaaaagctaaagacttcaaggaggaagatgtaacccagggacttcccactgcttccttcccaccccctcaaactcgggctacctgggaccccccaggcttcctgtctgacgccaagctaaatgccctctgtggcaccttcccccacagtggttgcccagcgtttgtctgctcttgctttagaagacagagtgctcaccgccacagggctggctcaactgtgagaaatgttttccctggagatctgacacagacgtggcacagtgttggggtttcaatggggcttcctatgtttgtctgtagaataaagtttttttttttttttaagacgaagtctcactctgttgcccaggctggagtgcagtggtgcgatctcggctcactgcaacctccgtcccctgggttcaagcgattctcctgcctcagcctcccaagcagctgggattacaggcagctgccactgtacccggctaatttttgtatttttagtagacacggggtttcaccatcttgtccaggctggtcttgaactcctgacctcgtgattcacccatcttggcctcccaaattgctgggattacaggcgtgagccaccacgcccggccagattttataatacattttttaaagtctttcttttttttttttctgagcccaaatcctcctagcttttcaccrtttgattctagttctgctcttgaggctgcctctgacaaagacagcccttcagatagcagaatgaagtggtgtctacccattcttcccatcttaggcttgaatatcccctgctcttctgatggcctccagggtttctcccraccacaycacaccctcagtatccttaggagtagatacagtaggtagaagactaggcatttattcctcttgtaccaacagcggctgctggttgagagcataagctccggagccagctagcctgggtttggatcctggctctgcttcttcctagccaggaatgctgggtaagtcacctaagcttctcaatcctcagtgtcctgacctacttcayctaggtgtgaggagtgcatgagttagtacatgtagagtgctgcaaacagtgcctgggggagactgagagctcagtgtgtgttctctgctctacgatattaaagtgccaggccaggtgcagtgactcacatctgtaatccctttgcactttgggaggctgaggcaggagaatcatctgaggtcaggagttggagacaacatggcgaaaccctgtctctcctaaaaatacaaaaattagccgggcgtggtggctcgcacctgtagtcccagctactcgaggaggctgaggcaggagaatcgcttgaatctgggaggtggaagtttcagtgagctgaggtcgcaccattgcactccagcctgggtgacggaacaaagatggttttacaggaccttggtttaaaagtaactagacacctggaagtactcccagggaggtgaaaaatatccaaagacaaggatccagcctgtggatggagactggaaagtggctgcagttatatcacacagagagtgctgcgatgcctaggaggaccaggtacgtgtgccctgtctctttcagaagcttcaggcctggcttcaggcttctgtcctgcttggcattcgyctgtggtttccaactcctccgaagtccagcctttgcygctgtgyggggattgtctgccctctactgtccatcgtctgtcatggcacacatttaacagatggccaggaactcaagagggggcactaattgggagaaaacttagagacgcacttttctccaactcttttgaccatgactcccagaaatatattttacactgcgattccaaacaaaaaagtttcacgaaataatgtttaccagccaggcaccgtggctcacgcctgtaatcccaacactttggggcaggggcggtggcttatgcctgtaatcccagcactttgggaggcagaggcaggcggatcacccgaggtcaggagtttgagaccagcctggccaacactgtgaaaacccgtttctactaaaaataccaaaacaaaaagaaaaattagctgggtgtaatggtgcgtgcctgtaatcccagctactcaggaggctgaggcaagagaatctcttgaacccaggagtaggaggttgcagtgagccgagatggtgccattgcactccagcctcggtgacaaagcaagactccatctcaaaaaaaataaaattaaaagaaagaaatgtattgtctcaggccactccgggccaaatactgtgctgaatctatcagtcttaggacttttagagagaaggctccacactatcatctccttggagcctggatatcagtgtatagacaccttgaaagagccattttgagaccttcctagaccatacacattcttatttttggagatcctgatccatatcatatgatacatactaaaatttatgcacattgggacttactgttttagtccattttgcattgctataaaggaacatacaaggctgggttatttgtaaagaaaacagatttatctggttcacaattctacaggctgtacaagaagcatggtaccagcctctgcttctggcgagggcttcaggggacttctactcatgatggaaggtgaaggagagcaggcatcacagggagagagcaaaagagcaagagagaggggagctgccagactgtttttagcagcgatatcccccgctggaaccaggagtgagaactcaattctgcaggaatggcactaagccattcatgagggatccgcccccatggtccaaatacctcccactaggtcccatctcgaacaccagggatcaaatttcaacaggagattgaaggaacaagtatccaaactatatcacttattaatttcaattttgttttctttttgtattttgaaggcaacgagttttttgggcctcagccatttttgtaggcccttgaacaattcacaggccttacgactataccctatcatgactaatgggtgaagtagccttggtaaaaaaaaatctgatcaatgaatatacactaaggagaaatttaattacttagcccttatctcctggtcttttttttttttttttttttgagatggagtcttgctctgtcaccagcctggagtgcagtggtgcgatcttggcctactgcaacctctgcctcccgggttcaagtgattctcctgcctcagcctcccaagtagctggtactacaggcatgtgccaccacgcccagctaatttttgtatttttagtagagacggggtttcaccgtgttggccaggatggtctccatctcttgaccttgtgatccacctgcctcggcctcccaaagtgctgggattacaggcataacccaccatgtccagcctctcctggtctttttaaagggaaatgtggacaggccattaacactaaatacatgagttcctactggtgaaatctttgctactctggtagactggtgggggcagtacaactgcaggtggaccaaatgccatgcgactggcaaggtgttctcactccgagcctcagtttcctcaaagtaaaacaatgggattacattagcttgatgatgttcaaagatcattagcattgggacccttttgcaaatgaaatcttatatggcaaaaagcagacgtgggatggatagacttctgagtttaacagctatgcaggatgtctgtgaagacatccaggagaacctcccctaggtgcctgcagagatagagaggtttactacaggcaaggacaggtttagggaccccaggaattcctgaggccttgattggatctcagctcttaagaacagcagtgtttttcaaacctcattgacagtgacacagtcaaaaataaagtttgcttcaagatatggtacatatgtagtgaaatacaagttttcataaaatatatacactgtaaaataaaagattgtcccacacgctggctgggacaaggatgttttgggaatataagccacaaaactcttcttggaaatcaactgtatgcctgattaaatgcttaagccactttctgatgaattttaatgagattatgacctcttgttagaaaccagttacctatgtacacagctaatatcaaccctggagggaaggaatccaagggcctttaactgtcttttaataaatctaataatccttaactagaacttttctttctttttcttgtatccagtctaacaatgattatctagtcattctcttttcctgtaaagtgtccttacctatagacacttgttgaattgacttagcaaaagcctcatttcttgccgcaacattgtaataaaaactttgacactgggtcataactaaattgtccaaacctggccaggcgcggtggctcatgcctgtaatcctagcactttgggaggccgaggagggcggatcacctgaggtcgggagttcaagaccagcctggccaacatggtgaaaccctgtctctactaaaaatataaaaattagccgggcgtgttgggcacctgtaatctcagctactcgggaggctgaggcaagagaatcgcttgaacccgggaggcagacgctgggcaccgtactccagcctgggtgatagaccgactctctgtctcaaaaataaataaataaataataaaataaattgtccaaacccacctcctttcttaccctttcctctttccttccttccttcctattaaacagtgtgatgtattctgatattgctctactgatatgttttattctactctatttcattttttaaaatgctgactgggaccccctaaattgatttcgccagtctttaatgttttgactgcagtttaaaaaccactgggatagcaatcctggtggaccactttattaagacagaaacacattgttgccattataaaataaaatcagagatggaaaccaggaaagataaaggcacatggtgaaagctgagaaactgtcttctgaaattaaaaaaaaaattaaaggatgggggcaagccaaaaactttgagaatatggttgcaatgcaaataagtgagaatttgtcttcagaatatttaaaggactcaagtaagaaaaagacgtgaaagaagcaaaacgagcaaagatatgaatagagaagtcacagaaaaagaaacccacaggggtaataagcgtatgaaaggatgctctaccctaccagtagacaggaaagaacagaacctggaattattaaaacttcagaaacttggaggaaggaccctggagatctgaaactcagacttttgataaggggtgccagttggctggtgctggtattctgagcagggatgcaataaagcagctttttcaaacattagaaagttgcaacgtggattcagctgccactaagggaaggaacatctgctaccagggtgaattagttactggtgtgagctcgacatggagccaggtaagaaggcaggaatatggtttgcagagacctagccttagacaggaagctgactttagaaggtagagggttggagccaagggcgaagcctaactcccacagtcagttctattggttaatcagcatttatatttaaacttccatactcaaaagaaaaaatgggccaggcgtggtggctcacacctgtaatcccagcactttgggaggctgaggcaggcagattacctgaggtcaggagttcaagacatggtagcacacgcctgtaatcccaactacttgggaggctgaggtaggacaattgcttgagcctgggagacagaggttgcagtgagccaaggttgtgccactgcactccagcctggctgacagagtgagactgtctcaaaaataaaataaaataaaataaaataaaataaaataaaataaaataaaataaaataaaatattcttttctatctaacacaatgcaactattcttcatagaaataaagatgctattagtctctccttgagaaaagagacacacaaagtcccaaaagtcactgcatccgtctctgggagagagtaataatattcatctctgagctacgataattactccatgaatggagtcgcagtcctgtctgaatattctgttacctaaaaactaaattgtaaagttaatcttccacaaaacgtatataaaataatgaggaggagacctccagctggagtgaagtaaggaactggatttaccctcttgcctgaaataactgaagaaacagacacaagtgggccccacaattgccccagcttactgcctggagaaagctttccagctgcagagtagggaggagcaaccctggcagagtcctatcatcttcctgagttaaggggacagagagagctggcagtactgggaggccaatacagccagaattcacagggcagcatgctgaaattgagggtgttgtacagaaagagaactctagagaaacaaaggtccccatcaagtattcagctgaatacaggagagaaggggataaggtgttaccttgaagataggatgtatcgacggcaggcacctcatggtggccacaacaatgacctgagccatcaagtgtcccctcagaagatgagactgcagctcacggagctggaagtcagagctgcgcacccagcattgggccagaagccagaccactgggggatccgtgggcaggaaaaggggaggtggtggggatcctgtgctgggcagctggagctggagcagggacaagtgtggggagagaaggcatgagtgcccggcactcagcgattcccgccccccttgcatgttaacctcgtcctccaaacctgttctgctttccccatcccactcctgcctctccctacagcttccatttcctcccctccccttcctaccagctcagtgcattagcaccctgcaagctgctttgcctccagcattctgcagaaactgctcttctggtgcctcctccagcctccacttcccctttcagtccccgcattgtggacaagattcaaaccacctgcttcctccatcccacactgtttttcgaaatctcatcttttggccccacctctacacaaatgactgaatctcttgttctcagctgcctgctggacaatttaaatgtcttcccgttacctcaacattggccagacaaaagtctacctgggcaccctgttctctttattggtgctatttctgcaggcacctggcctggctcccctttcccctctccttcatctccctctgcactcgcatccaccggtcctctccatcccgacggtcactacccatatccgagctcccctcctcctggggtcagtgctggggcatgttgccccagtccctgtttctagcatctcccctctccaacccaccctaaacaccactgcccacaccgcgtgcctatagcatgtttcatcacagccttctccagcttcccacttcatgctccttagcctggcttagtctggccccagtccaactgtcccctaggaatctcctgactcctctaccttagcctctgcccagtctgtcttgcccctgaggactggtccttcctctccctcctgcttgtctgagacctggccctcctccaaggctggtgacatcccaactccccgatccctcctgggctgtctctgtcctccgggacttcctcagtcccggagcttctgcagactagccctatgtgtctctccagctacattgcaaggccttcgaatagagacttggcgcatttcctcctttcgcgtctccctggtgccttagcccagcgcctttgaagatggtgcttagtgcatttcgataa

SEQ ID NO: 97562 - DNA, 14692 bp, Homo sapiens
gccagtaggagatgggggaggcgtggggtggaagaagagttcactggggatgggaaggtgggttaatcccagtaggagcaatccaatccaatctgggaaggagggagggaggaacatcgcaagaaccagcccttgttcctgttacaggaacagttacaggtgggtggtggatgtggtgtggggaatatgaggtatcctcgaccaaacctcggtgtcctgagcacaggggagagaagggcgtgccaccaagtgcgttgtagggtccaggccagtccctggggtgcccttgcaggtccgcggttcatcttccattcctgtgagcggccattgcatccctgccttggatcctgagtagatttgctcaggtcatccctgcctggcaatcttcctctgccccaggggaagccgggcctggcgtgggaggttacgggcctgcacaaacctaccagcagggcctccttgggcagcgtggacctggagcttctcttggggccaccagtgtgttggggcaggggaggagctggtgtccttcgcggggagaccctagaagctaccttaagccattcccttcccttcccatgtggcctttgacagctctggtaaagtagaagtatcacatgtaagctgggagccccagtgggctgctgtgtgaaaggagatggcagtcactatctagtagctccagttctgtttttatggccatttctccaaccatgtagccaatactttgcaaaaaacttagcataatagactttacatttctcttctggagggaaaggaaaaaacctcaggttacttagaggagactcgggagggaaaggatgcaggttgggatagaatgcccttctcaatctggataacctccatcaatgtatttaacctcattcttagttttctcatcggaaagcagggatgatgatgataatgtgacgtcacacgattgagaaaggttataggtaaccacacgtcctgaacacccaactcggaatctggcccagcagacactcagatatgagtccccaagtatttgaatgtctactgtgagcctggaactgtcctggggactgtggactcaacagaaaaccacacccctgcctctaggaggtttgcgttctagcgggcacgggcgagaccagctataaaccacatatggcgtcagttcccagaagagaaataaagcaggtacagaatgatggtgggggtgatggctctattctgggaggtatctggtgacatttgagcagagacttgatgggcccaggtggtggctatcactcgtgagagctttgggcatcattcctcccagcacatgctccagttacgtggaggcaggactggcatttgggtgattttcttggattgcttggcactgccatctagcctctctccacttcctttgcagggtttaactccctcgtgggtggcgtgatgggcttctccattcttctgagcgcggaagtgttcaagcatgactcggcggtctggtacctggacggcagcataggcgttctgatcggcctcaccatatttgcctatggggtcaagtaggttcttgtgctttcctgtttgctttcctggcagctaggagtgtcccttttccaccgccttccccagtcaggaaatgacaggcttctgaaggtcatattttgtacctgtgcccctcctgagcctgaccagtgtcaggtgactggaaaagcacccagcaggggtcagatatccttggggctggcacagaagtgaggcagggacaagaggtatcaggcctttaagccacaaaggcactccttgatttccatctgatgcctttaggacccttcgtgtcctgacatctatgctccttcctctctgacagtcttcatgatgccccagggaagcacctttgcgtggtttcctcacaagtggagcccctcctgccacaaatgggggatgcaacagtgtgctggccagaggccgcatccctagccttagagaacttcttgcaaaaggggactagtcagtgcagaaaggccgtgctggcatcactgacatggacttcagcacccaggctggagctggcctttcagagaaccatttctaaagggtgctctgcttttaaatgttaaaatgcttccattctcaaggaaaggtaggatggctatcatcaaaaagagggacaactgccagcgtcagtgaggacgtggcgaaagtggaaccctcatccatggctgtgggaatggacgatggtgctgccatggacgcagagttaccattcgccccagcacttccagtccttggtatacactgcaggaggatggaaacaaacctccacactgaaagttgtccgtgaaattcacagcagagttattcacaataggcaaaacgcagaagcaacacaattgtccattaacagatgaatggataaatgtggtagatctgtgcagtggacacttattcagcccccaaaaaggaatgaagtgctaatactcgctccaacatagatggacctcaaatattatgaaggaagtcacaaaaggccacgttatgtgattttgtttatataaaatatcaataggcaaatccatagaggccagaaggagggtacttctcgtcaggcgtggggaggatggggagtgaatggtacagtggacatggggtttctgagataacacaaatggatgaatatactaaaaaccaccgagccacatagggtgaattttatggtatgtgaattatctcaggaaaaaaaaaatgaaaatacgcttccccaagctcttcagccccatgccatggaggtgaccttgtctgtcttcgtctttgcagactcctcatcgacatggtgccgagggtgaggcagacacgtcactacgagatgtttgagtgaagggggccagcatccgcatgagaccatcgagatgaggagtttccacataggcaaagggtgccaatatttaactgaacatctggtttctttttggaagttttctttcacatggtttgtcattacaagacaaggtctgcccagccaggtggatctaccttgcccccatcacctgccgcccccatcaaacatgttgggacaatgcccataggaatggacctccttccccgtctccagctgggactggcgttttttagtctctggagtatgatggttctcatgggtaggatgagatctttggcagaaaggtcttcggtggtgctctgagcctgcgctgcataggactgagcagacccacctcctccagcttgggtggccctgccactcctggttccaagtctctcctttcctggcaggtcttaagggaagattgtacccctcaccctttacatacccagaatcatcagtatgtcacttcctaatttctatcagtgtatctcattatttcatactgttttactaatcctaagtctaaacagatttgctcaaaaggagaccattctattttttaaagtacttagtgatacacgtataagctttgcatggacgaattaaataagcacattgaccttttcttgtacattcagaacctgaacatccatgtgaaaactgggtccatttttgagagatgtgaaactacagtttatttgtaataaataaatataatctatccgtatatgcatatatctatatgctgtgttaagtggtaatgggtacattacagtctgtgagagatggatcgctccctctgtaaggaacaagacgttctcagctgatgtcacggtaggtttagattctgtagagtgttccccaacccgcaccgttctgtacctctcacaccactgcttgcccgggcagtagtggctgaccaataaagacctttacctgttttgtatggcatgggaaggcaatctttggcagtcgtcaccgtgcggcaccaacacatggggagacccgtcatgggcaggttttccgctgtggctgaaggatgacctgggaggggaagcttgtgcctaggggtgctgaacgtggagaccctgaaggactgtggtgcaggccgccctctctgaccactcaggtaggggccacacactcacctggcaccgagggacagctgctccatggccttgctgcagctttggggccctgtctcccctccacgccagtgaagggagtttgttctgtgaggtcatggaaacttggtccagtaccatgctttcaggttgcttccccagcagtactgaggaatacgtcaagggatgttaatatgtaacaacatgaactaaagaaaaaaaagattgggaagtgtaggagcctgtaggtttctcttctgctggttttctcgttgtgtctaatatacatcatggaagctcagggaggggaagtgacactggtagcgttgcccaaatgtaggcactcggctttcccttgtgttctaacatgctctgtgaactgtgtggggtgtccattttgggccgtagccaggaggcccgccagcttcagagaggccatgcagatgagggccagtgtcatctgcagacaaactgttgggtggggcatggactaaccttccctgtctccagggcatttgcctaaccagctgctcatggctcactgcttcctggctcaaaagctgctcttgaaagggagaaatctattctaggtccaatggtcgctggtgctcagccccttatagagctatttttattagctcattcttaaagatttttctcaaaatctagcagttcactttctaattgaatttccttctaggggaaggcagcacaaggagagtgcgctaacatgagtagtggtggatgtgatataagggaaggaatacacagtagtaaaaccttcccctctccactccttaagtataccttcctgtcttcctaccagcagtttcaacagtgtgctgcaaaccgtgaaatacagctgggggaagctgtgtgctggggacgcgcctagacagcagctcagctttgttctggaggtgaccctgcatgcacccgcccccccaaaaatcacttccacctgtcacacaagaaaagtttattgaaaaataaagttctccctagttttctctacaacagtggaaaacaaagcagtgctctctatgccaggacagtacatttggacggcgacaccttgtttgcagaatcctgcattacttaacccccgaagtgaatcacacaaaatggctgtaaccaggatctgtttgaagacacagatgcaaacggccattagcttaaagacgtcaaggttgtgacagcaactacagtggaagggacgtcaccatctcctttggcatcaactattatgctattaatacttgggtaggacaatgagcaaaatgcttcccaagttcgctccctctcagctttggcagatgtgaagctgctctgaggttcctgacacgctgtcctgagaggcgtgtagacctccagcaccacagatcctttgagcaccaccccgtccccgccatcctccatcaacagtggccctgcccaccacataagcacagggttctccagccgtggggtcagggtggcattgagggagtgtcttaaggctccacaaaatctgggctacagagatgctttgcagatgggaaattccagtcactgcatccacaggacgagactgctgatttggcggaacagaatccaaaggaatttgacgaagtcaccaaactccagcaaattccacacctgcaatctatccagagttgtgccaagacagggcaggagataaggagatagataaaactttgaatccatcagggaagtaagaggctaaatcctctcccccaaaacaaaaagcaaaccgatatttaggtgatttgggaaaacattcagtcatgagcagcctctaggagctgttctgagaggccaaaatccctgccccattgcccccagctggcagggtggggttggttttctccaggaggcggccagggaataacctttaatttgatggaaacatgcagaactaaccagtctgggagtctgatccctgaggacaggaggggccaccccagcctgtaggggccggcaaagggacctgcctggggaatgtgtaagttcaattggtcattccttctcccttaacgcagaaaagcctctattattgcattcaaaggaatactgttaactttgactcaaggggtgcagtctgccagagaacccattttaatttctagctcaaaaatgttccttgaggaaaacccttggaatgttctgaaagacgtcagtggggtaaggtccagtatgtggctagccaaaggtcacctttaccttttccagctggagttcataaattcttgcagccttgtttccttgggggctgaagtctggcatattttcaaaccagtgcattcaagaatacagtaagatcccaaccagcagggtaggccgagaactgggctactctaaaccagtaattcctacaacattcaatcaacttggaatcatgttttcatgtaggtattatttttgaatcaacaggaagggaatgagctcagctctatttctcaagttttacgaaacactaataacaatatttaacatttactagggcttactatgtgccaagcactgtgctaaacactgaatcctcacaaaaccctaagtgctaagaaagctagggtaatttttttctgcattcaagactctacagctaatttggtcttttgctataaaaacttggtctcccactttttgttgaagcgaacaagaatcacaggaactcaccctcagcttcacgaaactcccagcttcctaaatgagcatgaatctatttatgtccatccgtctactcacatgaagatgctctgcagcyccacagggatggatgggattagaataaagccaatatggaaattaaaatacttttaaataaataaaataatccaggcttgggatagtaacacatacaacagagcctgtcgttaacaaaatagacttttctttttaaatcaagaatttttggccagaggtgagggtggcaatgtctaatatacacaagctaggtaaaccaccttggagaaatggggtggccaccgtggtctgccctaaaaggcacacacctacctayagacatacagtttcagtccaacacatcatactgatgtcaaccctgtcagtgagctgcactgggctccactcccaaaggggaagctcattattcacttttattaaatcttgcattcactaaagaaacaaaaaaggggtgcacgttctttccctttcatgatgctaaagtatttcttctccaagcagggccctgaactccttggatgcacccattcacatgattctgcctcagccacacctcagcaagtgcgtgggtggcagggaacacaggctggttgacacgttggcaaccagcagtcccaaggtagacccaaaggtatggcagaatccagccctttcttgaggttctcaaggcttcacaccctcctctgtgggtggaagtgcacatgcatacacgctatggcctggygggggggttatagggagcgtctggtgtccagcttcaacagctacagtggctcaagaacatgtcctgtctcttagctggaggagtctgctattgcccttcaacagcatccrgattccaaaaaccccaaagaaaaacraaaaggcacatcaaggaaacaaatatcactaaagaaactgactaatatctccaaacgcacagcaaacacacaaaaaagcaaactgtaatgagcagtgacacaaacccagtccaaacaaaaatgaaaagcatctccatttatacatgtgcaaatcaaactgcatacacaaaataaatgcggtgtttaccagcattcaaagaagtctttttactcctcaaagtatctacctttcaatggaaagctttctcttttagtaaattagatgaatgttttccctcaagttttttaagagcttaggatcacaatggggaaaataatccaaaaaaacaggcaagatattatagcggggaaaaacattaatcataacttaggatttctctccccatggaactgttatcagctataaatcggtttaggattctatcaagatcagcaayggcaaaacctcygcaggcttccagcccacacaggggcaccttcctctcctcttccatgcagggcagttggaagccccctccccagtttcctctccaggatcactgactagacctgggccaagtctgaggaggcctgggagccagtacacattcaggggtcactgactcttcagataatgccctaaacaactggagtgtgggcttgtttgctccaagagcagctgccctgtcagtggaactccggcgcacttccactcaatactggactgggggggatgaaagagggatttttaaatggcagaaaagtgttcttctgggctgtctggcccgggcagggcgggttgtgacttggaaaagaaggggaaggtagggaggccttgaacttagggacagccagcaaatgatccttgcagcttttggaacacaaggcagggctaaggttacctttcagcttccttgcttaagtagcagtggctaagtgggttaaactttgctcggcctgcaggctccccctgttggtcagatacttgcattgacatcctcagtgttcaatgctcctggaagagcccaggagagggcggcactggcccagggattgcaggtcagggaactctagcaaattcccacaccctagggtacagccaagaggcccattcacaaggaaaaagctcttccttacagcaaggatgccagtcatctgccctcctactgcaggaaactgcccttgcttaaaagaaatgcacaggctcatacacacacacacacacacacacacacacacacacacacacacacactcactcaccaaggtttcctttggacttctgcccttcttcctaggcccaagcagaggctattctcagccaggtctggaggcgcccctgtgatgatgctcagggcagaggcctccccatggtactctacctggcagatgtgctcgggggccacctaaggagtggaggaggccccgggtgccccccaccctcctcttagactggagatacaattgagacgcactgagcagggatctcagtgggcctaagaaaaaaggctggctgcacatttgtgtagcaactgagaaagaagcagaatgtaacttcccagacttaaaggccccacactaactctagtccccatgaagcggaattcttcctttccctcacattctgaaagctaccagccattacgccttgcccatcagttctgcccagcggaggctccactgggccgccctctgttagcaggaagggtgcttggaagccccggcacagagcacatcattgagcgactgaggcgcccagcagaggccaagtggaggacgccaaccgctcacattaggcagaaggggtctcacttgcatcagcatggagatgtcaggggcttttcagaaacttacaaacttgtacagagcatggcagcaatgattcagtggggtgggaacttatacaaaggcagagcatgggggggtccagggtttggaaggtggggtccagtgtgtctgaccaggccaacctgatgactgattactcaacaagtcagagtgatcctgcctgaaggaaaagccagcaccagattcccacctttgcgagctacaccctcaggtgagtagccaggacagggcactgcattcatcctgagctgcccccactcccccagcagacatcaagagcccccttccctggactttggtgccatcagaggggacacaacacaagcccacctgtcaggagcccagctccggtcgcgccacaaattcttaaggaccgacttcactcctgtccaaatcttggctcaaagataatcctctccaagtccatgaacagcgtgagtctttcatctctactttcctcctcatagcggggctggagggagggtgagtttaccagaaactccaaaatccctcaatcctgtatttccttcccaaagggattctaaaagaaattacggccaaggtatgtgtctgggcatggggacatggaggaaaggggcctcatctcctttttcgtccctggctgggctctctggacaacacaggcacgtccccctgactgaggcagcccatgctctaggtgccatctatgacgatgccctggggagtttggctgtgcttccaaagcaaaagtttcttttgttctgctgccatctgttttgagctgccaggtccccatggctgtccctgagcaggccaccagccccacggcacacggtctctctcctgcaccctgcccaaagcagacagaacaacagtatagtgaaggtggatgattaacagtggaaataaaagaagcctgtgatcaatccctcctctccctcccgcggtcccctccctcccacccgaataaataagttaatgggtttaggaatattcccattcagagttctttcccatcagctcaattcctcctgttttgttttaaaggactcttgagactttcttttgccctggagcagctgcagtgacagtcttcccacagttgctccttgagaaacagaaatgatgttgtgccagggacaagccaggctcctggcctgacatacgctcttgttttgttttggtgaagactccactgggttgctcggagtgcagcaagggcaatgccaattcagaaccttctacgaaaaagttcaggctcttgccagagtccctgcatgacttctgtccctggccctgcctgacggggctggggccactgtcttccccagcagcatggtgcagggctgagcaggtagctgctataggcagtctttgcagagagccacctggcccttgatgaagtcccggcaggggcagaccctctggtgcctggggtgggcgcctgcacagctgaagagcaggaggtcaccttgaaacacacagtgcttattcttagggtcaaaggagggcaccaggatgtccttggccagctctgagctttggcaggtcaccttgtacctgaagaggaagagaaaggcacaagtgttggtgatgaagggacagagcctttcctcgtcactggccctgtgagcccccatcttgaggcatggggggatgttcagttgtcttgtcctactttagaaatgaaatggtgcccaccctcttcgtctgcaatcctccacctctaggcatctagactcaggaaggcatgtgtgcaccagggagtgtgtgcaggggtgtgtgtttgaggctgcctagtgaagctttgtctgcaatggagaaaaactggaaacaacccaaatactcaccaagcagggaatggccaaataaatcatggcccttctgtgcttttagagttctctgcagctgttgaaaaagaatgagggagaagagaggagcaggagagtcatcctggggaaaggtgagtcccagaatgggaagcacaggggaaccagcccgcagtgtgcacacgggaggtgaaggctgcaagtcgagacggctatgtgctaatgccttagcaatggctgcttccaagaagtgagagtggggcaaagctcagcatcatttacgttctttaagtatgtttaactttttaattaaaggctttaaagaattcctgttatatggccttagcctcttgctggaaagctatcagacagaaggtgctgtcctggggcatcgcctccctgggtctttgcagccacccttaagccatggcaatggtaaccccagttagaggaaggtgaactgaggcttcaggatgtgcagagacggcctgaatccaggccctctctccccagccctgtacttctgccatcttctcccaacagctgagtggtctcaggcggtggagcctggtggctttgcttcctttggctgggaccactgcgtaggggggccaaggatattctgatgtttccattcccaacagttttggcctcttatctcatatctttccctcccacttgggatgactgctcccatccaccttgcttcctgaaggaggcagcggcctcacctggtgtcctgcatgaatgcgaggtgggaacccatgctgtatctgatatcagagaaagtggtgttgggggacgggcagacctgggtttgagtcctggctttgtcttttaggagctgtgtggccctggacaaatgagtgagccactctgtggctcagattcccttccatagaatggggataaatgattctttactgcaggaattaagttagtgcttctacagcatgtgacagagtcaagctctaagtaagtggataaatggcaaccatcattgttgtcaggattgtggtcattgtcgtcatcaccctgccttggcagacatcggatgggctataccacctccccacttgcttgtccagtggtatgaatttacacaccaaccatttctatttcacttggttcatggaagtctcatttttctgctgacacggaggggatgaggatggggagcctgaggtttctcgttgcctctgagaagcttccaaatgggcttgtatgtgtatgtatgcatatgtgtgtgtacatgggcatgtgtgtagagcatgtttatgtacttgcatttgtgtgcgtgcatgcgtatgcatatgtgtatgtgtatgtaaagcatcattttctctcctactcctgccctgtctttctctagctaaccagctgcctggggccttcctccccttgccaacattaatcctgcgattccccgcacatctgctggggcttctgctgagatctcccaggctgtcagcctggctcctgctcagttgcagctgaagccccaactgcttctggaactcagcatgtcactggtgctcaggcctccctcccccagagcctgcggcgcctcctgcacgtgtgaactgcaccaggagcccagacctgctcaggagagcgggactctcttctcttgctcccacagtcaccgggagagcactgcaactaccctaaataccccaccacccctgctcttgatgccagctgggagatggtaatgcccagggagttaaggtcatgaatcatgaagggagagggcaggaagtcaatttttatggatttcctaaaaggaaaaatgagtcagagacttgcagctaccagctccttcacagaatacctcagctggacaacagagagaaaaatatctggaactcaattctgaatgacaagtttacatatggaacatgaccttgggatacaggtttatatttatgacctttttttttgggtgaattacagcagctgctgtggctttacttaaaccatctgccggcacactgctaaccagagcatagaaatctctacggcgactctcagaccccatggcgaggaatataattgtcaggagctatgaaaaaccctcctgctcgctccctgggtcacctggactcaggctctaggccaccatctcccggggtagaagcacacatgagcgtgtgtctgtgagcaggattcagctaaggctgcagcagcagaagcctgcctggggtgatgcacagagaccgccgcagagtgctcaagcagcagacgcttcaccaggccacaggtgagacccgacaccaggcagctcctcaagggttcaactgatggattcggctgtggaatgcagggctctaaccaaccccctggccccagtgtcttctaagcccccagtgagctctgccttttactggcatgcatgtgcccatcccatagccctgagcagtcaggaaggtgactccattatccttgggagcaaaggtcatcagtgaggcaaagcagctttccccaatcgctagagcacatggagaccagacagcctctgcagcccaggatcctcaacccctagggggtccctgcctttccaggcagtgcatggtgctatgtctgcctctctgtccctgcagtgtctgtctcacaaacaagcacatcctcctgctcagagaccccaccgcagtgtgccatcttcctttcctttcttcctagtttcttacaggatggtagttaaagtttctgggcccatcaggtctcagtttacagtttatagctcttgaagaataaaaaaaggcaaagcctccctccaatggggctggccacgctgtgactgaagtcacaggcactgggctgagaagtcaccagtcccttcctgacacagacctataatgcacaggacaggatgcgctggacaggaggcgagtgctgctgtctcacctgctgctcccgcccctccctcctgccccttcccttgagtgccttccctcccttagccccctctcttgagggctctgttcattccagctctgccttgccaggtcccacctggcaaagactccactgggctgctctgagtgcagcaggagtattaccaaatcagaaccttctaccaaaaagttcagggtcttgccagagtccctggatgacttctgcccttggccctgcctgatggggctggggtcactgtcttccccagcaacatggtgcggggctgagcaggtggcctactaagggtcaccttccctctctcaggtaccaaagcactcagtctacactgtactgcttagaattctttgcacagagcaaccccagttgccaataatttaacattgtagaagaaacaactttaagaggtagcaaaattagaaactgggcaggaacacatgttcctgtgtatggaactgaggtcctctccactgggccccactggaatggaccctggcacttcctggagcctgcatcttccagtctccaccccagtctgggaggagacttgtccagaggatgtgggtcgcacctgaatcatgc

SEQ ID NO: 97563 - DNA, 14484 bp, Homo sapiens
tcacctacaggcagctcaaacaggtgcgcggtcagctacaggcagctcaagcgggtgcgcggtcacctacaggcagctcaaacgggtgcccagtcacctacaggcagctcaaacgggtgcccggtcacctacaggcagctcaaacgggtgcccggtcacctacaggcagctcaaacgggtgcgcggtcacctacaggcagctcaaacgggtgcccagtcacctacaggcagctcaaacaggtgcgcggtcacctacaggcagctcaaacaggtgcccggtcagctacaggcagctcaaacaggtgcgcggtcacctacacgcagttcaaacaggtgcgcagtcacctacacgcggctcaaacaggtactcaggcacttcgggaccccagagggtgccagagtactccagcctcgaaggcgggacaccgcgcttcccgtgtgggggtgctgggtcctcgaccctcaacaccacttaggccgaagctggctgcacccctcaaaccatgaagctgagaagcacccactttacaagtgcagcagccggagaggaggctctcatcagtgcaggctcatccacaccagccgtgttttggggacttaaggaggtcattcgcgctcagaggctgtcccgggcaccatgcggcgtctgccggggtctttctcctgcccagcctcatttgcctgtgcatgcacttggttatccaacaagagctagaacattctgggagaagcccacggtggctccttgccgggctggtcagactccgtggttgtcctgagacacccaccctctgctgccctgagggtggcccaggaaagtttgtgtgaccttccacacggatcccctgggacatgcaggtgtggctcttgacactggaaaggctgagggttctgcccaaacctaggagtgaattcgacttctttcccatctcacacacacacccgagacgtcacccgaatccacgtatttcccacgttcggctgccactgcctcccgggtgggctttgcaggacccaccatcgcatcccctctcactccacagaaaactcgtggggccatgttccccctgccactgaccacgcttcccttgcagatccgcctcacggacacgctgggcaggctctcgcacatcctggagatggaccacttcgccctggtggtgcacgagcagatccagtgtgagtggggccctgctctgtgcgtggggttctcactggggtcaggccaccaagcctggcctctgccatgggcagcagctgggccccccatcccctgcggggtgttaggggagtgggtggtgccgaccttcagtgacacccagtctttatgcccgggcctcccacatgccctgggctggtgggctgtacctgtgattcctgcagggacccctcatcaggccacactgggtagggccctttgtccagcatgcagaggctcaggagtccaggccccttgcctccggggaggccagcagtcttggggattctcagggacaagcccagaaacatctagaagggtttcaagtcctgaccctggcattcggagggctgctctgaatggaagcctcatgtgggtctcacaggagccactgatgggctgtcctcagagccccgctcccagcaagctcatgaggttttgcaactcctgagcgcatccccgggcgtccccaccacatccccacaggccaggagagtcgctcgcaggttttgggtcatagatggcagccctgggcctggggcccacaggaagagttgggaggggccctggagcctggagcctgcccacccaccaggcctgtgtgcagggggtgagcgctcggtggctgaggctggtccgtgagggccccaagtctaaccccatctcccgtccttggctctgcagcgcaggaccaggcctgggcaggcgtggtgggggggcctgcaggtaggtatcacccacccctcagaatggctctcaggctcagattcacagcctccccatggcaaatggaggccttccagggtcctggacccacccccaagcttgggtaggagggatccccctcttaatctcacatttacttgtgtttgaacatctcagaaaaaaaaaaagatgcaaattccaatgtcagggtccccaaatcaagtcttcctggagcatgtccacgcttgtcaccaccgtctgtggctgctttcaagcacgtcagggctgcgtgctcataacagagacggcacggcccccaagacctaaaataccaccagctggcccttgtcggaaagtcccctggctggccctagtccattgactctgggccgagctgccagggccacagaagcctgcggcactcagggctcccagggctcccttctccaacagttgctgtgcctccgtttccccaaaatgcaaggagctgatctcatctgtgttccctatcttttcctggggctctaagtgggccaccccaagggacctctgcctacaaagagaggagtgacagccgtggcggagttgggacgggctccgagggctcttcctcacccgcaccttgctcacccctctgtgcctcatgacagctggtgtagggtcctgtggagacgcaggaccaagaggatgtgtggggagcggggagagagagggaacgagatctgtgttaaggaactggatcatgagatcacggaggctgacaaaccctgagatctgcagggtgaggcggcaggccggagactggagagccagcagttcaagccccaaggcaggaaattccacctttggttctattcaggccttcaactgcttgggtgaggccctccacagtagcacacgttatctgcctcttgactcttgtgctaatccggaatcccctcacacatgcccagaacgacgtgtgaccaatgcctgggctcccacggccccgttaatctgtattaaaattaaccatcacaacagccctgtctgggtatgtggcatgggagcctcggccagcattaacaccgggtctacgcttgccaggagaaagcaggaggggtgaagacagaatcaggccagagatggaagctgtgtgctgcccatggtggcaaggggtttttgtctgtttttagagacagggtcttgctctgttgccgactggagtgcagtagtgccatcatagctcgctgcagcctcgacctgctgtgctcaactgatccttctgcctcagtctcccaagtagctgggaccacaagcgtgtgccaccatgctcgactaatttatttttaaaaatattctgtagagacagggtctcaatatgttgcccaggctggtcccagacttccgggcttaaatgatcctcccaccttggcctcccacagcgctgggatcacaggtgtgagccactgtgcccggccctgtaagcgggtttgaatttcatgcccacaccggctctgaagtcatgagtgcctcaggagctcagccggtgggccagggaagggtgtgtcctgacctgcggtgggtggagcctggcctggggcccaggggactcacgtggtgggtagaacctggcctgggggctcatggggctcatgtcagaagaacactggcttggccaggcacagtggctcacgcctgtaatcccagcactttgggagccgaggcaagtggatcacttgaggtcaggagttcaaggccagcctggccaacatggcaaaaccccatctctactaaaaatacaaaaattagctgggtgtggtgatgtgcacctgaagtcccagatactcgggagtctgaggcacgagaatcacttgaacccaggaggtggaggttgcagtgagccaagactgcaccactgcactccagcctaggggacagagtgaggccctgtctcagaaaaaaaaaaaggaacacagccttcgccgctgggctccagccaccctgggcccccatggtgcacaggtgccccaggccctcaggagcctcctgccccgcagcagcccacccagcctcccacggcacctgcaaacccactgcctcgttctcccctcagaccacagcaccgggaagtccagtcagcggcagatggtgttcggggtggtcaccgccattgacttgctgaacttcgtggccgcccaggagcgggaccagaagtgaagtccggagcgctgggcggtgcggagcgggcccgccacccttgcccacttctccttcgctttcctgagccctaaacacacgcgtgattggtaactgcctggcctggcaccgttatccctgcacacggcacagagcatccgtctcccctcgttaacacatggcttcctaaatggccctgtttacggcctatgagatgaaatatgtgattttctctaatgtaacttcctcttaggatgtttcaccaaggaaatattgagagagaagtcggccaggtaggatgaacacaggcaatgactgcgcagagtggattaaaggcaaaagagagaagagtccaggaaggggcggggagaagcctgggtggctcagcatcctccacgggctgcgccgtctgctcggggctgagctggcgggagcagtttgcgtgtttgggttttttaattgagatgaaattcaaataacctaaaaatcaatcacttgaaagtgaacaatcagcggcatttagtacatccagaaagttgtgtaggcaccacctctgtcacgttctggaacattctgtcatcaccccgtgaagcaatcatttcccctcccgtcttcctcctcccctggcaactgctgatcgactttgtgtctctgttgtctaaaataggttttccctgttctggacatttcatataaatggaatcacacaattgtggcctcgtgtctaacttatttcactttgcatggtattttcaggcatgtcagagcacgtgtacttggtttctttttgtggccgaataataagccattgtgtggatagaccacattttggttcctcatttatcggtgatggacacctggttgtttctgcttttcagcccttgtgagtaacctgctgtgcaccttcatggccgagtatgtctggacacctcttttcacttttcttgggtgtgtacccaggagtggcattgctggttaatgtggtaactccatgtttaatttttttttttttttttttttgagatggagtcttgctctgttgccaggctggagtacaatggcacaatctcggctcactgcaacctccacctcctgggttcaagcgattctcctgcctcagcctcccgagtagccaggattacaagtgtgcaccactgtgcctggctaatttttgtatttttgtagagacagggttttaccatgttggccaggctggtcttgaactcctgacctcaggtgatccacctgcctcagcctcccaaagtgctgggatgacaggcgtgagccactgcgcccggcgtccatgtttattttttgaggaaccatcaagctgtgttccatactggtcacaccgatttccattctcaccaacagtgcccgagggttccagtttctccaggtccttatcaacacttgctattttcttgttttaaattattatagccatgctagtgtgtatgaagaggtgtctcattatggttttgatttgcctttctgtaatcattggtgatgttgagtgaccatcttttcatatgcctgttggttattttttgggagaatccatctcctgtttttaaattgggttgtctttttgttgagttgtaggagctctttatatgttcaggatactaagcccttatcataagacttgcaaatattttctcccattctgtaggttatctttttactttttttttttttgagatggagtcttgctctgttgcccaggctggagtgcaatggtgtgatcttggctcactgcaaccttcacctcctgggttcaagctattctcctgcctcagcttcccaagtagctgggattacaagttcccaacaccacgcccagctaatttttgtgtttcgtattttttattgttttgagacagagtctttctctgtcgcccaggctggaatgcagtagcgtgatctcagctcactgcaacctccgcctctcaggttcaagcagttctcctgcctcagcctccccaggagctgggattacaggcacgtaccaccatgcctggctaatttttgtatttttaccagagacggggtttcacaatgttggtcaggctggtctcaaactcctgaccttgtgatctgcctgcctcggcctcccaaagtgctgggattacaggtgtgagccactgcgcctcgtctamtttttaatatttttagtggagacagggtttcaccatgttggccaggctggtcttgaattcctgacctcaagtgatctgcccacctcggcctcccaaagtgctgggatgacaggtgtgagccactgcgcctcgtctaatttttaatatttttagtggagacagggtttcaccatgttggccaggctggtctcgaattcctgacctcaagtgatctgcccacctcggcctcccaaagtgctgggatgacaggtgtgagccactgcgcctcgtctaatttttaatatttttagtggagacagggtttcaccatgttggccaggctggtctygaattcctgacctcaagtgatctgcccacctcggcctcccaaagtgctggggtgacaggcgtgagccattggtcccggtctctttactttcttaatgttctttgatgcacggcagtttttagttttggtggagtcaaaatttgtttgtttgttttttcctgttgctcatgctttgggtgtcatatccattggcaaatccaaggttcatggaaatgtacccctatgtcttcttctaagatctgtacagatttagctcattgttcgattttgagtcaatttttgtagatggtttaacatgggagtttgtggatgtctgtctgtctcagcgtctcttgttgaagagacgatgctccccccatggaatggcctggcaccgttgctcacagatgtatgggctcatttctagactcagtgctattccattgatctgtgtgtctggccttatggtggtaccacactgttttgattactatagttctgtagtaagttttgaaattgaaagtatggatcctacagctttgttcttttacaatrttgttttggaaattatgatgtatcctgatgtatttgtccttaygtttttgtgtgtgaaattctttgagcttattggatcccagcacgtggcaagtaagagttccaaaaagaaaacaaggaaggatctcagtaatgaagtaattcacaaaactgccccagaactcaaagacatgactttgcagaccgagaggcccacccagtgcccagcaaaatggaccgcgaaagatctacacagtgaacatcactgtgaaatgtgaggtcactcaagacatgagaagtctaaaacactcccaaaaaaggatgaaaagcccagctcacacagggaggcttgggatgagaaaggcatcaacttcagcctccagcacacatggaaaccaggagatgaaccctgacggaattcagaagaggaaggaatgcaggctggaagccctgaggccagcaccctctcccttagcaccggaggcaggagacccacttccatcatgcagggcaggcyttctgcccaggaacacacgccaccaaaaggagggaatgaaaacaggagaggaaatggtgtcacaggaggtcccagggccactgtgagtccagcagcagtaggacagaggagacctaggcgagaagattgcttgaggccaggagttcgagaccagcctgggcaacacagtgagaccctgtctctacaagaaaaaagaaaggaaaacaactcctcaggaggctgaggcattaggatcacttgggcccaggagttggaggctgcagtgagccatgattgcactactgcattctagcctggatgactcagtgataccctgtctcaaaaaaaaaaaaaaaaaagacaggagtgatgcttcaggggagataaggaaatcaagaggtcgccagagtgctgtgagcctatcargagatctgcatgcctggtggagagttgggagttgcatcagaacctagaaaacaaagaggccgggcacggtggctcatgcctgtaatcccagcactttgggaggccaaagcagacacactttgggaggactcractcaacacacacacttgagtccaggagttcaggacctcatctctattaaaaatagctgggcatggtggtgggtgcctgtggtcccagctacttgggaggctgaggcaggaggattgatggagccagggagattgaggctgcggtgagctgtgattataccactgcactccagcctgggtgacagagcaagaccttgtctcaaaaaaaggggagaaaatrttggagctctgtaagaaatgtaattacatracatgactaggctaggaataatagttgcttcatcataatcgtgtaaacactggatattaatcyattctcaattataaaactgtcctgaaggaatccgagaatggaattatatttcctactagtggggaggagcatgggagaggaagaatcttcatttttccacagaaggatgttgatagataacatctatacttacaaaaagaaaaaagcagctgggcgcagtggctcacacctataatcccagcattttgggaggccaagatgggtggattgtttgagctcaggagttcaagaccagcgtggacaacatgaggaaacaccgtatctactaaaaatacgaaaattagccaggcgtggcagtgtgccctgtagtcctagctacttgcgaggctgaggtgggaaaattgcgtaagtttaggaggtcgacactacagtgagccgagattgcatcaccgtgctccagcctaggtgacagagccagaccctgtctcaaaaaaaaaaaaaaaaaaaaaaaaaaggaaggaaggaagaaaaggagggagacaggaaaggagcacaagcaagtttctggacatatggatgcaagtaagtttataggtgagcgccactccagcctgactggcagacggagaccctgtccgcccctcccctctaaaaacagtagagctctggtgagctgaacagtggtccttcaaagctaccaggccctaatctctgaaacctgtgaatgggccctctttggaaaaagagtccagcaggtgtgaagctgaggctcctgagatgcagagacactcctggatcatccaggtgggccctaaatgccctcgagcttccccttcggttttccccgtgtggcccagtgtgagtccgccagggctgctgtagcaaagggccccacagtgggtgcttcgacaacttactgtctcacagacttggaggccagaagtccagggtcaaggtgttggcagggatggttccatcaaccctgaataatgagattcataaaatacagtgaagtccagggtttattcaagcttaaagcttgggaaccatcactcgggaaacagactcgaaaagaatgggccagcgctccagagtgggaagggaaggtctcgcttacatagaggcagagacaagagaagtctgacagggttgcaacgttttccgtacaaggtagtgcatagcttatagtgtttcttttttacgagacagggtctcgcactttgcagtggtgtggacatggctcactggggccttgatctgggctcaagtgatcctcctgcctcagtttcttgaatcactgggaccacaggtgtacaccaccacaccagctaatttttgtagagacagggttttacatgttgcctaggctggtctctaactcctgggctcaagtgatcctcctgccttggcctcccaaagtgctgggattacaggcgtgagccactgcacccagcgagtttgaactctttaatgccacagctccttctggggctgagggaacctccgtcccaggcctctccggcttctgcgggttgctggccctgcttggtggtccttagcttggagaagcacccccttgttctccactttcatcctagcagggcattctccctccgcatctgcatccacattaccctttgtgtaaggacaccagtcactgggttagggtctaatggcctcatttagctttaatcacctctttaaagaccctgtctccaaataaggttatattctgaggtagtgggggttaggtctgcaacatgtcagttttgaggggacacaatctagcccatagcactccccacccccaacacacacacaccgtgcacagagtgcctgttaggccggatgtgatggctcacgcctgtaatcctagcactttgggaggccgaggcaggtggatcacctgagtcaggagttcgagaccagcctggccaacatggagtgcctgttgacgagcacctcccagccttggcacttgctggacgagcctggaaaaaagccacaactctggacccagtttgatctgggtttgaatccaaactctgccacttatcagttgggggttcttgggcaatatgtcccaatttccatgtctacaaaatggagataagatctagacatggagataagatctacctcatgcagatgaatggagaagcaaaatgtggactatccgggcaacggacaatgattcagcttaaaaaggaatgaaaccacgccacgtgctacaacagcacaaaccctgcatgaccccacgaatcctgcgtgaccccacttatgtaaagaatctagaacagctgaactcagagaggcaacgagaacagtggttgccaggggctgaggagggggatgaggaatcattgttggctgagaacagtttcagttcgggaaagtgagaaagttctggagatggatggtggtgatggttacacaacatgaacgtacttaaccctactcaactatgcatttacaaatggttaagatggggccgggcgcggctgctcacgcctggaatcccagcactttgggaggccgaggtgggcggatcacaaggtcaggagatcgagaccatgctggctaacacgatgaaaccccatctctactaaaaatagaaaaaaattagctgggcgtggtggcgggcgcctgtagtcccagctactccagaggctgaggcaggagaatggcgtgaacccaggaggcagagcttgcagtgagccgagatcccgccactgcactccagcctgggcgacagagtgagactccgtctcaaaaaaaaaaaaatggttaagatggtacattttaccacagtgcgtaggtgggggcagccctcactgaagacgtggtatctgagcggaggctgggcagaggctcaggggtgcccagcgggccctggggaaaagcatgcctggctgaaggcacaggtgggcaaacgcctgagtcaggagtgtggctggtgcagtccaggtgcaggtgggagggctggggaggtgtggagggtgaggacgggggtgcaggggcctgctgaggacggaggggagcagatcagactgcagatgggggtgagggctgctctttgtgcaggatctgctcgtcctgcccagccaggaacactgaaaacggaggggagctgagaagtccacacggggtgctgcacgtgcccatccaggcgtagactctgagggcatggaggcatggagttgtgccgttcacaacctgcacacctgtccacagcagccccgactgcagatgggtggctgttcatatgtcctccacaaacctctgcagctgcttatgacacctcttggctgtggctcatgaaacgatgactgcagccccaccctgaaggatccagccagccagccagccagctgtagcagctgtgagggggcaggtcttggtgcccagggctttcctaatgaccaagcctggccagcttcatgttcttggtctctgggcatctcagcaatggcttgaattatgccctggtatcaagctacctaaaggatggagacagagccgctgtggacacgaacaaaggcttttctccacaggttggtggcatctgtgctgggctgtagtgctggcttgggaggtccccgactctcgggcccccatgacggtgttgttcctgcaggtctgctgggggaggacactggcagggaggcaggtgggaggaggagagggcagggcttcccagagcgactgggaaggcactcccgctacagggccccacgggagcctccggctttccccgcacccaactctcctcaggcacttggttttctgccagtctctggagagtaggctttgcttagggccagtggaaaagttcctgtttcccactatgcagccaagtgagccagggcaggccagcgggtagaggaaggggataggcatgacctctcctgaacgggtttcaaaagcaagtcagtcaatcataggccagaggcgtggaaacttcttggcagaaacatttcctcttccaggaaacggcacttggtgttctcagggtgcccggggctagggtgccagcatgctgcctgggggtgggggtggagagggtttggagttgaggtaaccacagagccttcctgaaccagaagcccttgtgggcctcggaggctggcggggcccctacatagcacctgcagagggcaggggtacacgtcaggaactgaagggggagcttgtgcgggatgcggaggagccccaagcagggagctgtgagggtctctgtggctccagggagtgatgatattcggggagcccctaggaacttgctgatcagggaggcaggagagaagccaggagaggggcacagtgagtgagcctcagggagggcagggcacggccccatccaccccagtgtggggtggcacaaacagctgaggctccggagctgtagcattgacaactcaatctatttgaggccacactaaaaaccccaaacacccaaattctcaaaaacgatcttcaagagtgacgctaaatgccaactgtccctgctgcagcagtctcaggctgccacctcccctggctgtctgcaagggtctcacgctccgtcacaatcggagtgagctgggccctgggctccatgcaaaatgcaggggaagtggccaaggctagtcattctcaatgcagtcaaaatggtcattgttacggaagtgtcctgagagtcacaattccgcacagtcagcaggtacacacctgtgcatggggctgctcacccatcggggcaccataatgtctgtttgctgagcccggcaggctctggagccgctggtgagcgcacagacacagcccctctccggggcaggcactcacagcagccacaagcaccgccacctcgtggcctgtgagtcctccccggaggccaagctgtggttcagctggtgctgtctcctgcaggagcaccctggctggctcaggacttcctagccggggacacatgcccgtgacgtagggcctgggtcagcccctgggtcggggcgctaatgctctggacccactgagcccccagctgtggaggtcttcactgtctcctgacggatgttctcacagcagaggccacaacattggaggacagaggagctttacaggccagcaggagttgctcatagctgcgtcaccaaacccttgaccatgagaagaaagtatggggggcttgccatggatgggatggggactgcagagaggctggctcagctgtgcagatcggtccccattagggtcaaaattgcaggctccctgggcccacgcccaggagcacacacctggccctcatgaggccagcatcaatggtcaagatgggccaggagtggtctgtgggctatctcctcaggatttttaaaggttccctacattatttttttatttttatttatttaacattattattattattttgagacggagtcttgctttgtcacccaggctggaggcacgacctcagctcactgcaacctccacctcccgggttcaggcgattctcctgcctcagcctcccgagtcgctgggactacaggcatgcaccaccatgcctggctaatttttgtatttttaaaaaagatgggggtttcaccatgctggccaggctggtctcgaactccagaccttgtgaccgcctgcctcagcctcccaaagtgggattacaggcgtgattacaggcgtgagccaccgtgcccagctacattattttttacgtttagaaataacgtagaatttatgtaacgtggaataacaacaaagacatgtcagctagtcttgatttagtgaatgaaatagagaatcgcatctcaccgaacacgtattgacttaactaaaggtttaagacttcacagacacaggaggatgacaggagcgtgtgaacagatgggctcgaacagacgctgagctgcaagcagaccccacagcaccgagatgggggagcactgcaaactgggagagaaaatgccgctgtgttacgagatcttcaggctgtcgtttttctggccaaaacctctgtggctggggcacctttgctcaggcctgctgggctcatctcacccacttggcctggcaggctgcactaggctcacactacaggcctga

SEQ ID NO: 97564 - DNA, 31734 bp, Homo sapiens
gccttccccagcccattgtctcaaatgttaatctcttttggcaacaccctcacagacatacccaagatcaatactttgtatgcttcaatctaatcaaattgacactcagtattaaacatcacagtaggttttttattactgattcaatttcaggactcaatattgacctgttttgtatttcagtttcttcctgtttcaatcttgggagattgtgtgtttccaggaatttatctatttactctaaatttttatagtttgtgtgcatagaagtgctcataatagtctctgagaaggtttcgtatttctgtgtttctgtgggtttggttgtaatgtcacttgtgccattactgcttgtgtttgtttggattttctgtctgtttttttcttgttaatcttgttagagatctattgatcttgtttgtcctttaattttttgttgcgttgattctttgtttgaaactttggatttcaatttcattcatttctgctctgattttagttatttcttttcttctgctagctttggggttagcttgttcttgtttttctaggtcctctagatgtgatgttagatggctaaaataagatctaacttttcaaggtagacctttagcattataaactttcctctcaacactgatttttctgtatcccagatattgtgatatgctgtataattgttttcacttatttcaaagaattttttgatttctagctaatttttttcctcaaaagtcattcaggaacaagttgtttaatttctgtgtaattgcttgtttatggggttattcttgatattgatttctattttcattccaccgtggcctgagagtattgtttttttttttttttcttttctttccctttccctcttagggtgtgcaacaattgggaatgctgagcaaggctttgcccctatatccctatgcacttctgttggaaggtaagatgtggtggctcaggctgctgatccaggtgagctggtgctctgagatctagaaatctgcctgggcatggagtggagagggctttgttgcacaatgatctatatccagtaagagtggggcacctcaggctgctgaacccaatgcatgggtgctcagaatgtctggagacctgctttagggtgaagcaaagacagccccaatgtaccatgatcacaggggaacaggctgagacaaccgtcaatggcacatgcagactggttccaggtcactaaattggctctagttgtctcattgcctaggagacactgcagctatagcagttgtcttcccaccccaggcttgtaatagggaagagcacaattcctgcctctagtgctaagacgctttccacagttagggctatggaggtccctaccctgctccagagctggtgctccagtccctgtccagagattaaaatgcctgcatggccatgctggcagattgccacagaatggccgactgtatgcacctaccataaaaataattttcttctctcagtcctggattgggaaaaatatctgaagctttacccagtgtttttccctcacagaatgttcaagcctcttcccaagacagctccagtgtttggggaaaataaagtgctctcccttggcctgggcccttggatcccaagtggaaaggtgagtcacggagggaggtgctcttcctctctcatgtactaggactttactcatttttgtagccagatgccatcacaagggccgtttgctggcattctcattttttggatcaatggtgtccttcacaattctgtgaaggaaatttccattttccttcttgatttaaagttcacagagttggtctttatgcactatcttgctatttccaagtggttgaggcaggctaaaagcctctaatctaccatcttgaaaaaaaactgtcttatcaagttttaaactcatgatctgtgccgttacataactcctagaagatgagatattttccacatcacaaaaatttcctactatccatattggttgccagaaacattataaccaagcttaagaaagttactcatagccaaataatttcaaaagcaaaaatatgaaaagtcttcaaatatttgtaccgcaaaaattatatttattattgtatgtagatgctttttaacgcatttattctactatgtgaggcatctccaaaataattgtgttaaactactgagtttaattttgaatcctcaaatagccttgtatttttattgctttcctgaaccctaggatgaacacagcttttccttgagtcttttctttggaaacagtcattttaaaggactcagatataatcttaaaagacagctattggttagaagaaaaaacatagctaatatgcatgtacacacatatacatacattaaatagttataacacagtgtttcaggaaaagtggcagaaacttgaaagatctgatatactgaagacattaacaaaaaaagaaatgagaaaagtaggccttgatgacctcaagtaaacctatgtgacttatagggataataattttcattggattgaatggaaaaatacaatgggcaatattgagatgtctgcagtctcaatttagagaagctctgatatttgttggtatagatcattgtgtcaaaggcaagaaaaatattcatttaatgagaatctatcagtctaggaatagaggctgtgctcccaatgaaggtttatatatagtacaactgacttattccacttgaaccagtaaagttgggtcagcagaagctttctttagttatctctgaaattgataaaagaaagctaactaaagttaagggcttttacttattgattgcttctactgcagcattcaccctgtataaacaaaatgataaagattttttttttttaattttggcaaaccactcatgtctgaactgaaatggaaatcttagaaccaaaccgaaattttaggtgttttttcagaatttagttgcctttaagatatgaattatttctttatgttctatcactgtgaattatggatgaagtaacttgacatgttataaaaatgtgatagtctgtctgaaatattttgattacatatttttctgaagtctttttcttcttttttctttaaatacagtgttcatttctcatagtctcccatgcttgaggactatcctctgaatagttaagcttgctctgagcatgacaagtgatatggtttggctgtgtccccacccaaatctcaacttaaattgtatctcccagaattctgacatgttttgggagggacccagggagagataattgaatcatgggggccagtctttcccatgctattctagtgatagtgaataagtctcatgagatctgatgggtttatcaggggtttccgcttttgcttcttcctcattttttcttgctgctgctatgtaagaagtgtcttttgcctcccaccatgattctgaggcttccccagccacatggaactgtaagtccaattaaacctccttttcttcccagtctccagttgtctttatcagcagcatgaaaatggactaatacagtaagttggtatcagtagagtggggcattgttgaatagatacctgaaaatgtagaagcagcttaggaactggataacaggcagagattggaacagtttgaagagctcaaaaaagacaggaaaacatgggaaagtttgaaactttctacagacttgttgaatggcttcgcccaaaattctatggtgatatggacaataaaatccaagctgaggtgatctcagatggagatgaggaacttgttgggaactggagcaaaggtgactcttgttatgttttagcaaagagactggcggcattttgcccctgccctagagatttgatcttgagagagatgatttaggatatctggtggaagaaatttctaagcagcaaagcattcaagaggtgacttgtatgctgttaaaggcattcagttttataaaggaagcaaagcataaaactttggaaaaattgcagtctgactatgcaatagagaagaaaatcccattttctggggagaaattcaagccggctgcagaaatttgcataagtagcaaggagcctaatgttaatctccaagaccatggggaaaatgtctcagggcatatcagagaacttcacagcagcccctcccatcacggacctggaggcccaggagaaaaaagtggttttgtgggctgggcccagggtccctgtgctgtatgcagcctagggacttggtaccctgtgtcccagctgtgccagctgtggctgaaaggggccaatgtagagcttgggctatggcttcagagagtggaagccccaagccttggcatcttccatatggtcttgagcctgcagatggacagacatcaagaattgaggtttgggaacatccacctagatttcagaagatgtatgataatgcctggatgcccaggcaaaagtttgctgcaggggcgggatgctcctggggaacctctgctaggacagtgcagaagggaaatgtggggtatgatcctccacacagagtccttattggggcactgcctagtggagctgtgggaagagggccatcgtcctccagaccccaaaatggtagatctaccaacagcttgcactttgcacctggaaaagctgcagatgctcaatgttagcccatgaaagcagccaggagggaggctgtaccctgcaaagccacaggggcgtagctgcccaagaccatggaaacccacctcttgcatcagcatgacctggatgtgagacctggagttgaatgagatcattttggagctttaaaatttgactgcccccttggattttggacttgcatgggccctgtaacccctttgttttggacaatttctcccatttggaacttctgtatttacctaatatctgtactcttattgtatctaggaagtaactagcttgcttttgattttacaggctcctagacagaagagacttgccttgtctcaaatgagactttggactgtggacttttgagttaatgctgaaatgagttaagactttgggggaccattgggaaggcatgattggttttaaaaatgcgagaacatgagatttggaggggctaggggtagaatgaaatggtttggctgtgtccccatccaaatctcagcttgaattgtgtctcccagaattcccatgtattgtgggagggacccagggggaggcaattgaataaggccagactttcccgtgctattcttgtgatagcaattaagtctcatgagatctgatgggtttatcaggggtttccacttttgtttctttctcatttttttcttgccaccatgtaagaagtgccgtttgcctcctaccatgattctgaggcctccccagccatgtggaactgtaagtgcaattaaacctctttttctttccagtcttgggtatgtctttatcagcagcgtgaaaaatggactaatacagcaagtatttgaaatatgtggataggaataagaatttttgattgagacaaggtaggcttatttgagatatcataatttacaaatagcctaagaaacagaatttcttgaaatttatagtttacttagaatcagtgggaatcttaagaactagcaaatctaccattgctcattcttttccagctgcctactcctgtactaaacattttttaaaattgctttgggaaaagtaaatttcctttcctttcactaatgatcataataaataatatttggtgtaaagcagaaaaatcagtaagacagaaaatgcaaggaaaaaattatgtaaaatctataacactcagaatctgttaaatacaggatatttaagaattgacaataatcctcatcctactgttttttatttctcagcaagtgcaatgaatgttggcattgtttctcagactttggtatgacagtaaactataaaagtatttatttgacactaattataattaaggcatagtgagataatcaattgatgcagtctataattccctattcttaattttacaaaataaaaattcacagcgatgggagacctggtccagccctgtccattgtgacccacacctcctcaggactgagcagaaagagctgctgcaatgtaagttgatctaacctagttggaaagcaatttattaataatagtcagagacctcaaatatggatgttctttgggattctaatctaataaaataattaaagtagtctaaataatacaaaatacagataaacttcatgcataatattaataatggctgaccattataaagtacttattattatagaacagcaactgtgatatttcaaatggatcataccgtataatcattatcaaaacaattctgacatatttactatttcttcctatgatctcagtactttgggaggatcacttcaggtcaggagttcaagaccaccctgggcaatttattgaggcccccatctctacaaacaataaaaaaaattagccagtcatggtggcaaacagtggtagtcctagctactctggaggatgaggagggaggatcaactgagcccagaagattgaggctgcagtgagctatgatcctgttactgcactccagcctaggtgacagagcaagaccctgtttctaaacatatatgaaaaaacaaaaatataaaaatataaattaaaagataaaacaaaaataaaacagtaaaatttattaattgatgattatacaactaataagtgataaaactgggattaaaacttagtaggtggaaattcagaattcacacatttttcgcattttgaaatttttttaaaagtctgcaattattttaattttaattgacaattagaaatgatatatacttmtggtgtacaatatgatgttttgatataaacrgacattgtggaatagctaaatcaggctacttaacatatgcattacctcacatatttataatttttttgtggttggaagaacacttgaaatctactctcttagcaattttcaagtttatgatatattgttattaactacagtcaccacaatgtacaatagagctcttgaacttatttctcttgtgtaattgaaatgttttgtcctttgaccaacatctccttaatcctgcccctcgcccttggcctctggtaattatcattttattttactctctgtttctataagttgactttcctagattccacaaataagtaaaatgatgcgatatctgtctttctgtgcctggcttattttgcttaacataatgtcttccaagttcatccacgtgaactccaaatgacagaatttcattttttaaggctggatactattccactctgtatatataccacattttctttattcatctgttgatggacacttaggttgattccgtatcttggctgtgttgaataatgctgtaataagcatgagaatgcagatatgtcttggacatactgatttcagatcctttggatatatatccagtaatgggattggtgggttgygtagttctagttttaatgttttgaagaacttccaacctgttttccacaatggctgtgctaatttacattcccatcagcagtgtacaagggttcccttttcttcacattcttgccaacacttatcatttacctttttgataatagccgttctaacaaaatgagacratatctcaatgtggttttaatctgaatttacctgatgattactgatgctggccttttttcttataattgttggccatttgtgtgtcttctttggagaaatatctattcatgtctgctaatttttaaattgagttatttgttttcttactattgaattgcttgagttacttaaatattttggatattaactgtgtgtcagatgtgtggtttacaaatatattctcctattctgtaagttgtctttttactccgttgattgttttcattgctgtatagaggtgttttagtttaatgcaatccatttgtttatttttgtgttagttgcctatgcttttgaggtaatatccaaaaaattcattgcctaactcaatgtcaagaagctttttgcctgtgtggttttatagtttcaggtcttatggttaagtctttaatccatttttagttattttttaatacattgtaaaataagggtctaattttattttttgcacgtaaatatccagcttttccagtaccagttattgaagagactattctttccccattttatgttcttgtatccttgtgaaagatctgttaaccataaatgtgtatatttatttctgggctctttgttccgtttcattgttctatatgcctgtttttatgcctgtaacacactgtctttattattgtagctttataatataatttgaaagaggatgtatggtgtctgcagctttgttcttcctgcttaagattgctttagctattttgggtcctttgtagttttatacaaattttaggatttttttctgtatctgtgaaaaaggtcattgcgatttggtagggattgcttttggtagaaattactttgggtagtataaacatttttacaatattaattcttctaatccatgaacacaaggtgtctttctatttatttgtatcttcttcattttctttttttctgattcacaagccttttgtatctttatttatttatttatttagcctaatttctctggataggacttctagtactatattaaatagaagtggtgagagttggccgggcaaggtggctcacgcctgtaatcccagcactttgggaggctgaggtaggtggatcacaaggtcaggagttcgaggccagcctggccaacatgatgaaaccccttctttaccaaaagtacaaaaattagctgagtgcattggtgtgtgcctgtaatcccagctactcaggaggccgaggcaggagaattgcttgaacccaggaggcagagattgcagtgagccgagattgcaccaacgcactccagcctgggcaacagagcaagactccatctcagaaaaaaaaaaaagtggtgagagttggcatactagttttgtccctgaacttagaggaaaagttttcagattttaccattgaatatgaacattgagatctagtttgttgagagtttttatcacaggaagatgttaaattttttcaaatgctttttaactttgacatctattagccaatttccctgaattcaatgtactttttaggagaggcagcatgatagagaacactggatctcaaagtgtggttcccartcagcaacatcagcatcatccaggtatgactagttagaaatgcaaattcttgggttctagcccagacctactgaatcgtaagctctgaggtctgattcagaaatctgtgtcttaataagccctctatgtgactgtcatgcatgctaaaatttaagaaccaccagtttagtaaaggaagaaaaattttattgaaattacctgagtttaatcacattccacacccaactttgtaaatttgtgcaaattatttaatcttccatttctttctttacaaagttaaggataataataagtattgcatgggttttctataaagattatataatatttgctaggagtagtgagtgcttaataaatgggagttattgccataggatggttcattctgaaaggtctagctaacagcccttcacaaatgcctaatatgccttactcacatctcataagacacttcagtggctaatatattatgccaaattgggattcaaaaataatggctttctaatttggaaatggtgtccctgatacaattagctctttgcaactagagaatctattatagtctgtttgttaagtactaagcaaattctccttcttacagcatatcaatgattagccttgctagcttttgcgtatggtgcaaattaggcacttaaagtgcataagccgttctcagggaaatccacaaagtggtaagtgataaacaaaattgaacgctctcaataaagaatacctgggttttgtcagcattaccagtaggaaaaactgcacagaatactcaccttctaattggcccctctgttagaaaacaaatctcttgcctactgtgctataatactgacaggaaaaaggtaaaaaatataattgttatggaaagggccacttccttggcaggcttaccaggctattatattttttaggagctgaactttccccagggtattaattacccaaaatgaccacctggaggctgggtggggtggtggggagcactttgttcagggtctcaggttgcagggctctgtgataaaaacaccctcaccatctgtgataaccaccagcagccagcagcagccaggtaatgagatcaaatcattccccttaaactttaacctgtctgggtaagacaaaggctcagcaaagaggatatgtcattaaatttaatttagacttctggagtttagacttttgtttttatcaataaaataaatgtttaaacctaaagccatttgcaggagcagacacagtgaagctttgacttattgcctctagataatgctaggttcttgccagtgcatacattcctaataaaagcaaggcacatgaaaatggcgactgttgtctatttaaaatatctcttctggtctgtgtccagtgatcttacacatataagcttaacttttttggatgtttacaattttttttgagtttgtgaataatattataattatgttgagcctgaattataggtttgcatttgctaagcagaagacactgtctgcactaaatgactttttaaagagtttcctaatgagcagtggtgttcaatatgttgggagctgtgagcaccacatgaatcaaagtgctagctattaaaataggtcttcttaattaaatggaattatattttctttaaaggagctatttgactttatcaaacacattacaatttgactttatcaaacacgttacaaagatatgggggatgagtcagactcattacaggtggtaaagaaatgactggagttgaaattaaagtttccaattttctccctcctcttcctgctcctcttccctccatcttctgatttagttgcttttaaactgacagcattatagatgtctcatcttcatgctcacmctggtttttgcttaaggtcttagtgtgcctctgtcatttttgatttcacaaataacgcaggtcactccattaccttgaacttgcacatcaccattacacatagaagactgtaaatattttaaacatgatttcttggtaatttgtggtttaataactatgaaaattagccttacacatgtgtcaaggaaaaggcaaaagagggaaagacyaaataaaaagagaaccaataagaaaggcaagtaaaatctacatgctatgtagtctatgatcacataactccatgaaaagtttccttccaaaatgtgtaacgtttgtcactacaatatttgttgaatataagtgatgaatgactgaatgactttaggtcttgttagactacttagttgcctgctggtgcaccataactatgaytacaggaaaaatggccatgcrtgattataaggcatccaaataagacccattatgttgtgagctagtgcttttctgtattaccatatatctaccaagatgagatacagtcagagaggtgaggtttataaaacattcttaactaaaatattattgaacaatggaagaaggtgataaaaattaatagctattatgttatttaaaaattactatgttttttaaaatcaagaagagttttatctcagtgttctgcatactaaccaacttaccatgcacattagataaatcctaaataataatttgttataaatcttcaagaagttatttttctgcttataaaaaatatgtttattgttaaaaacttagaaaatagataaaataaaaagtaaaaaatacttagaattccacacataaaaatagcctctaacagattggatatttagctcattcttgcataacatttccatatttttaaaataatggacatcacatttcctctggggagccttcctatcctgcttatcctgactaggccagcttcctctcccatgatatccatattttccccacttacttaactcatcttattataaaatctatttaaaggtttgtccacccctcccaataagatttctaagtgaaatctaagaaatcatgtctcattcctctttgtatccctaacactaaacaccctgcatctacaaaattaaacctaggattgttaaaagaacaatgtataagttagttcaaatataattctctatccaacctttttcacttaacatatataaaagtattatcttatgtcattatatttcctcagaactccccctgcttttcctgaggcacagtattccatcatatgtctatactataatttctttttttttccctgaaacatttgagagtaatttgccaacatgatgcccatcactcccaaatattttagtatttatttctctcaaaaggatattttccaacataatcataatcaaaaatttatagatacattactaccctcattagagtatagatacatattgtagattagacaagttccaccatttgtctcaataatgtcctttgtaaaagcgaaaggatgtcagtcagaagcacacactgaattcacttgtcattccctcttagtcttcagtcttcccataacattcatgatcttgaaagttttgaagaatacagaccagtaattttggagaatgttcttcagtttatgtttgtctaatgtttcctcacaaatagattcaggttatgtatttctggcaggaatatcacagaagtgatgctggggttgttgttgttgctgttgttgtttttttgagacggagcctcattctgtcaccaggctggtgtgcagtggcgtgattatataagcattccccagctttttttgtgattatagaaagcaatgtgttactgcaaagaacacagtacagtagaaaagttataattatacaggatggataagctatgaagatcaaatgtacagcatgtgactatagataataatagtgtattatatacttgaaatttgctaagagagtatatcttaagtgttcttaccatacacaaaacatggtaacagtatgaggtgatggatatattaattagctcaattgtgatagtcatttcactatgtatgcatgtatcaaagcatcaagttatacacattaaatgtatacaatttgaatttctcaagcatatctcaataacgctggagaagaaaaatgatacttgtatttcaagaccttaaaaatctaaaagagagatatgtgtttacaattagtaggcagaacacagaaatataacaaaagtaaaatcaatacatctgaaagcatcaaactaggagatatgaatttcaataagacattaatttgacttcagggaaaataatttctgaatattacgtttattcttctttatctcaaatgtgttctagggcaaagtcctttcattctgtttttcttgcttttttcacactaggtattttttatgagcttcatgtataaattgagattatgaaatagttgattccatcttctgactattgtagtctagcaacagtgggaatgagaatgaaaaaggagtcaactttagttgcatgttgagtttgcctgtagagtatccttaaggggcagctgaccaagaagcagggagaacctagaactccaggaaccagttggttgccctgattttgctgcaggagaatgtcttgcctgagggtctggtttattctgaatgcctctgaagagaataatgtgttctcctgaggggcaaaggagaattttgttttaaataaggaaatactcaggatgagatagagtatgaaatgacttctgagattcagtagggggcatacttagacttaccagattaattccacaccctgcccccaacccccacgtgccctcccatttcttttcttttcttttcctttcttttcctttctttctttctttctttctttctttctttctttctttctttctttctttctttctttctttctttctttctttctctttctctctttctgtctttccttccttccttccttccttccttccttccttccttccttccttccttctttctctctttctctctttctttctctctttctttcctttctgacagggttttgccttgtggcccaggctggagtgcagcggcacaatcacagctcactgcagtttcgacttcctgggctcaggtgattctgtcacctcagcctcctgagtagctgggactacaggcatgcgccatgaagcccagctaatttgtttgtttgtttgtatgtttgttttttgagacggagtcttgctctgtcgcccaggctggagtgcagtggcgcgatctcggctcactgcaacctccacctccccaagccaggctaatttttttattttaattttaattttttgtagagatgggttttgccatgttgcccagcttggtcttgaactccgaagctccagcgatttgctctcgcagcctcccaaagtgctgagattacagcatgaatcataatgcccagcctcctacaaaactttaaagttaacactttgcttttctacatggaaattaccaaatcttctatagccttctttttctttatcctctcctccactgttcattttctctgtacaaattgcttttagagactagttacagtacaggctggaacaccttccttggtgtcttctaatcatagataatggagtggtcattgtaaccaagggctgcactgacagtcctttgaggtcgaataccctaaatccatagactgtgccaaaagttctctccatgtggatgttttcaacattttataatttattttttttaatgaaagattctcttggtttttctttacatgccaaggccttacctgaaaacatgcattttaatttggtatgtttaactttgagaaattatsatccaaagtgttcttaatatagaccctggatttcctgagatacacwaaattacaagtttcttctctgttgtctacataagtatatgaaatcaaagcatgttcttatttatttcataacttttgaaatgaataataaatgttttcagtcctctacagtgtaccaggttctatgttaaaccgtttatatgcattttttaaaaattgaattcccattgtaattctatatcataggtgtcattataattcccattttccagatgagggaactgaggcttataaatatttcataatttgtayaagatcataccaatagggctggctacataatttgtgggaccacgtgcaagataaaaaccgtggacccccttgctcaaaaatcagaacaaaagcttttccttttctttatcagtgtctttctctcaagttgtcatagcggttttatttgctgttgaatattgtcctggcttgggcataaggatactcaagtgatacatgtatactctaacaggtgcccagaacctagagccctgccctgaagcttattgcattgggcataaaagcccaacctggccttagcctgcccaagcttctccaggggcagaagatagcagtggtcacaaggcagggataggagggaaaacctaggtgagatgtgggtggcagaggaagagggatcaggcagctgagaatcagttctagggatgtgtggagattgtgggaggtaggactatacctgcactgaggctccaagtctttggtgcacatgccattgtcttatcagacttcacttaagtcacaaatccaaagataagtttataatgaatttcaagacagcaactgtaagacattaaaacccaaacacaggawcctcttctgagctgtgccttcagaggagttcgtttaaaaaaactgaagttgatgaaattacataaagccatataccatgaaggcatatagcacttgagtactaacaacagagtttggaatccatcacagttaggtaggatgccaaagcctagtatactagaagtcatggtaatttagtagaggaaataggagtcatacatgttcattaggtatcaaaaactacttagtgaaaagaaggcttttactaagacaggaagaatcatatggtctratgctgggtggaaagtctagcacccacctttwaggcaatctatgctatttcagggttttactcttagtaatcattatgctttcaatcaaatgattttgcctgcatattattatctatgtgaaagcatgtaaaatgagtagtgttaatgcatcatttttattgctttaaaaaaggttycctttttggtgacctggaaactttcctgcctagcttgttaattaggtttttctgaagcagtgctcagtcttgaccatgtgattcttggtcacagacagtggccaccctagagtgtaatggtcaacctccctgagaatttggagaggggggtgtcctctgtttggagtggaggctgactcctagctgcagcttactttgcttttataatttaataacaaatttccctattatgcctgtgttcaaatttcatctgaagaaagaaaagcaaatccaccaccagacgtgcacgtttcccaatacccttaataaaacatattgcacagtgtggagtgacattttaaaagaacagacctttcagcagcttgtctctatgccattgtgcataactaaagcctgctaggtcacaaagggagatgcagggaagtggattaatatgtaaaccaacctaggcaccttcagatgatgaattctaaggtatactttgtgaattcatttcattttgagagcagttgtgcccagaaattaatttgtattcataaagcttccccattttctctttagataatgacaagctttgttcttcttgaaaagtttgtttttaacaatgtggcacattaattctgtaagataaatatttctaaccaaaggatggtatagaaaattgttgatagaaaataatatattttggaaaaacatatagaatgtcccagttctcacatagtgcctgccttagaaatgcaatggatggagtctgtgtgttttgagatttttaaagaaactcattaaaattcatatatgtaaagcttattttaacaaaatagacataaaaggactcttaatttctgaacgaatcactacagctaaaagcattgggatttaattgttgcccggtccccagcacacggcagtcttccacatcaggtgagagccagcatcacagagcttaggggatttgagcttgcctctgaggacagggatctgagagtctgasgtccttttgaagcttccattgtgtattgctccaataaatgtattatagttctttccagagaatgacaaaacattatcttaaaactacaagtttttcaggccaccattacagacagtggcttaactatgataagtacatttcaagctcctatgtcttagattccacctaatggactgtcaggaaaaagatggagcttcatgggtcaagcatttatcagttgttgacttcctaacagtagctcatcccttcttaagaatattacttcagagcaagtgtgaaaaaaaacaaaaaacaaaaaaaaccctaagctctgtgaaccgtgcattttcttttgaaaactctgaataaagatgcctccaattagtcagggaggataaaggatgcatttgattacatgatgggcatgcaagctttgttgatgcaatcactcaactttatcatttttttctatcctacagtgcctggtgttattaagacaatatgtctacagatttcaaaataatccattgactagaaaaatttgcatcactatggcttcaatagacaaagtattcaagacagtgcttggaattagtagctttcatttatcctgcctacaggaagaggaagacaagttttaaatgacagctcttaaagatggtggcggagtcccaggaatgatgttgagaatcaggctgcatttctgagaaagcactcagagctctttgctcttgtatactgccaatgtggaatcacttctaaatttgccttaatccaactcctaggaaaaggaagttttacctgccacaatgctccacacaaagaaaaccgagtaagtcttgtcaaagaagtactcggtggatgcagggcgtttctctttttgccagcttccttggctcaaatcccatgcaaaccatctcccttcagcactagagggaggtgattaaccatagaatccaattaaaaaaaagaactaaaaatccctaattcttcttttgaatgataagagatttggacaaaacatttaactgaaaaacaattatctcaaaaaatttaaatcctagttgcttcatgagcactctagcactgggccgaacctcctttctgtactgttgaactgaccttctcttccctgcctcactcttaccgaggtatagtccttcctctcgcttctttggtgattagctcatgtaatctaggagtggctgwatcatacttattttattctaattgttgtccaacttttccattattaccacgcatttctttgagaatcaaaaaagtttattttaaaaataaatggaaaggatgatcaaaattagaagatacgtaaaatcagtgttggaagctttctttcttgtaccagaattgcatacctcacaattcatcttttcagaaacgtgttagtaagtactttttatagmtgcatgcatcatagtatcattcgattttatttatgcatggtctgtttctttctttcttttttttttttttttgagacggagttgcgttctgttgccgaggctggagtgcagtggtatgatcttggctcattgcaacctctgtctcccgggttcaagcgattctcctacctcaacctccctagtagctgggactacaggcatccgccaccatatctggctggtttttgtatttctagtagagacagggttttaccatgttggccaggctggtctcgaactcctgacttcaggtgatccacccgcctcagcttcccaaagtgctgggattacagatgtgagccaccacacctggttatgcattgtcaagtytctaattaatattacctcaaccatggtggagctggttggcgtgaggaagtatatccaacaaaaatggtgcaagcctcaatgtacatgaacaatagggttgatgttaatgatgacgatgccacccaagttaagaacaaatgacctattcatatagctcactttttaagttcctatttacattctgaagcagaacgagaaaaaactctgatttaattttcctaatatcaaggaaaaagatagtcctatggcaaaaagtactgctccaattttgtaatcttctgttaaaaattaacagaaaaataaatatttctgatgatttgtaggttttaaggaggatagactttattctcttaagaaaaatttcccagaaaaactaagtaagctctatctaatggtagtgtatctataatcttagaatgaggaaatagaaaacattctgaataaatttaaaatggttagttggtgtgtgcaactttacttactagagctacttgaactaagtagcaygtatgttttytactctcattttttagttaatttgtctaggaaacaagtgattatgaactatacaataacgaggctaaagttgcatctgaattttctattaggctattttctagagcagctttatgtcctcagcaaaattgggcagaatgcatagagatttccattataccccctgccctagaacatgcatagcctctcccagataaacgttcccaagcagagtaatatatttgttataactgatgaacctacgttgacacatcatcaccaaccagaatccatagtttacgttagttcactcttggtgttgtacagcctatggatttggacaaatgtctaatgacacaaatccattcttttagaatcatagagagttgttttactgccctaaaagtcctctgtgttctgcctatttatctttctctccccaacccttgacaacyactatcttttcattgtctccaaagcattacctttcaagaatatcagatagttggatcacacagtatgtagcgtttttcacattggccttgttcacttagtaatatacattkaagtttcctccctgtcttttcatggcttrataggtcattcctttttagtgctgaataatattccattatctggatgtaccacagtttatccattcacctactgaaggatatcttggttgtctcttaagtttgggcaatyataaataaagctgtcataaatatcatgtgcaagtttttgtgtggacatcagttttcaacttctttcagtaaatactaaggagtgtgattactgcatcatatgataagagtatgtttagttttgtaagaagctgccaaactgtcttttaaggcagctgtaacactttgcattcctaccagcaaagaatgagagttcctgttgttccacatcctcagcaatatttgtttgtattagcgttctgcattatggctattctaataggtatataatatctcattactgtttttatttgcatttccctggtgacatataatgtaaggcatctcttgatatgcttatttgccatctgtatatcttcttaagtgaggtgcctgttaaggtctttagcttatttttaaattgagttgtttgttttcttattgttgagttttaaaagttctttgtatattttggataacacttctttatcagttatgtcttttccaaatattttcttccagtttgcctctttttattcttttgaccatgtcttttacacagcagaaaatcttaaatttaataaagctcagtctcttaatcctttctctcatggattatgtcttcagtgttattctaagaataattgtcatcaccaatcccaaagtcgtttaggttttcttrtgtgttatcttctaggagtttgatagtttttcattttacatttagttctgtgatccttttgagttaatttttgtaaaggttataaggtctgcatctagaatcatatatttgcatgtaaatgttccgttgttccagcaccatttgttgaaaatgctatattctcttcattgtattgcctttactctgtcaaagacctgttgactatatttacaacagtctatttctgagctctttattctgttccattgatctttttgtcggctctttcatcagtactacactgttttaatggctatagctttgtagtacgtcttgaagttggagaatgtcaatctgccaactttgttcttctctttcaatattgtgttggctatcctgaatcttttgcctctgtctataaactatagaatcagtttgttgatatccacaaaataacttgctgggattttgattgggatgtattgattctatagatcaacttaggaagaactgacatcttgacattattgagtctttctatacatgatccataaatggaatatctctccatttatttagtagttctttgggttctttcatcaatgttttgtggtttttctcatatagatcatattcatatttcattagatttctacttaagttttcatgttttggggatgctaatgtaaatgtttttttatttcaaatttcacttgttcattactggcatataggaaagtgattgggttttacacactagtcttgcattctgcaaccttgctataatctcttattagtttcaaagtattttttgtcaactctttcatatttcctacatagacagtcatgtcatttgtgaacaaacacaatttaatttcctcctttataatctatttcccttttgttttcttttttgtcttattgtattagctggacttccaatacaatgctgaaaaggagtggtgagatgacacatgtttgccttattcctaatcttagtggtaaagctttgagtttttcactcttaagcatggtgttagctgtaggtttttttgtagatattcctttaacaagttgaagaatttctcctctactcctaatttactgggagtttttgtcatgaatgggtgttcgttttcatcaaatgtttttctgcatccattgataggatcatgtgatattttttctgtaccctttgatgtaaagaattacactaattgattttcaaatgttgaacaagtcttacatacctggaataattgctacttagttgtggtatgtaattcttttgatatatctttggatttgatttgttagtcattttattttcttgtaatgtctttgccaagctttgatagtagggtaatgcctgcctgacagaatgggttatagagtattccttcagcttataatttctggaaaatgtagtagaaaattggtgtcatttatttcttacattttgttagaattatcagcaaactcatctgggcctggtactttctgttttggaaggctattagtgattgattcaatttatttaacaaatataggcctattcagagtgtctattgctttttgtgtgagttttggcagattgtgtctgtcaagaaattgattccatttaatcaattttttaatgcaacagataaaaaaataagccctagacatttctgtatcttatggtttcagaaacagtttgactatcattcctgaagtgccagagtttgagcaaacatcacataagtggtaagttctcaaagaagtggagatctttttccctttatactcactataatgacctgtctttaatgctggaccgtcttactagggtggaaaaatgttaaactgatttattgttatgccagcagaaaactgcccttttaattcatagtaaaacatttttctgtgtcctaataactgactgaagggagggattcagtgaatgaagggaagaaaatatgcacacactaagataacaacaaggctctaaaacgtagtagtacacaaatatgccaagtatgtgggaaactttataagggatgctacatgaccataactgataaggaagaaaayaagagtcagtagttatgagtcactctgggtaaggttggcagacacagagcttgtttaccatctccctgccccaggaaaatcagaccaacccagcattttttggtccagtcccattctactcctgtgtgtaaacccagttaatcactaagaggtcaaccacttcagtttgtattttttaataaaaggcctatttttcttccctatatcattctccttaaggattaaacctgacatttcaagatgccaaaaggttgttatcctaacgcattgatgcatccttttgccaagttgcctgggttaatgctcataataaaggccaatgtttcaatcattgcaacaggagtaaagagaactgtttagccagttattttctgaactgaaatgttcaaatatattggatttctcaattcccaatctagggcatcaaatcaagtgcattctctagagaagaataaactgacagctccctctcatccagctcagaacaaaatatcacgttattcaatagagtaaaagaaaactttaatgattttttcgtgaggagtgtgagaacaggctaataatttagctaaatttgtcagtaaatctggacaaagcttatattgcaaatgttttctttcttaacattaaatcaaaagtctagaagaaagaatatgaatattataagcatgtaatatatattacatttttacaaagagatgttatgaataaatgtatgctatatttctgactccgatcatatttctgtattccctcattctgtattagatgccctcccataattaatctctgtatatgtctgtcaaagaacattgtaatcagtatttactatttcttttggtagaacacaaatgcttagaacatagatatttcagttgtttctgtttgtgaacccagcccatggcatagtgtcttatataaagtgataattataaaatagataaatatatgaatatgaaaacaatggatcaaaagtgtgatggttttgtaatatcattcctgatttcagtttcatccagttactaagaatttggccttcttaatcaaacagcatgtaaacctgaaacattccttaactctcggccctgggtgatttactggtcctctttaagtgttagtttcttgatatgcagtgtgagagcaattataatgcctacaaggttttcatgaggatcaaatgaggggactcatccagagttttcaaaagactgtgtgactcataataagtgctcagtaaatgttataaaacgcatatttttttcaaaattaaaagtcaattatcacacttcttagaaatcatggcttggcccttatatgagaatgtaaaagaattagaatatgaatgagctttggagttaagatacctggctttgaattccactttttagcagccggaaggggtcttaggcgtctctaagtatttcacagaataaggatattcaaattaattcatgtttgttgtgagaattaaatggaataatacttgcaaagtacctaaagaagtgtagtaacacaatatatgattcactttccatttagtagactcaataagtagataaagttagctttgcaatgcagaaattatatatcagtcaccccaaagaaattcagaaaaagtagatttgatgaccatggataataaaaaatttccattgatatgtagtaacgctgagagtaatgattaaaacttgacattgttaaaggtcagaactcttctccctacttgttcaggtggtttgatctttctggaaaagtctttgaatgggatagaaaggtcagttttatgtcaatgtagtaagccttggggcatcaggactgtgtctggtaactatctttcaaagtgcctctcttagtgagggatacactagaagaaaatccatacaaaattgttcatcaatgactggccaatttttgttctatctcctagtgctgcagaaatgagagagtgcacaacgtgccaaatgtactaacattctaaaagcaggtaaaagtttatagtgttatagctcagtctagctttcttcctgtaaaatacatttaaaattaatgtatgaatcaattccctagataaaaatagacttgttgagagcctgtgtatggggtgcgctatcattcctcgaattgtatacatagaggacagagagacaaagaaatagagatctggaaattttcttcttcctcttttttttttttttttttttttttttgagacggagtcttgctctgtygcccaggctggagtgcagtggtgtgatctcggctcactgcacgctctgcctgccaggttcaccccattctcctgcctcagcctcccgagtagctgggactacaggcacctgccaccacgcccagctaacttttgttttgttttttgtatttttagtagaaatgggktttcaccgtgttarccaggatggtctcgatctcctgatctckcratccacctgccttggcctcccaaagtgctgggattacaggcgtgagccaccgtgcccgacagagatctggaaattttcaattaatttgattattgtagatagtaaatacttctttttctgtataggtatatctctgctgtgttagaatttgatgcatgcaacaatagataaaagtttaattgtatactttctgttttatcttgactcagaattgggaacacatttaatgaaaaaaatcattcagacttcagcacyatacctcagcaagtaatttgagtaaaaactgaatactgaaggtgtttatttcaacttgattattctttattacattgcrttactgttttatactgattaaaatgytgactttctatgttaataaaagattatattaaattttttgattttccaaaattggcaagatggaaatatttacaagaagttctacttgcctgtgtactaagtaatggaatataagatttcaaaattaagatgaccaaaagcaatttggggccataaactgttctggtgtttgtttttcttgagacaattgtaaagcttgcctagaaacttttaagatacctctatataaatattgaaataagggtatggaagtggagtcttcagctgtacatagtcactccaagcctaattctccatcctcactcaggtttattaccctgacccttatttgtgctaacagttatcaaaaaagacattgtatatttgtaagcgtattcattaaattgatgcatttgaaaggaacaaattttaattctaaatatctgttttttgtagtaattttaatgggaatacatcttagccacagcactaatttacatcattttatactctcatgttaaatccctataatgtaatgtcactgtatatcctcccaagaggcatttagggacatatagctagttcatgatggaactacatactcatatgatcaaacagagatgttaaggattcatatgaaccgagaaatgaggttttcacatatgaaagcaaatttacccatgtgcttgcagttctgcaggctacttaaaagtgctgtgcaaaagccttttaaatataactcttgattcccattgcatctttgcatttcatcatatcccaaaatatactgctacctaaagtctagtgttaggaacatgcactatgatgagatgtttgaaaaataacataattaaaatataaatccagtatgtatgtctttatcaactttaaatatctccaaatttacctggatgtaatagcaacataaaagttttagatgcctaaggacgtcactagcagaaggtaatgtagaaccaaaattatcactccaccacttagagtaacaattgcagacatccacagggaagaaacctgatagtgaacttcacaaaagctaaggactaaggttacctcccagataattggtacctgatgggaggcacctgcaccaatgaagaattttgtatgctagtgagacttttatattttccccttttattcttactaacctgtttgaaaaatagctggtatggatatttttttcctgaggtaggtcctagtggtttgaaagaaactatctctaattaggccagagcaattcatgtagaaataatataaaatgaattcctttaaaatgtttaattatgaagtattataaatatatataaaactatataggacatatccatgtgccagtaatccatatttacctgatgtttctttatatctaatttttaaaaactgaaacattcagatataaataaatcactcctcccgattttcccctccctccctttgtttctcaccagaggttatcactatcttgtagctggtaggacacatcatcaggcatgtctctatactttttaaaacataggcatgagatcataaataatacaaaaaaatattttggatgctttcctattttatacaaatggtatattatacaaatcctttcacaacctgctaatttcactgaagattgtttttatgatttatctattttaatgcatgtaaattagttcattcattttaatttatgtatagtattccattatatgaaaaaacacttgatttctttattgatggtaattatcaatgatttttacaaaatgataaatgcattcttttgtacatgtaagaaatactgaagtttatatcgaactggaattgccagatcaaagggtatatgcttttgcaactttaatgaatatagccaattgctctccagcgttattttattttaccaaatcatactcccatttacagtggataagaactcttgttaattcatatactaagcaacaccttttaatttttgtcaaagtgatttatatttcatggaaactagtaataataagaatctttttatttaaatttttattaaagtgaaatatcaacacaaaattgagtaaaacaggaaaaacagtcagacttcaagtttgcaactttcttttaaaatccattggatgcagcacaaacaattggctgaaaatataaagagagacggtgcctacagagagagtgaagatgtgagcactcacctgagctggacacaatgggacaccaaaatccagctttcagcaaaaaaaaaaaaaaaaaaaaaaaaaaaaaaaaagtgacatatgagaaggcaggaagtaacacaataagatgagcaaggattaattagaataaaactcagatatgacacagatgttgaaagtatttgacagggaatttaaaataattacaattcatatattaaagatgctaatggaaaaatgtggacaacatgcaagatcatatgggtaatctcagcaaaaaggtagaaactataaaaatgagtccaattgaaatacgagaaatgaaaaatatgagacagaaatgaagaattccttcaaaagcctcgttataggttcaccctggaggaaagaagcatcagtgaatttgcagcaaggacaatagcggtggggccaagatgatcagctagaagcagcagtgataggaggctcccatccaaaagaaccaaaacagtgggcgaatcctgcactggcaactgaggtatccaagtttctgttatcaggactgactaggcagctggcatgacccacagagaaggaagagcagtggggtatgacagcccacctgagagccacatggggcaggggagcccccaacccccagccaagggaggtggtgagtgagcgtgctacccagcctgggaagccctgctttgtccatggaactgtgcaaccgacagactggaagatcccactagtgagcccatactactggggcctggggtccaaaccacagagccacgcagattctcaacagccactcagctggaatctgcttaagctgatgtctaagccatctgaactccttgggggaggggcggcagccaacactgggactgttagcttcctaacacactaagatcccagagcaggggaagggcagcagccatctctatagctctgggctgcacttttcccctgctggagccagggaggctggacagcttgatcccaagtggtattccccacagcccaacacaccagctgtggcagactgcagccagagtgcctcttcaggcctgacccttacccatccctcctcaccaggtggggcctccctgtagtaactccaacaactccagccaggggctcagggacagaattttgatctccctgaacctgagcccctagggggaggggtggccataagctccgtggaccagcagacttagtctttctaaggagtctagttctgaggaatctgggcagcccagatgagtgggattccccccagcatggcacacctcctccaccaagggacagccaaaatgtactgttaaatggcttttgctccctttgccacccaactgggtaagaccgtccaacagggattgtcagacaccctatacaggagcactcctactggcatcagattggtgcccctcaaggtcagagatcccagtggatggagcaggcacccatttttgatgttctccagcctcttcgagtgacatatccaggcacaggattgaagcagatgaatagggcctgaagtgaacccccagcaaaccacagcagccctgcaaaagagggacctgaccattgaaagaaaaacaaacaaacaggaatcaacaaaaaatgtccccacaaaaaccacatccgagggtcagcagcctcagagattgaaactaggcaaactcatgaagataagaaagaatcaatgaaaaaacgctgaaacctaaaaggccagagtgcctcttctcctccaaatgatcacaacacctctccagcgagggcacagaactatacagaggatgagataaatgaattgacagaagtacgcttcagaaggtgggtaataaataacaaattctgttgagctaaaggagcatggtctaacccaatgcaaagaaggtaagaaccttgataaaaggttacaggagctgctaactagaataaccagcttagaggggaacaaaaatgacctaatggagctgaaaaacacagcatgagaacctcataaagcatacacaattaccaatagccaaatcaatcaagcagaagaaaaaatatcagagtttgaataccatcttactaaaataatacaggcagacaagattttagaaaaaaagaatgaaaaggaacaaacaaaacctctgagaaatatgggactatgtaaaaagaccaaacctatgattgattggagtacctgaaagagaaggagagaaaggaaccaagttggaaaacatacttcaggatactatccaggaaaacttccccagcctagcaaggcaggccaatattcaagttcaggaaatacagagaacaccactaggatactccacaagatcaaccccaagacacataatcgtcagattgtccaaggttggaatgaaggagaaagtactaagggcagccagagagaaaggccaggtaacctagaaagggaagcccatcagactaacagcagatctctcagtagaaaccgtacaagccagaagagagtgggggccaatattcaacaatcttaaagaaaagaattttcaactcagaattttatatcccgtcaaactaagctttgtaagcaaaggagaaataaaatccttttcagacaagcaaatataggggattttgtcaccaccaggcctgcctggcaagagctcctgaaggaagcactaaatatggaaaggaaaaaccagtaccagccactgcaaaaacacaccaaaataaaaagaccaatgacactatgacactacgaagaaactgcatcaactagtggacaaaataaccagctagcatcatgatgacaggatcaaattcacacctatcaatattaaccttaaatgtaaattgtctaaatgcccctattaaagacacagatgggaaaattgaataaagagtcaagacccatccgtgtactattttcgggagacacatctcatgtgcaaggacacataggctgaaaattatacggatggaggaatatttaccaagcaaatggagagcaaaaaaaaaaaaaaaaaggcaggggttgcaatcctagtctctgactaaacagactttaaaccaacaaagatcaaaaaagacgaaggatattatataatggtaaaggaatcaattcaacaggaagagctaactatactaaatatatatgcacccagtacaggagcacccaggttcgttcataaaacaagttcttagagacctatacttagactcccacacaataatagtgggagactttaacatcccactgtcaatattagacggatcaattagacaaaattaacaaggatattcaggacttgaaatcagctctgggtcaagtcaacctaagagacatctacagaactctccaccctaaatcaacagaatatacattcttttcagtgccacatggcacttattttaaaatagaccacataattggaagtaaaacactcctcagcaaatgcaaaagaactgaaatcataacaaacattctctcagaacatagtgcaatcaaattagaactcaggattcagaaactcacttaaaaccacaaaactacatggaaattgaacaacatgctcctgaatgactcctgggtaataatgaaattaaggtggaaatcaagaagttctttgaaaccaaggagaagaaaggcacaatgtaccagaatctccgagacactgctaaagcagtgttaacagggaagtttataccactgaaatgcccacatcagaaagctagaaatatcgcaaattgacaccctaacattgcaatgaaaagaactagaaaagcaagagtaaacaaatccaagagctagcagaagacaagaaataactaagatcagagaagaactgaaggagatagagacacaaaaaatccttcaaa
